United States Patent Application Publication US 2026/0240958 A1 - sequence listing, part 15

SEQ ID NO: 13345 - RNA, 5785 nt, synthetic construct
  source 1..5785: mol_type = other RNA
aggaaataagagagaaaagaagagtaagaagaaatataagagccaccatggcccctaagaagaagcgtaaagtgagccggatggaacgcctcgtctacgaggtgcggcagaagtgcagaaacatcgaggacatctgcatctcctgcggatctctgaacgtgaccctggagcacccactgttcatcggcggcatgtgccagaactgtaaaaactgttttctggagtgtgcctatcaatacgacgatgacggctaccagagctactgcaccatctgttgcggcggaagagaggtgctgatgtgtggaaataacaactgctgccggtgcttctgcgtggaatgcgtggacctgctggtgggccccggcgccgcccaggccgctattaaggaagatccttggaactgctacatgtgcggccacaagggcacatacggcctgctgagacggagagaggactggcctagcagactgcagatgttcttcgccaataaccacgaccaggagttcgacccccctaaggtgtaccctcccgtccccgccgagaagagaaagcccatccgggtcctgagcctgttcgatggcatcgccaccggtctgctggtgctgaaggacctgggcatccaggtggataggtacattgcctccgaggtgtgcgaggactccatcaccgtgggaatggtgcgtcatcagggcaagatcatgtacgtgggcgacgtgcggagcgtgacacagaagcatatccaggagtggggccctttcgacctggtgatcggcggcagcccttgcaatgacctgagcatcgtgaacccagcccggaagggcctgtacgagggaaccggcagactgttcttcgagttttacagactgctgcacgacgcccggcctaaggaaggcgacgaccggcccttcttttggctgttcgagaatgtggtggccatgggagtcagcgacaagcgggatattagccggttcctggagagcaaccccgtgatgatcgatgccaaggaagtgagcgccgcccaccgggccagatacttctggggcaatctgcctggcatgaacagacccctggccagcaccgtgaacgacaagctggagctgcaggagtgcctggagcacggccggatcgccaagttcagcaaggtgagaaccatcaccacccgaagcaacagcatcaaacaaggcaaggaccagcactttcctgtgttcatgaacgagaaggaggacatcctgtggtgtaccgagatggagagagtgttcgggttcccagtccactacacagatgtcagcaacatgtctagactggccagacagagactgctgggaagaagctggtccgtccctgtgatcagacacctgttcgcccctctgaaggagtacttcgcctgcgtgagcagcggcaacagcaacgccaacagccggggccccagcttctctagcggcctggtgccactgtccctgagagggagccacatgggccccatggagatctacaaaaccgtgagcgcctggaagcggcagcctgtgcgcgtgctgagcctgtttcggaatatcgataaagtcctgaaaagcctgggattcctggagagcggctctggctccggcggtggcaccctgaagtacgtggaggatgtgacaaacgtggtcagacgggatgtggagaagtggggccccttcgatctggtgtacggcagcacccaacccctgggcagctcttgtgaccggtgccctggctggtacatgtttcagttccaccggatcctgcagtacgccctgccgagacaggagtcccagcggccattcttttggattttcatggacaacttgctgctgaccgaggatgaccaggaaactaccactcggttcctgcagaccgaagccgtgaccctgcaggacgtgagaggccgggactaccagaacgccatgcgggtgtggtccaacatccctggactgaaaagcaagcacgcacctctgacccctaaagaagaggagtacctgcaggcccaggtgcggagcagaagcaagctggacgcccctaaggtggatctgctggtgaagaattgcctcctgcccctgagagagtacttcaagtatttcagccagaatagtctgcccctgggaggcagcggcggcggcttccaggagagcgtgaccttcaaggacgtggccgtggacttcacccaggaggagtggaagcagctggaccccgcccagagggacctgtacagggacgtgatgctggagaactacaggaacctggtgagcctgggcctgcccgtgttcaagcccgacgtgatcagccagctggagaggggcgaggccccctggatccccgaggtgcccaggagcatctgccagggcgaggtggtgaggaccaggggcggcccaagcagcggcgcccctcctcccagcggcggcagcccagccggctccccaacctctaccgaggagggcacctctgagtccgccacccccgagagcggccctggcacctccaccgagcccagcgagggcagcgcacccggcagccctgccggcagccccacctccacagaggagggaaccagcaccgagcccagcgaaggcagcgccccaggcaccagcaccgagcctagtgagcaggagattaaacggatcaacaagatcagaagaagacttgtgaaagacagcaacaccaagaaggccggcaagacaggccccatgaaaaccctgctggttagagtgatgacacccgatctgagagagcggctggaaaacctgagaaagaagcctgaaaatatcccccagcccatcagcaatacatctagagccaacctgaataagctgctgaccgattacaccgaaatgaagaaggcgatcctgcatgtgtactgggaagagttccagaaggaccctgtgggcctgatgagccgggtggcccagcctgccagcaagaagatcgatcagaacaagctgaaacctgagatggacgagaagggcaacctgaccaccgccggctttgcctgctctcagtgtggccagcccctgttcgtgtacaagctggagcaggtgtctgagaagggcaaggcttacaccaactacttcggacggtgcaatgtggccgagcacgaaaagctgatcctgctggcccagctgaagcccgagaaggatagcgacgaagccgtgacatatagcctgggaaagtttgggcagagggccctggatttctacagcattcatgtgaccaaggagtccacccaccccgtgaagcccctggcccagatcgccggaaacagatacgcctccggacctgtgggaaaggccctgagcgacgcatgtatgggcacaatcgcctccttcctgtctaagtaccaggacatcatcatcgaacaccagaaggtggtgaagggcaaccagaagagactggagagcctgcgggagctggccggcaaggaaaacctggaataccctagcgtgaccctgccacctcagcctcacaccaaggagggcgttgatgcctacaacgaagtgatcgcccgggtgcgaatgtgggtgaacctgaacctgtggcagaagctgaagctaagcagagatgatgccaagcctctgctgagactgaagggattcccttcctttcctctggtcgagagacaggccaacgaagtggactggtgggacatggtgtgtaacgtgaagaagctgatcaacgagaaaaaggaggatggcaaggtgttttggcagaatctggctggctacaagagacaggaagccctgagaccatacctgagcagcgaggaagatcggaagaagggaaagaaattcgctcggtaccagctgggcgacctgctgctgcacctggaaaagaagcacggcgaggactggggaaaggtgtacgacgaggcctgggagcggattgacaagaaagtggaaggcctgagcaagcacatcaagctggaagaggaacggagaagcgaggacgcccagagcaaggccgccctgaccgactggctgcgggctaaggccagcttcgtgatcgagggcctgaaggaggccgacaaggacgagttctgcagatgcgagctgaagctgcagaagtggtacggggacctgcggggaaagcccttcgccatcgaagccgagaacagcatcctggacatcagcggcttcagcaagcagtacaactgtgccttcatctggcagaaggacggcgtgaagaagctgaacctgtacctgatcatcaactacttcaagggcggcaagctgcggttcaagaagatcaaacctgaagccttcgaagccaacagattctacaccgtgatcaacaaaaagagcggcgagatcgtgcccatggaggtgaacttcaacttcgacgaccccaacctgatcatcctgcctctggcctttggcaagagacagggcagagaattcatctggaacgacctgctgtccctggaaaccggcagcctgaagctggccaacggaagagtgatcgagaagacactgtacaacagaagaacccggcaggatgagcctgccctgttcgtggccctgaccttcgagcggcgggaggtcctggactcctccaatatcaaaccaatgaacctgatcggcgtggcaagaggcgaaaacatccccgccgtgatcgccctgaccgaccccgagggctgcccactgagccggtttaaggatagcctgggaaacccaacccacatcctgagaatcggcgagagctataaggagaagcagcggaccatccaggccaagaaggaggtggagcagcggagagccggcggctacagccggaagtacgccagcaaagccaagaatctggcagacgatatggtgagaaacaccgctagagatctgctgtactacgccgtgacccaggatgccatgctgatcttcgccaacctgagccggggcttcggccggcagggcaagcggaccttcatggccgagagacagtacacacggatggaggactggctgaccgccaagctggcctacgagggcctgagcaagacctacctgtccaagacactggcccagtacacctccaagacatgcagcaactgtgggtttaccatcaccagcgccgactacgacagggtgctggagaagctgaagaagacagcaacaggctggatgaccacaattaacggcaaggagctgaaggtggagggccagattacctactacaacagatacaagagacagaacgtagtcaaggacctgtccgtcgagctggatagactgagcgaagaatctgtgaacaacgacatctcctcctggacaaagggcagaagcggagaagctctgagcctcctgaagaaaagattctcccatagacccgtgcaggagaagttcgtgtgcctgaactgcggcttcgagacacacgcagccgagcaagccgccctgaacatcgccagatcctggctgttcctgcggagccaggagtacaagaaataccagacaaacaagacaaccggcaacaccgataagagagccttcgtcgagacctggcagtccttttaccggaagaagcttaaggaggtgtggaaacctgccgtgcggtctggcggatctggcggaggctccaccagccccaagaaaaagagaaaagtctaagctgccttctgcggggcttgccttctggccatgcccttcttctctcccttgcacctgtacctcttggtctttgaataaagcctgagtaggaaggctagcaaaaaaaaaaaaaaaaaaaaaaaaaaaaaaaaaaaaaaaaaaaaaaaaaaaaaaaaaaaaaaaaaaaaaaaaaaaaaaaa

SEQ ID NO: 13346 - RNA, 5785 nt, synthetic construct
  source 1..5785: mol_type = other RNA
aggaaataagagagaaaagaagagtaagaagaaatataagagccaccatggcccctaagaagaagcgtaaagtgagccggatggaacgcctcgtctacgaggtgcggcagaagtgcagaaacatcgaggacatctgcatctcctgcggatctctgaacgtgaccctggagcacccactgttcatcggcggcatgtgccagaactgtaaaaactgttttctggagtgtgcctatcaatacgacgatgacggctaccagagctactgcaccatctgttgcggcggaagagaggtgctgatgtgtggaaataacaactgctgccggtgcttctgcgtggaatgcgtggacctgctggtgggccccggcgccgcccaggccgctattaaggaagatccttggaactgctacatgtgcggccacaagggcacatacggcctgctgagacggagagaggactggcctagcagactgcagatgttcttcgccaataaccacgaccaggagttcgacccccctaaggtgtaccctcccgtccccgccgagaagagaaagcccatccgggtcctgagcctgttcgatggcatcgccaccggtctgctggtgctgaaggacctgggcatccaggtggataggtacattgcctccgaggtgtgcgaggactccatcaccgtgggaatggtgcgtcatcagggcaagatcatgtacgtgggcgacgtgcggagcgtgacacagaagcatatccaggagtggggccctttcgacctggtgatcggcggcagcccttgcaatgacctgagcatcgtgaacccagcccggaagggcctgtacgagggaaccggcagactgttcttcgagttttacagactgctgcacgacgcccggcctaaggaaggcgacgaccggcccttcttttggctgttcgagaatgtggtggccatgggagtcagcgacaagcgggatattagccggttcctggagagcaaccccgtgatgatcgatgccaaggaagtgagcgccgcccaccgggccagatacttctggggcaatctgcctggcatgaacagacccctggccagcaccgtgaacgacaagctggagctgcaggagtgcctggagcacggccggatcgccaagttcagcaaggtgagaaccatcaccacccgaagcaacagcatcaaacaaggcaaggaccagcactttcctgtgttcatgaacgagaaggaggacatcctgtggtgtaccgagatggagagagtgttcgggttcccagtccactacacagatgtcagcaacatgtctagactggccagacagagactgctgggaagaagctggtccgtccctgtgatcagacacctgttcgcccctctgaaggagtacttcgcctgcgtgagcagcggcaacagcaacgccaacagccggggccccagcttctctagcggcctggtgccactgtccctgagagggagccacatgggccccatggagatctacaaaaccgtgagcgcctggaagcggcagcctgtgcgcgtgctgagcctgtttcggaatatcgataaagtcctgaaaagcctgggattcctggagagcggctctggctccggcggtggcaccctgaagtacgtggaggatgtgacaaacgtggtcagacgggatgtggagaagtggggccccttcgatctggtgtacggcagcacccaacccctgggcagctcttgtgaccggtgccctggctggtacatgtttcagttccaccggatcctgcagtacgccctgccgagacaggagtcccagcggccattcttttggattttcatggacaacttgctgctgaccgaggatgaccaggaaactaccactcggttcctgcagaccgaagccgtgaccctgcaggacgtgagaggccgggactaccagaacgccatgcgggtgtggtccaacatccctggactgaaaagcaagcacgcacctctgacccctaaagaagaggagtacctgcaggcccaggtgcggagcagaagcaagctggacgcccctaaggtggatctgctggtgaagaattgcctcctgcccctgagagagtacttcaagtatttcagccagaatagtctgcccctgggaggcagcggcggcggcgcccaggtgcccgtgaccttcgaggacatcgccgtgtacttcagccaggaggagtgggaggacctggaggagcagcagagggagctgtacaaggacgtgatgaaggagaactacgagaccctgagcagcctgggcccccccgccgtgacccccgacatcatcagccacatcgagaggggcgaggagccctacatcaggttcgagagcggccccgaggagagggagatcggcaagagcagctgcggcggcccaagcagcggcgcccctcctcccagcggcggcagcccagccggctccccaacctctaccgaggagggcacctctgagtccgccacccccgagagcggccctggcacctccaccgagcccagcgagggcagcgcacccggcagccctgccggcagccccacctccacagaggagggaaccagcaccgagcccagcgaaggcagcgccccaggcaccagcaccgagcctagtgagcaggagattaaacggatcaacaagatcagaagaagacttgtgaaagacagcaacaccaagaaggccggcaagacaggccccatgaaaaccctgctggttagagtgatgacacccgatctgagagagcggctggaaaacctgagaaagaagcctgaaaatatcccccagcccatcagcaatacatctagagccaacctgaataagctgctgaccgattacaccgaaatgaagaaggcgatcctgcatgtgtactgggaagagttccagaaggaccctgtgggcctgatgagccgggtggcccagcctgccagcaagaagatcgatcagaacaagctgaaacctgagatggacgagaagggcaacctgaccaccgccggctttgcctgctctcagtgtggccagcccctgttcgtgtacaagctggagcaggtgtctgagaagggcaaggcttacaccaactacttcggacggtgcaatgtggccgagcacgaaaagctgatcctgctggcccagctgaagcccgagaaggatagcgacgaagccgtgacatatagcctgggaaagtttgggcagagggccctggatttctacagcattcatgtgaccaaggagtccacccaccccgtgaagcccctggcccagatcgccggaaacagatacgcctccggacctgtgggaaaggccctgagcgacgcatgtatgggcacaatcgcctccttcctgtctaagtaccaggacatcatcatcgaacaccagaaggtggtgaagggcaaccagaagagactggagagcctgcgggagctggccggcaaggaaaacctggaataccctagcgtgaccctgccacctcagcctcacaccaaggagggcgttgatgcctacaacgaagtgatcgcccgggtgcgaatgtgggtgaacctgaacctgtggcagaagctgaagctaagcagagatgatgccaagcctctgctgagactgaagggattcccttcctttcctctggtcgagagacaggccaacgaagtggactggtgggacatggtgtgtaacgtgaagaagctgatcaacgagaaaaaggaggatggcaaggtgttttggcagaatctggctggctacaagagacaggaagccctgagaccatacctgagcagcgaggaagatcggaagaagggaaagaaattcgctcggtaccagctgggcgacctgctgctgcacctggaaaagaagcacggcgaggactggggaaaggtgtacgacgaggcctgggagcggattgacaagaaagtggaaggcctgagcaagcacatcaagctggaagaggaacggagaagcgaggacgcccagagcaaggccgccctgaccgactggctgcgggctaaggccagcttcgtgatcgagggcctgaaggaggccgacaaggacgagttctgcagatgcgagctgaagctgcagaagtggtacggggacctgcggggaaagcccttcgccatcgaagccgagaacagcatcctggacatcagcggcttcagcaagcagtacaactgtgccttcatctggcagaaggacggcgtgaagaagctgaacctgtacctgatcatcaactacttcaagggcggcaagctgcggttcaagaagatcaaacctgaagccttcgaagccaacagattctacaccgtgatcaacaaaaagagcggcgagatcgtgcccatggaggtgaacttcaacttcgacgaccccaacctgatcatcctgcctctggcctttggcaagagacagggcagagaattcatctggaacgacctgctgtccctggaaaccggcagcctgaagctggccaacggaagagtgatcgagaagacactgtacaacagaagaacccggcaggatgagcctgccctgttcgtggccctgaccttcgagcggcgggaggtcctggactcctccaatatcaaaccaatgaacctgatcggcgtggcaagaggcgaaaacatccccgccgtgatcgccctgaccgaccccgagggctgcccactgagccggtttaaggatagcctgggaaacccaacccacatcctgagaatcggcgagagctataaggagaagcagcggaccatccaggccaagaaggaggtggagcagcggagagccggcggctacagccggaagtacgccagcaaagccaagaatctggcagacgatatggtgagaaacaccgctagagatctgctgtactacgccgtgacccaggatgccatgctgatcttcgccaacctgagccggggcttcggccggcagggcaagcggaccttcatggccgagagacagtacacacggatggaggactggctgaccgccaagctggcctacgagggcctgagcaagacctacctgtccaagacactggcccagtacacctccaagacatgcagcaactgtgggtttaccatcaccagcgccgactacgacagggtgctggagaagctgaagaagacagcaacaggctggatgaccacaattaacggcaaggagctgaaggtggagggccagattacctactacaacagatacaagagacagaacgtagtcaaggacctgtccgtcgagctggatagactgagcgaagaatctgtgaacaacgacatctcctcctggacaaagggcagaagcggagaagctctgagcctcctgaagaaaagattctcccatagacccgtgcaggagaagttcgtgtgcctgaactgcggcttcgagacacacgcagccgagcaagccgccctgaacatcgccagatcctggctgttcctgcggagccaggagtacaagaaataccagacaaacaagacaaccggcaacaccgataagagagccttcgtcgagacctggcagtccttttaccggaagaagcttaaggaggtgtggaaacctgccgtgcggtctggcggatctggcggaggctccaccagccccaagaaaaagagaaaagtctaagctgccttctgcggggcttgccttctggccatgcccttcttctctcccttgcacctgtacctcttggtctttgaataaagcctgagtaggaaggctagcaaaaaaaaaaaaaaaaaaaaaaaaaaaaaaaaaaaaaaaaaaaaaaaaaaaaaaaaaaaaaaaaaaaaaaaaaaaaaaaa

SEQ ID NO: 13347 - RNA, 5785 nt, synthetic construct
  source 1..5785: mol_type = other RNA
aggaaataagagagaaaagaagagtaagaagaaatataagagccaccatggcccctaagaagaagcgtaaagtgagccggatggaacgcctcgtctacgaggtgcggcagaagtgcagaaacatcgaggacatctgcatctcctgcggatctctgaacgtgaccctggagcacccactgttcatcggcggcatgtgccagaactgtaaaaactgttttctggagtgtgcctatcaatacgacgatgacggctaccagagctactgcaccatctgttgcggcggaagagaggtgctgatgtgtggaaataacaactgctgccggtgcttctgcgtggaatgcgtggacctgctggtgggccccggcgccgcccaggccgctattaaggaagatccttggaactgctacatgtgcggccacaagggcacatacggcctgctgagacggagagaggactggcctagcagactgcagatgttcttcgccaataaccacgaccaggagttcgacccccctaaggtgtaccctcccgtccccgccgagaagagaaagcccatccgggtcctgagcctgttcgatggcatcgccaccggtctgctggtgctgaaggacctgggcatccaggtggataggtacattgcctccgaggtgtgcgaggactccatcaccgtgggaatggtgcgtcatcagggcaagatcatgtacgtgggcgacgtgcggagcgtgacacagaagcatatccaggagtggggccctttcgacctggtgatcggcggcagcccttgcaatgacctgagcatcgtgaacccagcccggaagggcctgtacgagggaaccggcagactgttcttcgagttttacagactgctgcacgacgcccggcctaaggaaggcgacgaccggcccttcttttggctgttcgagaatgtggtggccatgggagtcagcgacaagcgggatattagccggttcctggagagcaaccccgtgatgatcgatgccaaggaagtgagcgccgcccaccgggccagatacttctggggcaatctgcctggcatgaacagacccctggccagcaccgtgaacgacaagctggagctgcaggagtgcctggagcacggccggatcgccaagttcagcaaggtgagaaccatcaccacccgaagcaacagcatcaaacaaggcaaggaccagcactttcctgtgttcatgaacgagaaggaggacatcctgtggtgtaccgagatggagagagtgttcgggttcccagtccactacacagatgtcagcaacatgtctagactggccagacagagactgctgggaagaagctggtccgtccctgtgatcagacacctgttcgcccctctgaaggagtacttcgcctgcgtgagcagcggcaacagcaacgccaacagccggggccccagcttctctagcggcctggtgccactgtccctgagagggagccacatgggccccatggagatctacaaaaccgtgagcgcctggaagcggcagcctgtgcgcgtgctgagcctgtttcggaatatcgataaagtcctgaaaagcctgggattcctggagagcggctctggctccggcggtggcaccctgaagtacgtggaggatgtgacaaacgtggtcagacgggatgtggagaagtggggccccttcgatctggtgtacggcagcacccaacccctgggcagctcttgtgaccggtgccctggctggtacatgtttcagttccaccggatcctgcagtacgccctgccgagacaggagtcccagcggccattcttttggattttcatggacaacttgctgctgaccgaggatgaccaggaaactaccactcggttcctgcagaccgaagccgtgaccctgcaggacgtgagaggccgggactaccagaacgccatgcgggtgtggtccaacatccctggactgaaaagcaagcacgcacctctgacccctaaagaagaggagtacctgcaggcccaggtgcggagcagaagcaagctggacgcccctaaggtggatctgctggtgaagaattgcctcctgcccctgagagagtacttcaagtatttcagccagaatagtctgcccctgggaggcagcggcggcggcagctacgagggcagcgtgagcttcagggacgtggccatcgacttcagcagggaggagtggaggcacctggacctgagccagaggaacctgtacagggacgtgatgctggagacctacagccacctgctgagcgtgggctaccaggtgcccgaggccgaggtggtgatgctggagcagggcaacgagccctgggccctgcagggcgagaggccccaccagagctgccccggcgagaagctgtggggcggcccaagcagcggcgcccctcctcccagcggcggcagcccagccggctccccaacctctaccgaggagggcacctctgagtccgccacccccgagagcggccctggcacctccaccgagcccagcgagggcagcgcacccggcagccctgccggcagccccacctccacagaggagggaaccagcaccgagcccagcgaaggcagcgccccaggcaccagcaccgagcctagtgagcaggagattaaacggatcaacaagatcagaagaagacttgtgaaagacagcaacaccaagaaggccggcaagacaggccccatgaaaaccctgctggttagagtgatgacacccgatctgagagagcggctggaaaacctgagaaagaagcctgaaaatatcccccagcccatcagcaatacatctagagccaacctgaataagctgctgaccgattacaccgaaatgaagaaggcgatcctgcatgtgtactgggaagagttccagaaggaccctgtgggcctgatgagccgggtggcccagcctgccagcaagaagatcgatcagaacaagctgaaacctgagatggacgagaagggcaacctgaccaccgccggctttgcctgctctcagtgtggccagcccctgttcgtgtacaagctggagcaggtgtctgagaagggcaaggcttacaccaactacttcggacggtgcaatgtggccgagcacgaaaagctgatcctgctggcccagctgaagcccgagaaggatagcgacgaagccgtgacatatagcctgggaaagtttgggcagagggccctggatttctacagcattcatgtgaccaaggagtccacccaccccgtgaagcccctggcccagatcgccggaaacagatacgcctccggacctgtgggaaaggccctgagcgacgcatgtatgggcacaatcgcctccttcctgtctaagtaccaggacatcatcatcgaacaccagaaggtggtgaagggcaaccagaagagactggagagcctgcgggagctggccggcaaggaaaacctggaataccctagcgtgaccctgccacctcagcctcacaccaaggagggcgttgatgcctacaacgaagtgatcgcccgggtgcgaatgtgggtgaacctgaacctgtggcagaagctgaagctaagcagagatgatgccaagcctctgctgagactgaagggattcccttcctttcctctggtcgagagacaggccaacgaagtggactggtgggacatggtgtgtaacgtgaagaagctgatcaacgagaaaaaggaggatggcaaggtgttttggcagaatctggctggctacaagagacaggaagccctgagaccatacctgagcagcgaggaagatcggaagaagggaaagaaattcgctcggtaccagctgggcgacctgctgctgcacctggaaaagaagcacggcgaggactggggaaaggtgtacgacgaggcctgggagcggattgacaagaaagtggaaggcctgagcaagcacatcaagctggaagaggaacggagaagcgaggacgcccagagcaaggccgccctgaccgactggctgcgggctaaggccagcttcgtgatcgagggcctgaaggaggccgacaaggacgagttctgcagatgcgagctgaagctgcagaagtggtacggggacctgcggggaaagcccttcgccatcgaagccgagaacagcatcctggacatcagcggcttcagcaagcagtacaactgtgccttcatctggcagaaggacggcgtgaagaagctgaacctgtacctgatcatcaactacttcaagggcggcaagctgcggttcaagaagatcaaacctgaagccttcgaagccaacagattctacaccgtgatcaacaaaaagagcggcgagatcgtgcccatggaggtgaacttcaacttcgacgaccccaacctgatcatcctgcctctggcctttggcaagagacagggcagagaattcatctggaacgacctgctgtccctggaaaccggcagcctgaagctggccaacggaagagtgatcgagaagacactgtacaacagaagaacccggcaggatgagcctgccctgttcgtggccctgaccttcgagcggcgggaggtcctggactcctccaatatcaaaccaatgaacctgatcggcgtggcaagaggcgaaaacatccccgccgtgatcgccctgaccgaccccgagggctgcccactgagccggtttaaggatagcctgggaaacccaacccacatcctgagaatcggcgagagctataaggagaagcagcggaccatccaggccaagaaggaggtggagcagcggagagccggcggctacagccggaagtacgccagcaaagccaagaatctggcagacgatatggtgagaaacaccgctagagatctgctgtactacgccgtgacccaggatgccatgctgatcttcgccaacctgagccggggcttcggccggcagggcaagcggaccttcatggccgagagacagtacacacggatggaggactggctgaccgccaagctggcctacgagggcctgagcaagacctacctgtccaagacactggcccagtacacctccaagacatgcagcaactgtgggtttaccatcaccagcgccgactacgacagggtgctggagaagctgaagaagacagcaacaggctggatgaccacaattaacggcaaggagctgaaggtggagggccagattacctactacaacagatacaagagacagaacgtagtcaaggacctgtccgtcgagctggatagactgagcgaagaatctgtgaacaacgacatctcctcctggacaaagggcagaagcggagaagctctgagcctcctgaagaaaagattctcccatagacccgtgcaggagaagttcgtgtgcctgaactgcggcttcgagacacacgcagccgagcaagccgccctgaacatcgccagatcctggctgttcctgcggagccaggagtacaagaaataccagacaaacaagacaaccggcaacaccgataagagagccttcgtcgagacctggcagtccttttaccggaagaagcttaaggaggtgtggaaacctgccgtgcggtctggcggatctggcggaggctccaccagccccaagaaaaagagaaaagtctaagctgccttctgcggggcttgccttctggccatgcccttcttctctcccttgcacctgtacctcttggtctttgaataaagcctgagtaggaaggctagcaaaaaaaaaaaaaaaaaaaaaaaaaaaaaaaaaaaaaaaaaaaaaaaaaaaaaaaaaaaaaaaaaaaaaaaaaaaaaaaa

SEQ ID NO: 13348 - RNA, 5785 nt, synthetic construct
  source 1..5785: mol_type = other RNA
aggaaataagagagaaaagaagagtaagaagaaatataagagccaccatggcccctaagaagaagcgtaaagtgagccggatggaacgcctcgtctacgaggtgcggcagaagtgcagaaacatcgaggacatctgcatctcctgcggatctctgaacgtgaccctggagcacccactgttcatcggcggcatgtgccagaactgtaaaaactgttttctggagtgtgcctatcaatacgacgatgacggctaccagagctactgcaccatctgttgcggcggaagagaggtgctgatgtgtggaaataacaactgctgccggtgcttctgcgtggaatgcgtggacctgctggtgggccccggcgccgcccaggccgctattaaggaagatccttggaactgctacatgtgcggccacaagggcacatacggcctgctgagacggagagaggactggcctagcagactgcagatgttcttcgccaataaccacgaccaggagttcgacccccctaaggtgtaccctcccgtccccgccgagaagagaaagcccatccgggtcctgagcctgttcgatggcatcgccaccggtctgctggtgctgaaggacctgggcatccaggtggataggtacattgcctccgaggtgtgcgaggactccatcaccgtgggaatggtgcgtcatcagggcaagatcatgtacgtgggcgacgtgcggagcgtgacacagaagcatatccaggagtggggccctttcgacctggtgatcggcggcagcccttgcaatgacctgagcatcgtgaacccagcccggaagggcctgtacgagggaaccggcagactgttcttcgagttttacagactgctgcacgacgcccggcctaaggaaggcgacgaccggcccttcttttggctgttcgagaatgtggtggccatgggagtcagcgacaagcgggatattagccggttcctggagagcaaccccgtgatgatcgatgccaaggaagtgagcgccgcccaccgggccagatacttctggggcaatctgcctggcatgaacagacccctggccagcaccgtgaacgacaagctggagctgcaggagtgcctggagcacggccggatcgccaagttcagcaaggtgagaaccatcaccacccgaagcaacagcatcaaacaaggcaaggaccagcactttcctgtgttcatgaacgagaaggaggacatcctgtggtgtaccgagatggagagagtgttcgggttcccagtccactacacagatgtcagcaacatgtctagactggccagacagagactgctgggaagaagctggtccgtccctgtgatcagacacctgttcgcccctctgaaggagtacttcgcctgcgtgagcagcggcaacagcaacgccaacagccggggccccagcttctctagcggcctggtgccactgtccctgagagggagccacatgggccccatggagatctacaaaaccgtgagcgcctggaagcggcagcctgtgcgcgtgctgagcctgtttcggaatatcgataaagtcctgaaaagcctgggattcctggagagcggctctggctccggcggtggcaccctgaagtacgtggaggatgtgacaaacgtggtcagacgggatgtggagaagtggggccccttcgatctggtgtacggcagcacccaacccctgggcagctcttgtgaccggtgccctggctggtacatgtttcagttccaccggatcctgcagtacgccctgccgagacaggagtcccagcggccattcttttggattttcatggacaacttgctgctgaccgaggatgaccaggaaactaccactcggttcctgcagaccgaagccgtgaccctgcaggacgtgagaggccgggactaccagaacgccatgcgggtgtggtccaacatccctggactgaaaagcaagcacgcacctctgacccctaaagaagaggagtacctgcaggcccaggtgcggagcagaagcaagctggacgcccctaaggtggatctgctggtgaagaattgcctcctgcccctgagagagtacttcaagtatttcagccagaatagtctgcccctgggaggcagcggcggcggcatggcccaggagagcgtgatgttcagcgacgtgagcatcgacttcagccaggaggagtgggagtgcctgaacgacgaccagagggacctgtacagggacgtgatgctggagaactacagcaacctggtgagcatggccggccacagcatcagcaagcccaacgtgatcagctacctggagcagggcaaggagccctggctggtggacagggagctgaccaggggccagtggcccgccctggagggcggcccaagcagcggcgcccctcctcccagcggcggcagcccagccggctccccaacctctaccgaggagggcacctctgagtccgccacccccgagagcggccctggcacctccaccgagcccagcgagggcagcgcacccggcagccctgccggcagccccacctccacagaggagggaaccagcaccgagcccagcgaaggcagcgccccaggcaccagcaccgagcctagtgagcaggagattaaacggatcaacaagatcagaagaagacttgtgaaagacagcaacaccaagaaggccggcaagacaggccccatgaaaaccctgctggttagagtgatgacacccgatctgagagagcggctggaaaacctgagaaagaagcctgaaaatatcccccagcccatcagcaatacatctagagccaacctgaataagctgctgaccgattacaccgaaatgaagaaggcgatcctgcatgtgtactgggaagagttccagaaggaccctgtgggcctgatgagccgggtggcccagcctgccagcaagaagatcgatcagaacaagctgaaacctgagatggacgagaagggcaacctgaccaccgccggctttgcctgctctcagtgtggccagcccctgttcgtgtacaagctggagcaggtgtctgagaagggcaaggcttacaccaactacttcggacggtgcaatgtggccgagcacgaaaagctgatcctgctggcccagctgaagcccgagaaggatagcgacgaagccgtgacatatagcctgggaaagtttgggcagagggccctggatttctacagcattcatgtgaccaaggagtccacccaccccgtgaagcccctggcccagatcgccggaaacagatacgcctccggacctgtgggaaaggccctgagcgacgcatgtatgggcacaatcgcctccttcctgtctaagtaccaggacatcatcatcgaacaccagaaggtggtgaagggcaaccagaagagactggagagcctgcgggagctggccggcaaggaaaacctggaataccctagcgtgaccctgccacctcagcctcacaccaaggagggcgttgatgcctacaacgaagtgatcgcccgggtgcgaatgtgggtgaacctgaacctgtggcagaagctgaagctaagcagagatgatgccaagcctctgctgagactgaagggattcccttcctttcctctggtcgagagacaggccaacgaagtggactggtgggacatggtgtgtaacgtgaagaagctgatcaacgagaaaaaggaggatggcaaggtgttttggcagaatctggctggctacaagagacaggaagccctgagaccatacctgagcagcgaggaagatcggaagaagggaaagaaattcgctcggtaccagctgggcgacctgctgctgcacctggaaaagaagcacggcgaggactggggaaaggtgtacgacgaggcctgggagcggattgacaagaaagtggaaggcctgagcaagcacatcaagctggaagaggaacggagaagcgaggacgcccagagcaaggccgccctgaccgactggctgcgggctaaggccagcttcgtgatcgagggcctgaaggaggccgacaaggacgagttctgcagatgcgagctgaagctgcagaagtggtacggggacctgcggggaaagcccttcgccatcgaagccgagaacagcatcctggacatcagcggcttcagcaagcagtacaactgtgccttcatctggcagaaggacggcgtgaagaagctgaacctgtacctgatcatcaactacttcaagggcggcaagctgcggttcaagaagatcaaacctgaagccttcgaagccaacagattctacaccgtgatcaacaaaaagagcggcgagatcgtgcccatggaggtgaacttcaacttcgacgaccccaacctgatcatcctgcctctggcctttggcaagagacagggcagagaattcatctggaacgacctgctgtccctggaaaccggcagcctgaagctggccaacggaagagtgatcgagaagacactgtacaacagaagaacccggcaggatgagcctgccctgttcgtggccctgaccttcgagcggcgggaggtcctggactcctccaatatcaaaccaatgaacctgatcggcgtggcaagaggcgaaaacatccccgccgtgatcgccctgaccgaccccgagggctgcccactgagccggtttaaggatagcctgggaaacccaacccacatcctgagaatcggcgagagctataaggagaagcagcggaccatccaggccaagaaggaggtggagcagcggagagccggcggctacagccggaagtacgccagcaaagccaagaatctggcagacgatatggtgagaaacaccgctagagatctgctgtactacgccgtgacccaggatgccatgctgatcttcgccaacctgagccggggcttcggccggcagggcaagcggaccttcatggccgagagacagtacacacggatggaggactggctgaccgccaagctggcctacgagggcctgagcaagacctacctgtccaagacactggcccagtacacctccaagacatgcagcaactgtgggtttaccatcaccagcgccgactacgacagggtgctggagaagctgaagaagacagcaacaggctggatgaccacaattaacggcaaggagctgaaggtggagggccagattacctactacaacagatacaagagacagaacgtagtcaaggacctgtccgtcgagctggatagactgagcgaagaatctgtgaacaacgacatctcctcctggacaaagggcagaagcggagaagctctgagcctcctgaagaaaagattctcccatagacccgtgcaggagaagttcgtgtgcctgaactgcggcttcgagacacacgcagccgagcaagccgccctgaacatcgccagatcctggctgttcctgcggagccaggagtacaagaaataccagacaaacaagacaaccggcaacaccgataagagagccttcgtcgagacctggcagtccttttaccggaagaagcttaaggaggtgtggaaacctgccgtgcggtctggcggatctggcggaggctccaccagccccaagaaaaagagaaaagtctaagctgccttctgcggggcttgccttctggccatgcccttcttctctcccttgcacctgtacctcttggtctttgaataaagcctgagtaggaaggctagcaaaaaaaaaaaaaaaaaaaaaaaaaaaaaaaaaaaaaaaaaaaaaaaaaaaaaaaaaaaaaaaaaaaaaaaaaaaaaaaa

SEQ ID NO: 13349 - RNA, 5785 nt, synthetic construct
  source 1..5785: mol_type = other RNA
aggaaataagagagaaaagaagagtaagaagaaatataagagccaccatggcccctaagaagaagcgtaaagtgagccggatggaacgcctcgtctacgaggtgcggcagaagtgcagaaacatcgaggacatctgcatctcctgcggatctctgaacgtgaccctggagcacccactgttcatcggcggcatgtgccagaactgtaaaaactgttttctggagtgtgcctatcaatacgacgatgacggctaccagagctactgcaccatctgttgcggcggaagagaggtgctgatgtgtggaaataacaactgctgccggtgcttctgcgtggaatgcgtggacctgctggtgggccccggcgccgcccaggccgctattaaggaagatccttggaactgctacatgtgcggccacaagggcacatacggcctgctgagacggagagaggactggcctagcagactgcagatgttcttcgccaataaccacgaccaggagttcgacccccctaaggtgtaccctcccgtccccgccgagaagagaaagcccatccgggtcctgagcctgttcgatggcatcgccaccggtctgctggtgctgaaggacctgggcatccaggtggataggtacattgcctccgaggtgtgcgaggactccatcaccgtgggaatggtgcgtcatcagggcaagatcatgtacgtgggcgacgtgcggagcgtgacacagaagcatatccaggagtggggccctttcgacctggtgatcggcggcagcccttgcaatgacctgagcatcgtgaacccagcccggaagggcctgtacgagggaaccggcagactgttcttcgagttttacagactgctgcacgacgcccggcctaaggaaggcgacgaccggcccttcttttggctgttcgagaatgtggtggccatgggagtcagcgacaagcgggatattagccggttcctggagagcaaccccgtgatgatcgatgccaaggaagtgagcgccgcccaccgggccagatacttctggggcaatctgcctggcatgaacagacccctggccagcaccgtgaacgacaagctggagctgcaggagtgcctggagcacggccggatcgccaagttcagcaaggtgagaaccatcaccacccgaagcaacagcatcaaacaaggcaaggaccagcactttcctgtgttcatgaacgagaaggaggacatcctgtggtgtaccgagatggagagagtgttcgggttcccagtccactacacagatgtcagcaacatgtctagactggccagacagagactgctgggaagaagctggtccgtccctgtgatcagacacctgttcgcccctctgaaggagtacttcgcctgcgtgagcagcggcaacagcaacgccaacagccggggccccagcttctctagcggcctggtgccactgtccctgagagggagccacatgggccccatggagatctacaaaaccgtgagcgcctggaagcggcagcctgtgcgcgtgctgagcctgtttcggaatatcgataaagtcctgaaaagcctgggattcctggagagcggctctggctccggcggtggcaccctgaagtacgtggaggatgtgacaaacgtggtcagacgggatgtggagaagtggggccccttcgatctggtgtacggcagcacccaacccctgggcagctcttgtgaccggtgccctggctggtacatgtttcagttccaccggatcctgcagtacgccctgccgagacaggagtcccagcggccattcttttggattttcatggacaacttgctgctgaccgaggatgaccaggaaactaccactcggttcctgcagaccgaagccgtgaccctgcaggacgtgagaggccgggactaccagaacgccatgcgggtgtggtccaacatccctggactgaaaagcaagcacgcacctctgacccctaaagaagaggagtacctgcaggcccaggtgcggagcagaagcaagctggacgcccctaaggtggatctgctggtgaagaattgcctcctgcccctgagagagtacttcaagtatttcagccagaatagtctgcccctgggaggcagcggcggcggcccccaggagagcgtggccttcgaggacgtggccgtgtacttcaccgccaaggagtgggacatcatggtgcccgccgagagggccctgtacagggacgtgatgctggagaactacgaggccgtggccttcgtggtgccccccaccagcaagcccgccctggtgagccacctggagcagggcaaggagagctgcttcaccaggccccagggcgtgctgtgcaggaacgactggagggccggcctgggcggcccaagcagcggcgcccctcctcccagcggcggcagcccagccggctccccaacctctaccgaggagggcacctctgagtccgccacccccgagagcggccctggcacctccaccgagcccagcgagggcagcgcacccggcagccctgccggcagccccacctccacagaggagggaaccagcaccgagcccagcgaaggcagcgccccaggcaccagcaccgagcctagtgagcaggagattaaacggatcaacaagatcagaagaagacttgtgaaagacagcaacaccaagaaggccggcaagacaggccccatgaaaaccctgctggttagagtgatgacacccgatctgagagagcggctggaaaacctgagaaagaagcctgaaaatatcccccagcccatcagcaatacatctagagccaacctgaataagctgctgaccgattacaccgaaatgaagaaggcgatcctgcatgtgtactgggaagagttccagaaggaccctgtgggcctgatgagccgggtggcccagcctgccagcaagaagatcgatcagaacaagctgaaacctgagatggacgagaagggcaacctgaccaccgccggctttgcctgctctcagtgtggccagcccctgttcgtgtacaagctggagcaggtgtctgagaagggcaaggcttacaccaactacttcggacggtgcaatgtggccgagcacgaaaagctgatcctgctggcccagctgaagcccgagaaggatagcgacgaagccgtgacatatagcctgggaaagtttgggcagagggccctggatttctacagcattcatgtgaccaaggagtccacccaccccgtgaagcccctggcccagatcgccggaaacagatacgcctccggacctgtgggaaaggccctgagcgacgcatgtatgggcacaatcgcctccttcctgtctaagtaccaggacatcatcatcgaacaccagaaggtggtgaagggcaaccagaagagactggagagcctgcgggagctggccggcaaggaaaacctggaataccctagcgtgaccctgccacctcagcctcacaccaaggagggcgttgatgcctacaacgaagtgatcgcccgggtgcgaatgtgggtgaacctgaacctgtggcagaagctgaagctaagcagagatgatgccaagcctctgctgagactgaagggattcccttcctttcctctggtcgagagacaggccaacgaagtggactggtgggacatggtgtgtaacgtgaagaagctgatcaacgagaaaaaggaggatggcaaggtgttttggcagaatctggctggctacaagagacaggaagccctgagaccatacctgagcagcgaggaagatcggaagaagggaaagaaattcgctcggtaccagctgggcgacctgctgctgcacctggaaaagaagcacggcgaggactggggaaaggtgtacgacgaggcctgggagcggattgacaagaaagtggaaggcctgagcaagcacatcaagctggaagaggaacggagaagcgaggacgcccagagcaaggccgccctgaccgactggctgcgggctaaggccagcttcgtgatcgagggcctgaaggaggccgacaaggacgagttctgcagatgcgagctgaagctgcagaagtggtacggggacctgcggggaaagcccttcgccatcgaagccgagaacagcatcctggacatcagcggcttcagcaagcagtacaactgtgccttcatctggcagaaggacggcgtgaagaagctgaacctgtacctgatcatcaactacttcaagggcggcaagctgcggttcaagaagatcaaacctgaagccttcgaagccaacagattctacaccgtgatcaacaaaaagagcggcgagatcgtgcccatggaggtgaacttcaacttcgacgaccccaacctgatcatcctgcctctggcctttggcaagagacagggcagagaattcatctggaacgacctgctgtccctggaaaccggcagcctgaagctggccaacggaagagtgatcgagaagacactgtacaacagaagaacccggcaggatgagcctgccctgttcgtggccctgaccttcgagcggcgggaggtcctggactcctccaatatcaaaccaatgaacctgatcggcgtggcaagaggcgaaaacatccccgccgtgatcgccctgaccgaccccgagggctgcccactgagccggtttaaggatagcctgggaaacccaacccacatcctgagaatcggcgagagctataaggagaagcagcggaccatccaggccaagaaggaggtggagcagcggagagccggcggctacagccggaagtacgccagcaaagccaagaatctggcagacgatatggtgagaaacaccgctagagatctgctgtactacgccgtgacccaggatgccatgctgatcttcgccaacctgagccggggcttcggccggcagggcaagcggaccttcatggccgagagacagtacacacggatggaggactggctgaccgccaagctggcctacgagggcctgagcaagacctacctgtccaagacactggcccagtacacctccaagacatgcagcaactgtgggtttaccatcaccagcgccgactacgacagggtgctggagaagctgaagaagacagcaacaggctggatgaccacaattaacggcaaggagctgaaggtggagggccagattacctactacaacagatacaagagacagaacgtagtcaaggacctgtccgtcgagctggatagactgagcgaagaatctgtgaacaacgacatctcctcctggacaaagggcagaagcggagaagctctgagcctcctgaagaaaagattctcccatagacccgtgcaggagaagttcgtgtgcctgaactgcggcttcgagacacacgcagccgagcaagccgccctgaacatcgccagatcctggctgttcctgcggagccaggagtacaagaaataccagacaaacaagacaaccggcaacaccgataagagagccttcgtcgagacctggcagtccttttaccggaagaagcttaaggaggtgtggaaacctgccgtgcggtctggcggatctggcggaggctccaccagccccaagaaaaagagaaaagtctaagctgccttctgcggggcttgccttctggccatgcccttcttctctcccttgcacctgtacctcttggtctttgaataaagcctgagtaggaaggctagcaaaaaaaaaaaaaaaaaaaaaaaaaaaaaaaaaaaaaaaaaaaaaaaaaaaaaaaaaaaaaaaaaaaaaaaaaaaaaaaa

SEQ ID NO: 13350 - RNA, 5785 nt, synthetic construct
  source 1..5785: mol_type = other RNA
aggaaataagagagaaaagaagagtaagaagaaatataagagccaccatggcccctaagaagaagcgtaaagtgagccggatggaacgcctcgtctacgaggtgcggcagaagtgcagaaacatcgaggacatctgcatctcctgcggatctctgaacgtgaccctggagcacccactgttcatcggcggcatgtgccagaactgtaaaaactgttttctggagtgtgcctatcaatacgacgatgacggctaccagagctactgcaccatctgttgcggcggaagagaggtgctgatgtgtggaaataacaactgctgccggtgcttctgcgtggaatgcgtggacctgctggtgggccccggcgccgcccaggccgctattaaggaagatccttggaactgctacatgtgcggccacaagggcacatacggcctgctgagacggagagaggactggcctagcagactgcagatgttcttcgccaataaccacgaccaggagttcgacccccctaaggtgtaccctcccgtccccgccgagaagagaaagcccatccgggtcctgagcctgttcgatggcatcgccaccggtctgctggtgctgaaggacctgggcatccaggtggataggtacattgcctccgaggtgtgcgaggactccatcaccgtgggaatggtgcgtcatcagggcaagatcatgtacgtgggcgacgtgcggagcgtgacacagaagcatatccaggagtggggccctttcgacctggtgatcggcggcagcccttgcaatgacctgagcatcgtgaacccagcccggaagggcctgtacgagggaaccggcagactgttcttcgagttttacagactgctgcacgacgcccggcctaaggaaggcgacgaccggcccttcttttggctgttcgagaatgtggtggccatgggagtcagcgacaagcgggatattagccggttcctggagagcaaccccgtgatgatcgatgccaaggaagtgagcgccgcccaccgggccagatacttctggggcaatctgcctggcatgaacagacccctggccagcaccgtgaacgacaagctggagctgcaggagtgcctggagcacggccggatcgccaagttcagcaaggtgagaaccatcaccacccgaagcaacagcatcaaacaaggcaaggaccagcactttcctgtgttcatgaacgagaaggaggacatcctgtggtgtaccgagatggagagagtgttcgggttcccagtccactacacagatgtcagcaacatgtctagactggccagacagagactgctgggaagaagctggtccgtccctgtgatcagacacctgttcgcccctctgaaggagtacttcgcctgcgtgagcagcggcaacagcaacgccaacagccggggccccagcttctctagcggcctggtgccactgtccctgagagggagccacatgggccccatggagatctacaaaaccgtgagcgcctggaagcggcagcctgtgcgcgtgctgagcctgtttcggaatatcgataaagtcctgaaaagcctgggattcctggagagcggctctggctccggcggtggcaccctgaagtacgtggaggatgtgacaaacgtggtcagacgggatgtggagaagtggggccccttcgatctggtgtacggcagcacccaacccctgggcagctcttgtgaccggtgccctggctggtacatgtttcagttccaccggatcctgcagtacgccctgccgagacaggagtcccagcggccattcttttggattttcatggacaacttgctgctgaccgaggatgaccaggaaactaccactcggttcctgcagaccgaagccgtgaccctgcaggacgtgagaggccgggactaccagaacgccatgcgggtgtggtccaacatccctggactgaaaagcaagcacgcacctctgacccctaaagaagaggagtacctgcaggcccaggtgcggagcagaagcaagctggacgcccctaaggtggatctgctggtgaagaattgcctcctgcccctgagagagtacttcaagtatttcagccagaatagtctgcccctgggaggcagcggcggcggcgaggagctggtgggccagaaccacggcatggagggcgaggcctgcaccggcggcgacgtgaccttcagcgacgtggccatcgacttcagccacgaggagtgggcctgcctggacaccgcccagagggacctgtacaaggacgtgatggtgcagaactacgagaacctggtgagcgtgggcctgagcgtgaccaagccctacgtgatcatgctgctggaggacggcaaggagccctggatgatgggcggcccaagcagcggcgcccctcctcccagcggcggcagcccagccggctccccaacctctaccgaggagggcacctctgagtccgccacccccgagagcggccctggcacctccaccgagcccagcgagggcagcgcacccggcagccctgccggcagccccacctccacagaggagggaaccagcaccgagcccagcgaaggcagcgccccaggcaccagcaccgagcctagtgagcaggagattaaacggatcaacaagatcagaagaagacttgtgaaagacagcaacaccaagaaggccggcaagacaggccccatgaaaaccctgctggttagagtgatgacacccgatctgagagagcggctggaaaacctgagaaagaagcctgaaaatatcccccagcccatcagcaatacatctagagccaacctgaataagctgctgaccgattacaccgaaatgaagaaggcgatcctgcatgtgtactgggaagagttccagaaggaccctgtgggcctgatgagccgggtggcccagcctgccagcaagaagatcgatcagaacaagctgaaacctgagatggacgagaagggcaacctgaccaccgccggctttgcctgctctcagtgtggccagcccctgttcgtgtacaagctggagcaggtgtctgagaagggcaaggcttacaccaactacttcggacggtgcaatgtggccgagcacgaaaagctgatcctgctggcccagctgaagcccgagaaggatagcgacgaagccgtgacatatagcctgggaaagtttgggcagagggccctggatttctacagcattcatgtgaccaaggagtccacccaccccgtgaagcccctggcccagatcgccggaaacagatacgcctccggacctgtgggaaaggccctgagcgacgcatgtatgggcacaatcgcctccttcctgtctaagtaccaggacatcatcatcgaacaccagaaggtggtgaagggcaaccagaagagactggagagcctgcgggagctggccggcaaggaaaacctggaataccctagcgtgaccctgccacctcagcctcacaccaaggagggcgttgatgcctacaacgaagtgatcgcccgggtgcgaatgtgggtgaacctgaacctgtggcagaagctgaagctaagcagagatgatgccaagcctctgctgagactgaagggattcccttcctttcctctggtcgagagacaggccaacgaagtggactggtgggacatggtgtgtaacgtgaagaagctgatcaacgagaaaaaggaggatggcaaggtgttttggcagaatctggctggctacaagagacaggaagccctgagaccatacctgagcagcgaggaagatcggaagaagggaaagaaattcgctcggtaccagctgggcgacctgctgctgcacctggaaaagaagcacggcgaggactggggaaaggtgtacgacgaggcctgggagcggattgacaagaaagtggaaggcctgagcaagcacatcaagctggaagaggaacggagaagcgaggacgcccagagcaaggccgccctgaccgactggctgcgggctaaggccagcttcgtgatcgagggcctgaaggaggccgacaaggacgagttctgcagatgcgagctgaagctgcagaagtggtacggggacctgcggggaaagcccttcgccatcgaagccgagaacagcatcctggacatcagcggcttcagcaagcagtacaactgtgccttcatctggcagaaggacggcgtgaagaagctgaacctgtacctgatcatcaactacttcaagggcggcaagctgcggttcaagaagatcaaacctgaagccttcgaagccaacagattctacaccgtgatcaacaaaaagagcggcgagatcgtgcccatggaggtgaacttcaacttcgacgaccccaacctgatcatcctgcctctggcctttggcaagagacagggcagagaattcatctggaacgacctgctgtccctggaaaccggcagcctgaagctggccaacggaagagtgatcgagaagacactgtacaacagaagaacccggcaggatgagcctgccctgttcgtggccctgaccttcgagcggcgggaggtcctggactcctccaatatcaaaccaatgaacctgatcggcgtggcaagaggcgaaaacatccccgccgtgatcgccctgaccgaccccgagggctgcccactgagccggtttaaggatagcctgggaaacccaacccacatcctgagaatcggcgagagctataaggagaagcagcggaccatccaggccaagaaggaggtggagcagcggagagccggcggctacagccggaagtacgccagcaaagccaagaatctggcagacgatatggtgagaaacaccgctagagatctgctgtactacgccgtgacccaggatgccatgctgatcttcgccaacctgagccggggcttcggccggcagggcaagcggaccttcatggccgagagacagtacacacggatggaggactggctgaccgccaagctggcctacgagggcctgagcaagacctacctgtccaagacactggcccagtacacctccaagacatgcagcaactgtgggtttaccatcaccagcgccgactacgacagggtgctggagaagctgaagaagacagcaacaggctggatgaccacaattaacggcaaggagctgaaggtggagggccagattacctactacaacagatacaagagacagaacgtagtcaaggacctgtccgtcgagctggatagactgagcgaagaatctgtgaacaacgacatctcctcctggacaaagggcagaagcggagaagctctgagcctcctgaagaaaagattctcccatagacccgtgcaggagaagttcgtgtgcctgaactgcggcttcgagacacacgcagccgagcaagccgccctgaacatcgccagatcctggctgttcctgcggagccaggagtacaagaaataccagacaaacaagacaaccggcaacaccgataagagagccttcgtcgagacctggcagtccttttaccggaagaagcttaaggaggtgtggaaacctgccgtgcggtctggcggatctggcggaggctccaccagccccaagaaaaagagaaaagtctaagctgccttctgcggggcttgccttctggccatgcccttcttctctcccttgcacctgtacctcttggtctttgaataaagcctgagtaggaaggctagcaaaaaaaaaaaaaaaaaaaaaaaaaaaaaaaaaaaaaaaaaaaaaaaaaaaaaaaaaaaaaaaaaaaaaaaaaaaaaaaa

SEQ ID NO: 13351 - RNA, 5785 nt, synthetic construct
  source 1..5785: mol_type = other RNA
aggaaataagagagaaaagaagagtaagaagaaatataagagccaccatggcccctaagaagaagcgtaaagtgagccggatggaacgcctcgtctacgaggtgcggcagaagtgcagaaacatcgaggacatctgcatctcctgcggatctctgaacgtgaccctggagcacccactgttcatcggcggcatgtgccagaactgtaaaaactgttttctggagtgtgcctatcaatacgacgatgacggctaccagagctactgcaccatctgttgcggcggaagagaggtgctgatgtgtggaaataacaactgctgccggtgcttctgcgtggaatgcgtggacctgctggtgggccccggcgccgcccaggccgctattaaggaagatccttggaactgctacatgtgcggccacaagggcacatacggcctgctgagacggagagaggactggcctagcagactgcagatgttcttcgccaataaccacgaccaggagttcgacccccctaaggtgtaccctcccgtccccgccgagaagagaaagcccatccgggtcctgagcctgttcgatggcatcgccaccggtctgctggtgctgaaggacctgggcatccaggtggataggtacattgcctccgaggtgtgcgaggactccatcaccgtgggaatggtgcgtcatcagggcaagatcatgtacgtgggcgacgtgcggagcgtgacacagaagcatatccaggagtggggccctttcgacctggtgatcggcggcagcccttgcaatgacctgagcatcgtgaacccagcccggaagggcctgtacgagggaaccggcagactgttcttcgagttttacagactgctgcacgacgcccggcctaaggaaggcgacgaccggcccttcttttggctgttcgagaatgtggtggccatgggagtcagcgacaagcgggatattagccggttcctggagagcaaccccgtgatgatcgatgccaaggaagtgagcgccgcccaccgggccagatacttctggggcaatctgcctggcatgaacagacccctggccagcaccgtgaacgacaagctggagctgcaggagtgcctggagcacggccggatcgccaagttcagcaaggtgagaaccatcaccacccgaagcaacagcatcaaacaaggcaaggaccagcactttcctgtgttcatgaacgagaaggaggacatcctgtggtgtaccgagatggagagagtgttcgggttcccagtccactacacagatgtcagcaacatgtctagactggccagacagagactgctgggaagaagctggtccgtccctgtgatcagacacctgttcgcccctctgaaggagtacttcgcctgcgtgagcagcggcaacagcaacgccaacagccggggccccagcttctctagcggcctggtgccactgtccctgagagggagccacatgggccccatggagatctacaaaaccgtgagcgcctggaagcggcagcctgtgcgcgtgctgagcctgtttcggaatatcgataaagtcctgaaaagcctgggattcctggagagcggctctggctccggcggtggcaccctgaagtacgtggaggatgtgacaaacgtggtcagacgggatgtggagaagtggggccccttcgatctggtgtacggcagcacccaacccctgggcagctcttgtgaccggtgccctggctggtacatgtttcagttccaccggatcctgcagtacgccctgccgagacaggagtcccagcggccattcttttggattttcatggacaacttgctgctgaccgaggatgaccaggaaactaccactcggttcctgcagaccgaagccgtgaccctgcaggacgtgagaggccgggactaccagaacgccatgcgggtgtggtccaacatccctggactgaaaagcaagcacgcacctctgacccctaaagaagaggagtacctgcaggcccaggtgcggagcagaagcaagctggacgcccctaaggtggatctgctggtgaagaattgcctcctgcccctgagagagtacttcaagtatttcagccagaatagtctgcccctgggaggcagcggcggcggcgcctgcgagagcatcaccttcggcgacgtggccatcgacttcagccaccaggagtgggagtacctgaacctggtgcagaagaccctgtaccaggaggtgatgatggagaactacgacaacctggtgagcctgggccacttcatcagcaagcccgacctgatcaccctgctggagcagggcaaggagccctggatgatcgtgggcgaggagaccaggggcgagtgcaccgacctggacagcaggggcggcccaagcagcggcgcccctcctcccagcggcggcagcccagccggctccccaacctctaccgaggagggcacctctgagtccgccacccccgagagcggccctggcacctccaccgagcccagcgagggcagcgcacccggcagccctgccggcagccccacctccacagaggagggaaccagcaccgagcccagcgaaggcagcgccccaggcaccagcaccgagcctagtgagcaggagattaaacggatcaacaagatcagaagaagacttgtgaaagacagcaacaccaagaaggccggcaagacaggccccatgaaaaccctgctggttagagtgatgacacccgatctgagagagcggctggaaaacctgagaaagaagcctgaaaatatcccccagcccatcagcaatacatctagagccaacctgaataagctgctgaccgattacaccgaaatgaagaaggcgatcctgcatgtgtactgggaagagttccagaaggaccctgtgggcctgatgagccgggtggcccagcctgccagcaagaagatcgatcagaacaagctgaaacctgagatggacgagaagggcaacctgaccaccgccggctttgcctgctctcagtgtggccagcccctgttcgtgtacaagctggagcaggtgtctgagaagggcaaggcttacaccaactacttcggacggtgcaatgtggccgagcacgaaaagctgatcctgctggcccagctgaagcccgagaaggatagcgacgaagccgtgacatatagcctgggaaagtttgggcagagggccctggatttctacagcattcatgtgaccaaggagtccacccaccccgtgaagcccctggcccagatcgccggaaacagatacgcctccggacctgtgggaaaggccctgagcgacgcatgtatgggcacaatcgcctccttcctgtctaagtaccaggacatcatcatcgaacaccagaaggtggtgaagggcaaccagaagagactggagagcctgcgggagctggccggcaaggaaaacctggaataccctagcgtgaccctgccacctcagcctcacaccaaggagggcgttgatgcctacaacgaagtgatcgcccgggtgcgaatgtgggtgaacctgaacctgtggcagaagctgaagctaagcagagatgatgccaagcctctgctgagactgaagggattcccttcctttcctctggtcgagagacaggccaacgaagtggactggtgggacatggtgtgtaacgtgaagaagctgatcaacgagaaaaaggaggatggcaaggtgttttggcagaatctggctggctacaagagacaggaagccctgagaccatacctgagcagcgaggaagatcggaagaagggaaagaaattcgctcggtaccagctgggcgacctgctgctgcacctggaaaagaagcacggcgaggactggggaaaggtgtacgacgaggcctgggagcggattgacaagaaagtggaaggcctgagcaagcacatcaagctggaagaggaacggagaagcgaggacgcccagagcaaggccgccctgaccgactggctgcgggctaaggccagcttcgtgatcgagggcctgaaggaggccgacaaggacgagttctgcagatgcgagctgaagctgcagaagtggtacggggacctgcggggaaagcccttcgccatcgaagccgagaacagcatcctggacatcagcggcttcagcaagcagtacaactgtgccttcatctggcagaaggacggcgtgaagaagctgaacctgtacctgatcatcaactacttcaagggcggcaagctgcggttcaagaagatcaaacctgaagccttcgaagccaacagattctacaccgtgatcaacaaaaagagcggcgagatcgtgcccatggaggtgaacttcaacttcgacgaccccaacctgatcatcctgcctctggcctttggcaagagacagggcagagaattcatctggaacgacctgctgtccctggaaaccggcagcctgaagctggccaacggaagagtgatcgagaagacactgtacaacagaagaacccggcaggatgagcctgccctgttcgtggccctgaccttcgagcggcgggaggtcctggactcctccaatatcaaaccaatgaacctgatcggcgtggcaagaggcgaaaacatccccgccgtgatcgccctgaccgaccccgagggctgcccactgagccggtttaaggatagcctgggaaacccaacccacatcctgagaatcggcgagagctataaggagaagcagcggaccatccaggccaagaaggaggtggagcagcggagagccggcggctacagccggaagtacgccagcaaagccaagaatctggcagacgatatggtgagaaacaccgctagagatctgctgtactacgccgtgacccaggatgccatgctgatcttcgccaacctgagccggggcttcggccggcagggcaagcggaccttcatggccgagagacagtacacacggatggaggactggctgaccgccaagctggcctacgagggcctgagcaagacctacctgtccaagacactggcccagtacacctccaagacatgcagcaactgtgggtttaccatcaccagcgccgactacgacagggtgctggagaagctgaagaagacagcaacaggctggatgaccacaattaacggcaaggagctgaaggtggagggccagattacctactacaacagatacaagagacagaacgtagtcaaggacctgtccgtcgagctggatagactgagcgaagaatctgtgaacaacgacatctcctcctggacaaagggcagaagcggagaagctctgagcctcctgaagaaaagattctcccatagacccgtgcaggagaagttcgtgtgcctgaactgcggcttcgagacacacgcagccgagcaagccgccctgaacatcgccagatcctggctgttcctgcggagccaggagtacaagaaataccagacaaacaagacaaccggcaacaccgataagagagccttcgtcgagacctggcagtccttttaccggaagaagcttaaggaggtgtggaaacctgccgtgcggtctggcggatctggcggaggctccaccagccccaagaaaaagagaaaagtctaagctgccttctgcggggcttgccttctggccatgcccttcttctctcccttgcacctgtacctcttggtctttgaataaagcctgagtaggaaggctagcaaaaaaaaaaaaaaaaaaaaaaaaaaaaaaaaaaaaaaaaaaaaaaaaaaaaaaaaaaaaaaaaaaaaaaaaaaaaaaaa

SEQ ID NO: 13352 - RNA, 5785 nt, synthetic construct
  source 1..5785: mol_type = other RNA
aggaaataagagagaaaagaagagtaagaagaaatataagagccaccatggcccctaagaagaagcgtaaagtgagccggatggaacgcctcgtctacgaggtgcggcagaagtgcagaaacatcgaggacatctgcatctcctgcggatctctgaacgtgaccctggagcacccactgttcatcggcggcatgtgccagaactgtaaaaactgttttctggagtgtgcctatcaatacgacgatgacggctaccagagctactgcaccatctgttgcggcggaagagaggtgctgatgtgtggaaataacaactgctgccggtgcttctgcgtggaatgcgtggacctgctggtgggccccggcgccgcccaggccgctattaaggaagatccttggaactgctacatgtgcggccacaagggcacatacggcctgctgagacggagagaggactggcctagcagactgcagatgttcttcgccaataaccacgaccaggagttcgacccccctaaggtgtaccctcccgtccccgccgagaagagaaagcccatccgggtcctgagcctgttcgatggcatcgccaccggtctgctggtgctgaaggacctgggcatccaggtggataggtacattgcctccgaggtgtgcgaggactccatcaccgtgggaatggtgcgtcatcagggcaagatcatgtacgtgggcgacgtgcggagcgtgacacagaagcatatccaggagtggggccctttcgacctggtgatcggcggcagcccttgcaatgacctgagcatcgtgaacccagcccggaagggcctgtacgagggaaccggcagactgttcttcgagttttacagactgctgcacgacgcccggcctaaggaaggcgacgaccggcccttcttttggctgttcgagaatgtggtggccatgggagtcagcgacaagcgggatattagccggttcctggagagcaaccccgtgatgatcgatgccaaggaagtgagcgccgcccaccgggccagatacttctggggcaatctgcctggcatgaacagacccctggccagcaccgtgaacgacaagctggagctgcaggagtgcctggagcacggccggatcgccaagttcagcaaggtgagaaccatcaccacccgaagcaacagcatcaaacaaggcaaggaccagcactttcctgtgttcatgaacgagaaggaggacatcctgtggtgtaccgagatggagagagtgttcgggttcccagtccactacacagatgtcagcaacatgtctagactggccagacagagactgctgggaagaagctggtccgtccctgtgatcagacacctgttcgcccctctgaaggagtacttcgcctgcgtgagcagcggcaacagcaacgccaacagccggggccccagcttctctagcggcctggtgccactgtccctgagagggagccacatgggccccatggagatctacaaaaccgtgagcgcctggaagcggcagcctgtgcgcgtgctgagcctgtttcggaatatcgataaagtcctgaaaagcctgggattcctggagagcggctctggctccggcggtggcaccctgaagtacgtggaggatgtgacaaacgtggtcagacgggatgtggagaagtggggccccttcgatctggtgtacggcagcacccaacccctgggcagctcttgtgaccggtgccctggctggtacatgtttcagttccaccggatcctgcagtacgccctgccgagacaggagtcccagcggccattcttttggattttcatggacaacttgctgctgaccgaggatgaccaggaaactaccactcggttcctgcagaccgaagccgtgaccctgcaggacgtgagaggccgggactaccagaacgccatgcgggtgtggtccaacatccctggactgaaaagcaagcacgcacctctgacccctaaagaagaggagtacctgcaggcccaggtgcggagcagaagcaagctggacgcccctaaggtggatctgctggtgaagaattgcctcctgcccctgagagagtacttcaagtatttcagccagaatagtctgcccctgggaggcagcggcggcggcagccaggtgagcctgaccttcagggacgtggccgtggacttcagccaggaggagtggggcctgctggagcccgcccagaaggacatgtacagggacgtgatgctggagaactacgagaacttcctgagcctgggcctgcccatcagcaagcccaacatgatcagccagctgaagaggagggaggcccccagctggatcgccgagggcaaggtgagcctgagcacctacctgggcaccctgaggggcggcccaagcagcggcgcccctcctcccagcggcggcagcccagccggctccccaacctctaccgaggagggcacctctgagtccgccacccccgagagcggccctggcacctccaccgagcccagcgagggcagcgcacccggcagccctgccggcagccccacctccacagaggagggaaccagcaccgagcccagcgaaggcagcgccccaggcaccagcaccgagcctagtgagcaggagattaaacggatcaacaagatcagaagaagacttgtgaaagacagcaacaccaagaaggccggcaagacaggccccatgaaaaccctgctggttagagtgatgacacccgatctgagagagcggctggaaaacctgagaaagaagcctgaaaatatcccccagcccatcagcaatacatctagagccaacctgaataagctgctgaccgattacaccgaaatgaagaaggcgatcctgcatgtgtactgggaagagttccagaaggaccctgtgggcctgatgagccgggtggcccagcctgccagcaagaagatcgatcagaacaagctgaaacctgagatggacgagaagggcaacctgaccaccgccggctttgcctgctctcagtgtggccagcccctgttcgtgtacaagctggagcaggtgtctgagaagggcaaggcttacaccaactacttcggacggtgcaatgtggccgagcacgaaaagctgatcctgctggcccagctgaagcccgagaaggatagcgacgaagccgtgacatatagcctgggaaagtttgggcagagggccctggatttctacagcattcatgtgaccaaggagtccacccaccccgtgaagcccctggcccagatcgccggaaacagatacgcctccggacctgtgggaaaggccctgagcgacgcatgtatgggcacaatcgcctccttcctgtctaagtaccaggacatcatcatcgaacaccagaaggtggtgaagggcaaccagaagagactggagagcctgcgggagctggccggcaaggaaaacctggaataccctagcgtgaccctgccacctcagcctcacaccaaggagggcgttgatgcctacaacgaagtgatcgcccgggtgcgaatgtgggtgaacctgaacctgtggcagaagctgaagctaagcagagatgatgccaagcctctgctgagactgaagggattcccttcctttcctctggtcgagagacaggccaacgaagtggactggtgggacatggtgtgtaacgtgaagaagctgatcaacgagaaaaaggaggatggcaaggtgttttggcagaatctggctggctacaagagacaggaagccctgagaccatacctgagcagcgaggaagatcggaagaagggaaagaaattcgctcggtaccagctgggcgacctgctgctgcacctggaaaagaagcacggcgaggactggggaaaggtgtacgacgaggcctgggagcggattgacaagaaagtggaaggcctgagcaagcacatcaagctggaagaggaacggagaagcgaggacgcccagagcaaggccgccctgaccgactggctgcgggctaaggccagcttcgtgatcgagggcctgaaggaggccgacaaggacgagttctgcagatgcgagctgaagctgcagaagtggtacggggacctgcggggaaagcccttcgccatcgaagccgagaacagcatcctggacatcagcggcttcagcaagcagtacaactgtgccttcatctggcagaaggacggcgtgaagaagctgaacctgtacctgatcatcaactacttcaagggcggcaagctgcggttcaagaagatcaaacctgaagccttcgaagccaacagattctacaccgtgatcaacaaaaagagcggcgagatcgtgcccatggaggtgaacttcaacttcgacgaccccaacctgatcatcctgcctctggcctttggcaagagacagggcagagaattcatctggaacgacctgctgtccctggaaaccggcagcctgaagctggccaacggaagagtgatcgagaagacactgtacaacagaagaacccggcaggatgagcctgccctgttcgtggccctgaccttcgagcggcgggaggtcctggactcctccaatatcaaaccaatgaacctgatcggcgtggcaagaggcgaaaacatccccgccgtgatcgccctgaccgaccccgagggctgcccactgagccggtttaaggatagcctgggaaacccaacccacatcctgagaatcggcgagagctataaggagaagcagcggaccatccaggccaagaaggaggtggagcagcggagagccggcggctacagccggaagtacgccagcaaagccaagaatctggcagacgatatggtgagaaacaccgctagagatctgctgtactacgccgtgacccaggatgccatgctgatcttcgccaacctgagccggggcttcggccggcagggcaagcggaccttcatggccgagagacagtacacacggatggaggactggctgaccgccaagctggcctacgagggcctgagcaagacctacctgtccaagacactggcccagtacacctccaagacatgcagcaactgtgggtttaccatcaccagcgccgactacgacagggtgctggagaagctgaagaagacagcaacaggctggatgaccacaattaacggcaaggagctgaaggtggagggccagattacctactacaacagatacaagagacagaacgtagtcaaggacctgtccgtcgagctggatagactgagcgaagaatctgtgaacaacgacatctcctcctggacaaagggcagaagcggagaagctctgagcctcctgaagaaaagattctcccatagacccgtgcaggagaagttcgtgtgcctgaactgcggcttcgagacacacgcagccgagcaagccgccctgaacatcgccagatcctggctgttcctgcggagccaggagtacaagaaataccagacaaacaagacaaccggcaacaccgataagagagccttcgtcgagacctggcagtccttttaccggaagaagcttaaggaggtgtggaaacctgccgtgcggtctggcggatctggcggaggctccaccagccccaagaaaaagagaaaagtctaagctgccttctgcggggcttgccttctggccatgcccttcttctctcccttgcacctgtacctcttggtctttgaataaagcctgagtaggaaggctagcaaaaaaaaaaaaaaaaaaaaaaaaaaaaaaaaaaaaaaaaaaaaaaaaaaaaaaaaaaaaaaaaaaaaaaaaaaaaaaaa

SEQ ID NO: 13353 - RNA, 5785 nt, synthetic construct
  source 1..5785: mol_type = other RNA
aggaaataagagagaaaagaagagtaagaagaaatataagagccaccatggcccctaagaagaagcgtaaagtgagccggatggaacgcctcgtctacgaggtgcggcagaagtgcagaaacatcgaggacatctgcatctcctgcggatctctgaacgtgaccctggagcacccactgttcatcggcggcatgtgccagaactgtaaaaactgttttctggagtgtgcctatcaatacgacgatgacggctaccagagctactgcaccatctgttgcggcggaagagaggtgctgatgtgtggaaataacaactgctgccggtgcttctgcgtggaatgcgtggacctgctggtgggccccggcgccgcccaggccgctattaaggaagatccttggaactgctacatgtgcggccacaagggcacatacggcctgctgagacggagagaggactggcctagcagactgcagatgttcttcgccaataaccacgaccaggagttcgacccccctaaggtgtaccctcccgtccccgccgagaagagaaagcccatccgggtcctgagcctgttcgatggcatcgccaccggtctgctggtgctgaaggacctgggcatccaggtggataggtacattgcctccgaggtgtgcgaggactccatcaccgtgggaatggtgcgtcatcagggcaagatcatgtacgtgggcgacgtgcggagcgtgacacagaagcatatccaggagtggggccctttcgacctggtgatcggcggcagcccttgcaatgacctgagcatcgtgaacccagcccggaagggcctgtacgagggaaccggcagactgttcttcgagttttacagactgctgcacgacgcccggcctaaggaaggcgacgaccggcccttcttttggctgttcgagaatgtggtggccatgggagtcagcgacaagcgggatattagccggttcctggagagcaaccccgtgatgatcgatgccaaggaagtgagcgccgcccaccgggccagatacttctggggcaatctgcctggcatgaacagacccctggccagcaccgtgaacgacaagctggagctgcaggagtgcctggagcacggccggatcgccaagttcagcaaggtgagaaccatcaccacccgaagcaacagcatcaaacaaggcaaggaccagcactttcctgtgttcatgaacgagaaggaggacatcctgtggtgtaccgagatggagagagtgttcgggttcccagtccactacacagatgtcagcaacatgtctagactggccagacagagactgctgggaagaagctggtccgtccctgtgatcagacacctgttcgcccctctgaaggagtacttcgcctgcgtgagcagcggcaacagcaacgccaacagccggggccccagcttctctagcggcctggtgccactgtccctgagagggagccacatgggccccatggagatctacaaaaccgtgagcgcctggaagcggcagcctgtgcgcgtgctgagcctgtttcggaatatcgataaagtcctgaaaagcctgggattcctggagagcggctctggctccggcggtggcaccctgaagtacgtggaggatgtgacaaacgtggtcagacgggatgtggagaagtggggccccttcgatctggtgtacggcagcacccaacccctgggcagctcttgtgaccggtgccctggctggtacatgtttcagttccaccggatcctgcagtacgccctgccgagacaggagtcccagcggccattcttttggattttcatggacaacttgctgctgaccgaggatgaccaggaaactaccactcggttcctgcagaccgaagccgtgaccctgcaggacgtgagaggccgggactaccagaacgccatgcgggtgtggtccaacatccctggactgaaaagcaagcacgcacctctgacccctaaagaagaggagtacctgcaggcccaggtgcggagcagaagcaagctggacgcccctaaggtggatctgctggtgaagaattgcctcctgcccctgagagagtacttcaagtatttcagccagaatagtctgcccctgggaggcagcggcggcggctacaaggagagcgtgatgttcagggacgtggccgtggacttcagccaggaggagtgggagtgcctggaccccgcccagagggacctgtacagggacgtgatgctggagaactacagcaacctgctgagcatgggcctgtacatccccaagccccaggtgatcagcctgctggagcagggcaaggagccctggatggtgggcagggagctgaccaggggcctgtgcagcgacctggagagcatgggcggcccaagcagcggcgcccctcctcccagcggcggcagcccagccggctccccaacctctaccgaggagggcacctctgagtccgccacccccgagagcggccctggcacctccaccgagcccagcgagggcagcgcacccggcagccctgccggcagccccacctccacagaggagggaaccagcaccgagcccagcgaaggcagcgccccaggcaccagcaccgagcctagtgagcaggagattaaacggatcaacaagatcagaagaagacttgtgaaagacagcaacaccaagaaggccggcaagacaggccccatgaaaaccctgctggttagagtgatgacacccgatctgagagagcggctggaaaacctgagaaagaagcctgaaaatatcccccagcccatcagcaatacatctagagccaacctgaataagctgctgaccgattacaccgaaatgaagaaggcgatcctgcatgtgtactgggaagagttccagaaggaccctgtgggcctgatgagccgggtggcccagcctgccagcaagaagatcgatcagaacaagctgaaacctgagatggacgagaagggcaacctgaccaccgccggctttgcctgctctcagtgtggccagcccctgttcgtgtacaagctggagcaggtgtctgagaagggcaaggcttacaccaactacttcggacggtgcaatgtggccgagcacgaaaagctgatcctgctggcccagctgaagcccgagaaggatagcgacgaagccgtgacatatagcctgggaaagtttgggcagagggccctggatttctacagcattcatgtgaccaaggagtccacccaccccgtgaagcccctggcccagatcgccggaaacagatacgcctccggacctgtgggaaaggccctgagcgacgcatgtatgggcacaatcgcctccttcctgtctaagtaccaggacatcatcatcgaacaccagaaggtggtgaagggcaaccagaagagactggagagcctgcgggagctggccggcaaggaaaacctggaataccctagcgtgaccctgccacctcagcctcacaccaaggagggcgttgatgcctacaacgaagtgatcgcccgggtgcgaatgtgggtgaacctgaacctgtggcagaagctgaagctaagcagagatgatgccaagcctctgctgagactgaagggattcccttcctttcctctggtcgagagacaggccaacgaagtggactggtgggacatggtgtgtaacgtgaagaagctgatcaacgagaaaaaggaggatggcaaggtgttttggcagaatctggctggctacaagagacaggaagccctgagaccatacctgagcagcgaggaagatcggaagaagggaaagaaattcgctcggtaccagctgggcgacctgctgctgcacctggaaaagaagcacggcgaggactggggaaaggtgtacgacgaggcctgggagcggattgacaagaaagtggaaggcctgagcaagcacatcaagctggaagaggaacggagaagcgaggacgcccagagcaaggccgccctgaccgactggctgcgggctaaggccagcttcgtgatcgagggcctgaaggaggccgacaaggacgagttctgcagatgcgagctgaagctgcagaagtggtacggggacctgcggggaaagcccttcgccatcgaagccgagaacagcatcctggacatcagcggcttcagcaagcagtacaactgtgccttcatctggcagaaggacggcgtgaagaagctgaacctgtacctgatcatcaactacttcaagggcggcaagctgcggttcaagaagatcaaacctgaagccttcgaagccaacagattctacaccgtgatcaacaaaaagagcggcgagatcgtgcccatggaggtgaacttcaacttcgacgaccccaacctgatcatcctgcctctggcctttggcaagagacagggcagagaattcatctggaacgacctgctgtccctggaaaccggcagcctgaagctggccaacggaagagtgatcgagaagacactgtacaacagaagaacccggcaggatgagcctgccctgttcgtggccctgaccttcgagcggcgggaggtcctggactcctccaatatcaaaccaatgaacctgatcggcgtggcaagaggcgaaaacatccccgccgtgatcgccctgaccgaccccgagggctgcccactgagccggtttaaggatagcctgggaaacccaacccacatcctgagaatcggcgagagctataaggagaagcagcggaccatccaggccaagaaggaggtggagcagcggagagccggcggctacagccggaagtacgccagcaaagccaagaatctggcagacgatatggtgagaaacaccgctagagatctgctgtactacgccgtgacccaggatgccatgctgatcttcgccaacctgagccggggcttcggccggcagggcaagcggaccttcatggccgagagacagtacacacggatggaggactggctgaccgccaagctggcctacgagggcctgagcaagacctacctgtccaagacactggcccagtacacctccaagacatgcagcaactgtgggtttaccatcaccagcgccgactacgacagggtgctggagaagctgaagaagacagcaacaggctggatgaccacaattaacggcaaggagctgaaggtggagggccagattacctactacaacagatacaagagacagaacgtagtcaaggacctgtccgtcgagctggatagactgagcgaagaatctgtgaacaacgacatctcctcctggacaaagggcagaagcggagaagctctgagcctcctgaagaaaagattctcccatagacccgtgcaggagaagttcgtgtgcctgaactgcggcttcgagacacacgcagccgagcaagccgccctgaacatcgccagatcctggctgttcctgcggagccaggagtacaagaaataccagacaaacaagacaaccggcaacaccgataagagagccttcgtcgagacctggcagtccttttaccggaagaagcttaaggaggtgtggaaacctgccgtgcggtctggcggatctggcggaggctccaccagccccaagaaaaagagaaaagtctaagctgccttctgcggggcttgccttctggccatgcccttcttctctcccttgcacctgtacctcttggtctttgaataaagcctgagtaggaaggctagcaaaaaaaaaaaaaaaaaaaaaaaaaaaaaaaaaaaaaaaaaaaaaaaaaaaaaaaaaaaaaaaaaaaaaaaaaaaaaaaa

SEQ ID NO: 13354 - RNA, 5785 nt, synthetic construct
  source 1..5785: mol_type = other RNA
aggaaataagagagaaaagaagagtaagaagaaatataagagccaccatggcccctaagaagaagcgtaaagtgagccggatggaacgcctcgtctacgaggtgcggcagaagtgcagaaacatcgaggacatctgcatctcctgcggatctctgaacgtgaccctggagcacccactgttcatcggcggcatgtgccagaactgtaaaaactgttttctggagtgtgcctatcaatacgacgatgacggctaccagagctactgcaccatctgttgcggcggaagagaggtgctgatgtgtggaaataacaactgctgccggtgcttctgcgtggaatgcgtggacctgctggtgggccccggcgccgcccaggccgctattaaggaagatccttggaactgctacatgtgcggccacaagggcacatacggcctgctgagacggagagaggactggcctagcagactgcagatgttcttcgccaataaccacgaccaggagttcgacccccctaaggtgtaccctcccgtccccgccgagaagagaaagcccatccgggtcctgagcctgttcgatggcatcgccaccggtctgctggtgctgaaggacctgggcatccaggtggataggtacattgcctccgaggtgtgcgaggactccatcaccgtgggaatggtgcgtcatcagggcaagatcatgtacgtgggcgacgtgcggagcgtgacacagaagcatatccaggagtggggccctttcgacctggtgatcggcggcagcccttgcaatgacctgagcatcgtgaacccagcccggaagggcctgtacgagggaaccggcagactgttcttcgagttttacagactgctgcacgacgcccggcctaaggaaggcgacgaccggcccttcttttggctgttcgagaatgtggtggccatgggagtcagcgacaagcgggatattagccggttcctggagagcaaccccgtgatgatcgatgccaaggaagtgagcgccgcccaccgggccagatacttctggggcaatctgcctggcatgaacagacccctggccagcaccgtgaacgacaagctggagctgcaggagtgcctggagcacggccggatcgccaagttcagcaaggtgagaaccatcaccacccgaagcaacagcatcaaacaaggcaaggaccagcactttcctgtgttcatgaacgagaaggaggacatcctgtggtgtaccgagatggagagagtgttcgggttcccagtccactacacagatgtcagcaacatgtctagactggccagacagagactgctgggaagaagctggtccgtccctgtgatcagacacctgttcgcccctctgaaggagtacttcgcctgcgtgagcagcggcaacagcaacgccaacagccggggccccagcttctctagcggcctggtgccactgtccctgagagggagccacatgggccccatggagatctacaaaaccgtgagcgcctggaagcggcagcctgtgcgcgtgctgagcctgtttcggaatatcgataaagtcctgaaaagcctgggattcctggagagcggctctggctccggcggtggcaccctgaagtacgtggaggatgtgacaaacgtggtcagacgggatgtggagaagtggggccccttcgatctggtgtacggcagcacccaacccctgggcagctcttgtgaccggtgccctggctggtacatgtttcagttccaccggatcctgcagtacgccctgccgagacaggagtcccagcggccattcttttggattttcatggacaacttgctgctgaccgaggatgaccaggaaactaccactcggttcctgcagaccgaagccgtgaccctgcaggacgtgagaggccgggactaccagaacgccatgcgggtgtggtccaacatccctggactgaaaagcaagcacgcacctctgacccctaaagaagaggagtacctgcaggcccaggtgcggagcagaagcaagctggacgcccctaaggtggatctgctggtgaagaattgcctcctgcccctgagagagtacttcaagtatttcagccagaatagtctgcccctgggaggcagcggcggcggcgcccagatgcaggtgaccttcgaggacatcgccgtgttcttctgccacgaggagtggaagtacctggacgacggccagaaggagctgtacaaggaggtgatgaaggagaactacgagaccctgatcagcctgggcttcctgtgcgagaagcccagcctgatcagcaagatcgagagggaggaggacccctgcgtgagggaccagcaggacttcagggagaggaggaggaggctgaagagcttcggcggcccaagcagcggcgcccctcctcccagcggcggcagcccagccggctccccaacctctaccgaggagggcacctctgagtccgccacccccgagagcggccctggcacctccaccgagcccagcgagggcagcgcacccggcagccctgccggcagccccacctccacagaggagggaaccagcaccgagcccagcgaaggcagcgccccaggcaccagcaccgagcctagtgagcaggagattaaacggatcaacaagatcagaagaagacttgtgaaagacagcaacaccaagaaggccggcaagacaggccccatgaaaaccctgctggttagagtgatgacacccgatctgagagagcggctggaaaacctgagaaagaagcctgaaaatatcccccagcccatcagcaatacatctagagccaacctgaataagctgctgaccgattacaccgaaatgaagaaggcgatcctgcatgtgtactgggaagagttccagaaggaccctgtgggcctgatgagccgggtggcccagcctgccagcaagaagatcgatcagaacaagctgaaacctgagatggacgagaagggcaacctgaccaccgccggctttgcctgctctcagtgtggccagcccctgttcgtgtacaagctggagcaggtgtctgagaagggcaaggcttacaccaactacttcggacggtgcaatgtggccgagcacgaaaagctgatcctgctggcccagctgaagcccgagaaggatagcgacgaagccgtgacatatagcctgggaaagtttgggcagagggccctggatttctacagcattcatgtgaccaaggagtccacccaccccgtgaagcccctggcccagatcgccggaaacagatacgcctccggacctgtgggaaaggccctgagcgacgcatgtatgggcacaatcgcctccttcctgtctaagtaccaggacatcatcatcgaacaccagaaggtggtgaagggcaaccagaagagactggagagcctgcgggagctggccggcaaggaaaacctggaataccctagcgtgaccctgccacctcagcctcacaccaaggagggcgttgatgcctacaacgaagtgatcgcccgggtgcgaatgtgggtgaacctgaacctgtggcagaagctgaagctaagcagagatgatgccaagcctctgctgagactgaagggattcccttcctttcctctggtcgagagacaggccaacgaagtggactggtgggacatggtgtgtaacgtgaagaagctgatcaacgagaaaaaggaggatggcaaggtgttttggcagaatctggctggctacaagagacaggaagccctgagaccatacctgagcagcgaggaagatcggaagaagggaaagaaattcgctcggtaccagctgggcgacctgctgctgcacctggaaaagaagcacggcgaggactggggaaaggtgtacgacgaggcctgggagcggattgacaagaaagtggaaggcctgagcaagcacatcaagctggaagaggaacggagaagcgaggacgcccagagcaaggccgccctgaccgactggctgcgggctaaggccagcttcgtgatcgagggcctgaaggaggccgacaaggacgagttctgcagatgcgagctgaagctgcagaagtggtacggggacctgcggggaaagcccttcgccatcgaagccgagaacagcatcctggacatcagcggcttcagcaagcagtacaactgtgccttcatctggcagaaggacggcgtgaagaagctgaacctgtacctgatcatcaactacttcaagggcggcaagctgcggttcaagaagatcaaacctgaagccttcgaagccaacagattctacaccgtgatcaacaaaaagagcggcgagatcgtgcccatggaggtgaacttcaacttcgacgaccccaacctgatcatcctgcctctggcctttggcaagagacagggcagagaattcatctggaacgacctgctgtccctggaaaccggcagcctgaagctggccaacggaagagtgatcgagaagacactgtacaacagaagaacccggcaggatgagcctgccctgttcgtggccctgaccttcgagcggcgggaggtcctggactcctccaatatcaaaccaatgaacctgatcggcgtggcaagaggcgaaaacatccccgccgtgatcgccctgaccgaccccgagggctgcccactgagccggtttaaggatagcctgggaaacccaacccacatcctgagaatcggcgagagctataaggagaagcagcggaccatccaggccaagaaggaggtggagcagcggagagccggcggctacagccggaagtacgccagcaaagccaagaatctggcagacgatatggtgagaaacaccgctagagatctgctgtactacgccgtgacccaggatgccatgctgatcttcgccaacctgagccggggcttcggccggcagggcaagcggaccttcatggccgagagacagtacacacggatggaggactggctgaccgccaagctggcctacgagggcctgagcaagacctacctgtccaagacactggcccagtacacctccaagacatgcagcaactgtgggtttaccatcaccagcgccgactacgacagggtgctggagaagctgaagaagacagcaacaggctggatgaccacaattaacggcaaggagctgaaggtggagggccagattacctactacaacagatacaagagacagaacgtagtcaaggacctgtccgtcgagctggatagactgagcgaagaatctgtgaacaacgacatctcctcctggacaaagggcagaagcggagaagctctgagcctcctgaagaaaagattctcccatagacccgtgcaggagaagttcgtgtgcctgaactgcggcttcgagacacacgcagccgagcaagccgccctgaacatcgccagatcctggctgttcctgcggagccaggagtacaagaaataccagacaaacaagacaaccggcaacaccgataagagagccttcgtcgagacctggcagtccttttaccggaagaagcttaaggaggtgtggaaacctgccgtgcggtctggcggatctggcggaggctccaccagccccaagaaaaagagaaaagtctaagctgccttctgcggggcttgccttctggccatgcccttcttctctcccttgcacctgtacctcttggtctttgaataaagcctgagtaggaaggctagcaaaaaaaaaaaaaaaaaaaaaaaaaaaaaaaaaaaaaaaaaaaaaaaaaaaaaaaaaaaaaaaaaaaaaaaaaaaaaaaa

SEQ ID NO: 13355 - RNA, 5785 nt, synthetic construct
  source 1..5785: mol_type = other RNA
aggaaataagagagaaaagaagagtaagaagaaatataagagccaccatggcccctaagaagaagcgtaaagtgagccggatggaacgcctcgtctacgaggtgcggcagaagtgcagaaacatcgaggacatctgcatctcctgcggatctctgaacgtgaccctggagcacccactgttcatcggcggcatgtgccagaactgtaaaaactgttttctggagtgtgcctatcaatacgacgatgacggctaccagagctactgcaccatctgttgcggcggaagagaggtgctgatgtgtggaaataacaactgctgccggtgcttctgcgtggaatgcgtggacctgctggtgggccccggcgccgcccaggccgctattaaggaagatccttggaactgctacatgtgcggccacaagggcacatacggcctgctgagacggagagaggactggcctagcagactgcagatgttcttcgccaataaccacgaccaggagttcgacccccctaaggtgtaccctcccgtccccgccgagaagagaaagcccatccgggtcctgagcctgttcgatggcatcgccaccggtctgctggtgctgaaggacctgggcatccaggtggataggtacattgcctccgaggtgtgcgaggactccatcaccgtgggaatggtgcgtcatcagggcaagatcatgtacgtgggcgacgtgcggagcgtgacacagaagcatatccaggagtggggccctttcgacctggtgatcggcggcagcccttgcaatgacctgagcatcgtgaacccagcccggaagggcctgtacgagggaaccggcagactgttcttcgagttttacagactgctgcacgacgcccggcctaaggaaggcgacgaccggcccttcttttggctgttcgagaatgtggtggccatgggagtcagcgacaagcgggatattagccggttcctggagagcaaccccgtgatgatcgatgccaaggaagtgagcgccgcccaccgggccagatacttctggggcaatctgcctggcatgaacagacccctggccagcaccgtgaacgacaagctggagctgcaggagtgcctggagcacggccggatcgccaagttcagcaaggtgagaaccatcaccacccgaagcaacagcatcaaacaaggcaaggaccagcactttcctgtgttcatgaacgagaaggaggacatcctgtggtgtaccgagatggagagagtgttcgggttcccagtccactacacagatgtcagcaacatgtctagactggccagacagagactgctgggaagaagctggtccgtccctgtgatcagacacctgttcgcccctctgaaggagtacttcgcctgcgtgagcagcggcaacagcaacgccaacagccggggccccagcttctctagcggcctggtgccactgtccctgagagggagccacatgggccccatggagatctacaaaaccgtgagcgcctggaagcggcagcctgtgcgcgtgctgagcctgtttcggaatatcgataaagtcctgaaaagcctgggattcctggagagcggctctggctccggcggtggcaccctgaagtacgtggaggatgtgacaaacgtggtcagacgggatgtggagaagtggggccccttcgatctggtgtacggcagcacccaacccctgggcagctcttgtgaccggtgccctggctggtacatgtttcagttccaccggatcctgcagtacgccctgccgagacaggagtcccagcggccattcttttggattttcatggacaacttgctgctgaccgaggatgaccaggaaactaccactcggttcctgcagaccgaagccgtgaccctgcaggacgtgagaggccgggactaccagaacgccatgcgggtgtggtccaacatccctggactgaaaagcaagcacgcacctctgacccctaaagaagaggagtacctgcaggcccaggtgcggagcagaagcaagctggacgcccctaaggtggatctgctggtgaagaattgcctcctgcccctgagagagtacttcaagtatttcagccagaatagtctgcccctgggaggcagcggcggcggcaaggagaacgccgtgacctacgacgacatccacatcgacttcaccagggaggagtggaccctgctggaccccagccagaagaacctgtacaaggacgtgatgctggagacctacaggcacctgaccaccatcggctacagctgggaggaccacaacatcgagaagtactgcgagagcagcaggaggcacaagagcaccgtgcagaggcacaagaggaccaacaccaacgagaacccctacgagggcggcccaagcagcggcgcccctcctcccagcggcggcagcccagccggctccccaacctctaccgaggagggcacctctgagtccgccacccccgagagcggccctggcacctccaccgagcccagcgagggcagcgcacccggcagccctgccggcagccccacctccacagaggagggaaccagcaccgagcccagcgaaggcagcgccccaggcaccagcaccgagcctagtgagcaggagattaaacggatcaacaagatcagaagaagacttgtgaaagacagcaacaccaagaaggccggcaagacaggccccatgaaaaccctgctggttagagtgatgacacccgatctgagagagcggctggaaaacctgagaaagaagcctgaaaatatcccccagcccatcagcaatacatctagagccaacctgaataagctgctgaccgattacaccgaaatgaagaaggcgatcctgcatgtgtactgggaagagttccagaaggaccctgtgggcctgatgagccgggtggcccagcctgccagcaagaagatcgatcagaacaagctgaaacctgagatggacgagaagggcaacctgaccaccgccggctttgcctgctctcagtgtggccagcccctgttcgtgtacaagctggagcaggtgtctgagaagggcaaggcttacaccaactacttcggacggtgcaatgtggccgagcacgaaaagctgatcctgctggcccagctgaagcccgagaaggatagcgacgaagccgtgacatatagcctgggaaagtttgggcagagggccctggatttctacagcattcatgtgaccaaggagtccacccaccccgtgaagcccctggcccagatcgccggaaacagatacgcctccggacctgtgggaaaggccctgagcgacgcatgtatgggcacaatcgcctccttcctgtctaagtaccaggacatcatcatcgaacaccagaaggtggtgaagggcaaccagaagagactggagagcctgcgggagctggccggcaaggaaaacctggaataccctagcgtgaccctgccacctcagcctcacaccaaggagggcgttgatgcctacaacgaagtgatcgcccgggtgcgaatgtgggtgaacctgaacctgtggcagaagctgaagctaagcagagatgatgccaagcctctgctgagactgaagggattcccttcctttcctctggtcgagagacaggccaacgaagtggactggtgggacatggtgtgtaacgtgaagaagctgatcaacgagaaaaaggaggatggcaaggtgttttggcagaatctggctggctacaagagacaggaagccctgagaccatacctgagcagcgaggaagatcggaagaagggaaagaaattcgctcggtaccagctgggcgacctgctgctgcacctggaaaagaagcacggcgaggactggggaaaggtgtacgacgaggcctgggagcggattgacaagaaagtggaaggcctgagcaagcacatcaagctggaagaggaacggagaagcgaggacgcccagagcaaggccgccctgaccgactggctgcgggctaaggccagcttcgtgatcgagggcctgaaggaggccgacaaggacgagttctgcagatgcgagctgaagctgcagaagtggtacggggacctgcggggaaagcccttcgccatcgaagccgagaacagcatcctggacatcagcggcttcagcaagcagtacaactgtgccttcatctggcagaaggacggcgtgaagaagctgaacctgtacctgatcatcaactacttcaagggcggcaagctgcggttcaagaagatcaaacctgaagccttcgaagccaacagattctacaccgtgatcaacaaaaagagcggcgagatcgtgcccatggaggtgaacttcaacttcgacgaccccaacctgatcatcctgcctctggcctttggcaagagacagggcagagaattcatctggaacgacctgctgtccctggaaaccggcagcctgaagctggccaacggaagagtgatcgagaagacactgtacaacagaagaacccggcaggatgagcctgccctgttcgtggccctgaccttcgagcggcgggaggtcctggactcctccaatatcaaaccaatgaacctgatcggcgtggcaagaggcgaaaacatccccgccgtgatcgccctgaccgaccccgagggctgcccactgagccggtttaaggatagcctgggaaacccaacccacatcctgagaatcggcgagagctataaggagaagcagcggaccatccaggccaagaaggaggtggagcagcggagagccggcggctacagccggaagtacgccagcaaagccaagaatctggcagacgatatggtgagaaacaccgctagagatctgctgtactacgccgtgacccaggatgccatgctgatcttcgccaacctgagccggggcttcggccggcagggcaagcggaccttcatggccgagagacagtacacacggatggaggactggctgaccgccaagctggcctacgagggcctgagcaagacctacctgtccaagacactggcccagtacacctccaagacatgcagcaactgtgggtttaccatcaccagcgccgactacgacagggtgctggagaagctgaagaagacagcaacaggctggatgaccacaattaacggcaaggagctgaaggtggagggccagattacctactacaacagatacaagagacagaacgtagtcaaggacctgtccgtcgagctggatagactgagcgaagaatctgtgaacaacgacatctcctcctggacaaagggcagaagcggagaagctctgagcctcctgaagaaaagattctcccatagacccgtgcaggagaagttcgtgtgcctgaactgcggcttcgagacacacgcagccgagcaagccgccctgaacatcgccagatcctggctgttcctgcggagccaggagtacaagaaataccagacaaacaagacaaccggcaacaccgataagagagccttcgtcgagacctggcagtccttttaccggaagaagcttaaggaggtgtggaaacctgccgtgcggtctggcggatctggcggaggctccaccagccccaagaaaaagagaaaagtctaagctgccttctgcggggcttgccttctggccatgcccttcttctctcccttgcacctgtacctcttggtctttgaataaagcctgagtaggaaggctagcaaaaaaaaaaaaaaaaaaaaaaaaaaaaaaaaaaaaaaaaaaaaaaaaaaaaaaaaaaaaaaaaaaaaaaaaaaaaaaaa

SEQ ID NO: 13356 - RNA, 5785 nt, synthetic construct
  source 1..5785: mol_type = other RNA
aggaaataagagagaaaagaagagtaagaagaaatataagagccaccatggcccctaagaagaagcgtaaagtgagccggatggaacgcctcgtctacgaggtgcggcagaagtgcagaaacatcgaggacatctgcatctcctgcggatctctgaacgtgaccctggagcacccactgttcatcggcggcatgtgccagaactgtaaaaactgttttctggagtgtgcctatcaatacgacgatgacggctaccagagctactgcaccatctgttgcggcggaagagaggtgctgatgtgtggaaataacaactgctgccggtgcttctgcgtggaatgcgtggacctgctggtgggccccggcgccgcccaggccgctattaaggaagatccttggaactgctacatgtgcggccacaagggcacatacggcctgctgagacggagagaggactggcctagcagactgcagatgttcttcgccaataaccacgaccaggagttcgacccccctaaggtgtaccctcccgtccccgccgagaagagaaagcccatccgggtcctgagcctgttcgatggcatcgccaccggtctgctggtgctgaaggacctgggcatccaggtggataggtacattgcctccgaggtgtgcgaggactccatcaccgtgggaatggtgcgtcatcagggcaagatcatgtacgtgggcgacgtgcggagcgtgacacagaagcatatccaggagtggggccctttcgacctggtgatcggcggcagcccttgcaatgacctgagcatcgtgaacccagcccggaagggcctgtacgagggaaccggcagactgttcttcgagttttacagactgctgcacgacgcccggcctaaggaaggcgacgaccggcccttcttttggctgttcgagaatgtggtggccatgggagtcagcgacaagcgggatattagccggttcctggagagcaaccccgtgatgatcgatgccaaggaagtgagcgccgcccaccgggccagatacttctggggcaatctgcctggcatgaacagacccctggccagcaccgtgaacgacaagctggagctgcaggagtgcctggagcacggccggatcgccaagttcagcaaggtgagaaccatcaccacccgaagcaacagcatcaaacaaggcaaggaccagcactttcctgtgttcatgaacgagaaggaggacatcctgtggtgtaccgagatggagagagtgttcgggttcccagtccactacacagatgtcagcaacatgtctagactggccagacagagactgctgggaagaagctggtccgtccctgtgatcagacacctgttcgcccctctgaaggagtacttcgcctgcgtgagcagcggcaacagcaacgccaacagccggggccccagcttctctagcggcctggtgccactgtccctgagagggagccacatgggccccatggagatctacaaaaccgtgagcgcctggaagcggcagcctgtgcgcgtgctgagcctgtttcggaatatcgataaagtcctgaaaagcctgggattcctggagagcggctctggctccggcggtggcaccctgaagtacgtggaggatgtgacaaacgtggtcagacgggatgtggagaagtggggccccttcgatctggtgtacggcagcacccaacccctgggcagctcttgtgaccggtgccctggctggtacatgtttcagttccaccggatcctgcagtacgccctgccgagacaggagtcccagcggccattcttttggattttcatggacaacttgctgctgaccgaggatgaccaggaaactaccactcggttcctgcagaccgaagccgtgaccctgcaggacgtgagaggccgggactaccagaacgccatgcgggtgtggtccaacatccctggactgaaaagcaagcacgcacctctgacccctaaagaagaggagtacctgcaggcccaggtgcggagcagaagcaagctggacgcccctaaggtggatctgctggtgaagaattgcctcctgcccctgagagagtacttcaagtatttcagccagaatagtctgcccctgggaggcagcggcggcggcccccaggtgagcctgaccttcgaggacgtggccgtgctgttcaccagggacgagtggaggaagctggcccccagccagaggaacctgtacagggacgtgatgctggagaactacaggaacctggtgagcctgggcctgcccttcaccaagcccaaggtgatcagcctgctgcagcagggcgaggacccctggaaggtggagaaggacagcagcggcggctgcagccccggctgcaagagcaacggcggcccaagcagcggcgcccctcctcccagcggcggcagcccagccggctccccaacctctaccgaggagggcacctctgagtccgccacccccgagagcggccctggcacctccaccgagcccagcgagggcagcgcacccggcagccctgccggcagccccacctccacagaggagggaaccagcaccgagcccagcgaaggcagcgccccaggcaccagcaccgagcctagtgagcaggagattaaacggatcaacaagatcagaagaagacttgtgaaagacagcaacaccaagaaggccggcaagacaggccccatgaaaaccctgctggttagagtgatgacacccgatctgagagagcggctggaaaacctgagaaagaagcctgaaaatatcccccagcccatcagcaatacatctagagccaacctgaataagctgctgaccgattacaccgaaatgaagaaggcgatcctgcatgtgtactgggaagagttccagaaggaccctgtgggcctgatgagccgggtggcccagcctgccagcaagaagatcgatcagaacaagctgaaacctgagatggacgagaagggcaacctgaccaccgccggctttgcctgctctcagtgtggccagcccctgttcgtgtacaagctggagcaggtgtctgagaagggcaaggcttacaccaactacttcggacggtgcaatgtggccgagcacgaaaagctgatcctgctggcccagctgaagcccgagaaggatagcgacgaagccgtgacatatagcctgggaaagtttgggcagagggccctggatttctacagcattcatgtgaccaaggagtccacccaccccgtgaagcccctggcccagatcgccggaaacagatacgcctccggacctgtgggaaaggccctgagcgacgcatgtatgggcacaatcgcctccttcctgtctaagtaccaggacatcatcatcgaacaccagaaggtggtgaagggcaaccagaagagactggagagcctgcgggagctggccggcaaggaaaacctggaataccctagcgtgaccctgccacctcagcctcacaccaaggagggcgttgatgcctacaacgaagtgatcgcccgggtgcgaatgtgggtgaacctgaacctgtggcagaagctgaagctaagcagagatgatgccaagcctctgctgagactgaagggattcccttcctttcctctggtcgagagacaggccaacgaagtggactggtgggacatggtgtgtaacgtgaagaagctgatcaacgagaaaaaggaggatggcaaggtgttttggcagaatctggctggctacaagagacaggaagccctgagaccatacctgagcagcgaggaagatcggaagaagggaaagaaattcgctcggtaccagctgggcgacctgctgctgcacctggaaaagaagcacggcgaggactggggaaaggtgtacgacgaggcctgggagcggattgacaagaaagtggaaggcctgagcaagcacatcaagctggaagaggaacggagaagcgaggacgcccagagcaaggccgccctgaccgactggctgcgggctaaggccagcttcgtgatcgagggcctgaaggaggccgacaaggacgagttctgcagatgcgagctgaagctgcagaagtggtacggggacctgcggggaaagcccttcgccatcgaagccgagaacagcatcctggacatcagcggcttcagcaagcagtacaactgtgccttcatctggcagaaggacggcgtgaagaagctgaacctgtacctgatcatcaactacttcaagggcggcaagctgcggttcaagaagatcaaacctgaagccttcgaagccaacagattctacaccgtgatcaacaaaaagagcggcgagatcgtgcccatggaggtgaacttcaacttcgacgaccccaacctgatcatcctgcctctggcctttggcaagagacagggcagagaattcatctggaacgacctgctgtccctggaaaccggcagcctgaagctggccaacggaagagtgatcgagaagacactgtacaacagaagaacccggcaggatgagcctgccctgttcgtggccctgaccttcgagcggcgggaggtcctggactcctccaatatcaaaccaatgaacctgatcggcgtggcaagaggcgaaaacatccccgccgtgatcgccctgaccgaccccgagggctgcccactgagccggtttaaggatagcctgggaaacccaacccacatcctgagaatcggcgagagctataaggagaagcagcggaccatccaggccaagaaggaggtggagcagcggagagccggcggctacagccggaagtacgccagcaaagccaagaatctggcagacgatatggtgagaaacaccgctagagatctgctgtactacgccgtgacccaggatgccatgctgatcttcgccaacctgagccggggcttcggccggcagggcaagcggaccttcatggccgagagacagtacacacggatggaggactggctgaccgccaagctggcctacgagggcctgagcaagacctacctgtccaagacactggcccagtacacctccaagacatgcagcaactgtgggtttaccatcaccagcgccgactacgacagggtgctggagaagctgaagaagacagcaacaggctggatgaccacaattaacggcaaggagctgaaggtggagggccagattacctactacaacagatacaagagacagaacgtagtcaaggacctgtccgtcgagctggatagactgagcgaagaatctgtgaacaacgacatctcctcctggacaaagggcagaagcggagaagctctgagcctcctgaagaaaagattctcccatagacccgtgcaggagaagttcgtgtgcctgaactgcggcttcgagacacacgcagccgagcaagccgccctgaacatcgccagatcctggctgttcctgcggagccaggagtacaagaaataccagacaaacaagacaaccggcaacaccgataagagagccttcgtcgagacctggcagtccttttaccggaagaagcttaaggaggtgtggaaacctgccgtgcggtctggcggatctggcggaggctccaccagccccaagaaaaagagaaaagtctaagctgccttctgcggggcttgccttctggccatgcccttcttctctcccttgcacctgtacctcttggtctttgaataaagcctgagtaggaaggctagcaaaaaaaaaaaaaaaaaaaaaaaaaaaaaaaaaaaaaaaaaaaaaaaaaaaaaaaaaaaaaaaaaaaaaaaaaaaaaaaa

SEQ ID NO: 13357 - RNA, 5785 nt, synthetic construct
  source 1..5785: mol_type = other RNA
aggaaataagagagaaaagaagagtaagaagaaatataagagccaccatggcccctaagaagaagcgtaaagtgagccggatggaacgcctcgtctacgaggtgcggcagaagtgcagaaacatcgaggacatctgcatctcctgcggatctctgaacgtgaccctggagcacccactgttcatcggcggcatgtgccagaactgtaaaaactgttttctggagtgtgcctatcaatacgacgatgacggctaccagagctactgcaccatctgttgcggcggaagagaggtgctgatgtgtggaaataacaactgctgccggtgcttctgcgtggaatgcgtggacctgctggtgggccccggcgccgcccaggccgctattaaggaagatccttggaactgctacatgtgcggccacaagggcacatacggcctgctgagacggagagaggactggcctagcagactgcagatgttcttcgccaataaccacgaccaggagttcgacccccctaaggtgtaccctcccgtccccgccgagaagagaaagcccatccgggtcctgagcctgttcgatggcatcgccaccggtctgctggtgctgaaggacctgggcatccaggtggataggtacattgcctccgaggtgtgcgaggactccatcaccgtgggaatggtgcgtcatcagggcaagatcatgtacgtgggcgacgtgcggagcgtgacacagaagcatatccaggagtggggccctttcgacctggtgatcggcggcagcccttgcaatgacctgagcatcgtgaacccagcccggaagggcctgtacgagggaaccggcagactgttcttcgagttttacagactgctgcacgacgcccggcctaaggaaggcgacgaccggcccttcttttggctgttcgagaatgtggtggccatgggagtcagcgacaagcgggatattagccggttcctggagagcaaccccgtgatgatcgatgccaaggaagtgagcgccgcccaccgggccagatacttctggggcaatctgcctggcatgaacagacccctggccagcaccgtgaacgacaagctggagctgcaggagtgcctggagcacggccggatcgccaagttcagcaaggtgagaaccatcaccacccgaagcaacagcatcaaacaaggcaaggaccagcactttcctgtgttcatgaacgagaaggaggacatcctgtggtgtaccgagatggagagagtgttcgggttcccagtccactacacagatgtcagcaacatgtctagactggccagacagagactgctgggaagaagctggtccgtccctgtgatcagacacctgttcgcccctctgaaggagtacttcgcctgcgtgagcagcggcaacagcaacgccaacagccggggccccagcttctctagcggcctggtgccactgtccctgagagggagccacatgggccccatggagatctacaaaaccgtgagcgcctggaagcggcagcctgtgcgcgtgctgagcctgtttcggaatatcgataaagtcctgaaaagcctgggattcctggagagcggctctggctccggcggtggcaccctgaagtacgtggaggatgtgacaaacgtggtcagacgggatgtggagaagtggggccccttcgatctggtgtacggcagcacccaacccctgggcagctcttgtgaccggtgccctggctggtacatgtttcagttccaccggatcctgcagtacgccctgccgagacaggagtcccagcggccattcttttggattttcatggacaacttgctgctgaccgaggatgaccaggaaactaccactcggttcctgcagaccgaagccgtgaccctgcaggacgtgagaggccgggactaccagaacgccatgcgggtgtggtccaacatccctggactgaaaagcaagcacgcacctctgacccctaaagaagaggagtacctgcaggcccaggtgcggagcagaagcaagctggacgcccctaaggtggatctgctggtgaagaattgcctcctgcccctgagagagtacttcaagtatttcagccagaatagtctgcccctgggaggcagcggcggcggcgcccacagcatggtgatgttcagggacgtgaccgtggacttcagccaggaggagtgggagtgcctgagcagctacgagagggacctgtacagggacgtgatgctggagaactacagccacctggtgagcctggccggctgcagcatcagcaagcccgacgtgatcaccctgctggagcagggcaaggagccctggatgatcgtgagggccgagaagaggaggtggagcagggacctggagagcggcggcccaagcagcggcgcccctcctcccagcggcggcagcccagccggctccccaacctctaccgaggagggcacctctgagtccgccacccccgagagcggccctggcacctccaccgagcccagcgagggcagcgcacccggcagccctgccggcagccccacctccacagaggagggaaccagcaccgagcccagcgaaggcagcgccccaggcaccagcaccgagcctagtgagcaggagattaaacggatcaacaagatcagaagaagacttgtgaaagacagcaacaccaagaaggccggcaagacaggccccatgaaaaccctgctggttagagtgatgacacccgatctgagagagcggctggaaaacctgagaaagaagcctgaaaatatcccccagcccatcagcaatacatctagagccaacctgaataagctgctgaccgattacaccgaaatgaagaaggcgatcctgcatgtgtactgggaagagttccagaaggaccctgtgggcctgatgagccgggtggcccagcctgccagcaagaagatcgatcagaacaagctgaaacctgagatggacgagaagggcaacctgaccaccgccggctttgcctgctctcagtgtggccagcccctgttcgtgtacaagctggagcaggtgtctgagaagggcaaggcttacaccaactacttcggacggtgcaatgtggccgagcacgaaaagctgatcctgctggcccagctgaagcccgagaaggatagcgacgaagccgtgacatatagcctgggaaagtttgggcagagggccctggatttctacagcattcatgtgaccaaggagtccacccaccccgtgaagcccctggcccagatcgccggaaacagatacgcctccggacctgtgggaaaggccctgagcgacgcatgtatgggcacaatcgcctccttcctgtctaagtaccaggacatcatcatcgaacaccagaaggtggtgaagggcaaccagaagagactggagagcctgcgggagctggccggcaaggaaaacctggaataccctagcgtgaccctgccacctcagcctcacaccaaggagggcgttgatgcctacaacgaagtgatcgcccgggtgcgaatgtgggtgaacctgaacctgtggcagaagctgaagctaagcagagatgatgccaagcctctgctgagactgaagggattcccttcctttcctctggtcgagagacaggccaacgaagtggactggtgggacatggtgtgtaacgtgaagaagctgatcaacgagaaaaaggaggatggcaaggtgttttggcagaatctggctggctacaagagacaggaagccctgagaccatacctgagcagcgaggaagatcggaagaagggaaagaaattcgctcggtaccagctgggcgacctgctgctgcacctggaaaagaagcacggcgaggactggggaaaggtgtacgacgaggcctgggagcggattgacaagaaagtggaaggcctgagcaagcacatcaagctggaagaggaacggagaagcgaggacgcccagagcaaggccgccctgaccgactggctgcgggctaaggccagcttcgtgatcgagggcctgaaggaggccgacaaggacgagttctgcagatgcgagctgaagctgcagaagtggtacggggacctgcggggaaagcccttcgccatcgaagccgagaacagcatcctggacatcagcggcttcagcaagcagtacaactgtgccttcatctggcagaaggacggcgtgaagaagctgaacctgtacctgatcatcaactacttcaagggcggcaagctgcggttcaagaagatcaaacctgaagccttcgaagccaacagattctacaccgtgatcaacaaaaagagcggcgagatcgtgcccatggaggtgaacttcaacttcgacgaccccaacctgatcatcctgcctctggcctttggcaagagacagggcagagaattcatctggaacgacctgctgtccctggaaaccggcagcctgaagctggccaacggaagagtgatcgagaagacactgtacaacagaagaacccggcaggatgagcctgccctgttcgtggccctgaccttcgagcggcgggaggtcctggactcctccaatatcaaaccaatgaacctgatcggcgtggcaagaggcgaaaacatccccgccgtgatcgccctgaccgaccccgagggctgcccactgagccggtttaaggatagcctgggaaacccaacccacatcctgagaatcggcgagagctataaggagaagcagcggaccatccaggccaagaaggaggtggagcagcggagagccggcggctacagccggaagtacgccagcaaagccaagaatctggcagacgatatggtgagaaacaccgctagagatctgctgtactacgccgtgacccaggatgccatgctgatcttcgccaacctgagccggggcttcggccggcagggcaagcggaccttcatggccgagagacagtacacacggatggaggactggctgaccgccaagctggcctacgagggcctgagcaagacctacctgtccaagacactggcccagtacacctccaagacatgcagcaactgtgggtttaccatcaccagcgccgactacgacagggtgctggagaagctgaagaagacagcaacaggctggatgaccacaattaacggcaaggagctgaaggtggagggccagattacctactacaacagatacaagagacagaacgtagtcaaggacctgtccgtcgagctggatagactgagcgaagaatctgtgaacaacgacatctcctcctggacaaagggcagaagcggagaagctctgagcctcctgaagaaaagattctcccatagacccgtgcaggagaagttcgtgtgcctgaactgcggcttcgagacacacgcagccgagcaagccgccctgaacatcgccagatcctggctgttcctgcggagccaggagtacaagaaataccagacaaacaagacaaccggcaacaccgataagagagccttcgtcgagacctggcagtccttttaccggaagaagcttaaggaggtgtggaaacctgccgtgcggtctggcggatctggcggaggctccaccagccccaagaaaaagagaaaagtctaagctgccttctgcggggcttgccttctggccatgcccttcttctctcccttgcacctgtacctcttggtctttgaataaagcctgagtaggaaggctagcaaaaaaaaaaaaaaaaaaaaaaaaaaaaaaaaaaaaaaaaaaaaaaaaaaaaaaaaaaaaaaaaaaaaaaaaaaaaaaaa

SEQ ID NO: 13358 - RNA, 5785 nt, synthetic construct
  source 1..5785: mol_type = other RNA
aggaaataagagagaaaagaagagtaagaagaaatataagagccaccatggcccctaagaagaagcgtaaagtgagccggatggaacgcctcgtctacgaggtgcggcagaagtgcagaaacatcgaggacatctgcatctcctgcggatctctgaacgtgaccctggagcacccactgttcatcggcggcatgtgccagaactgtaaaaactgttttctggagtgtgcctatcaatacgacgatgacggctaccagagctactgcaccatctgttgcggcggaagagaggtgctgatgtgtggaaataacaactgctgccggtgcttctgcgtggaatgcgtggacctgctggtgggccccggcgccgcccaggccgctattaaggaagatccttggaactgctacatgtgcggccacaagggcacatacggcctgctgagacggagagaggactggcctagcagactgcagatgttcttcgccaataaccacgaccaggagttcgacccccctaaggtgtaccctcccgtccccgccgagaagagaaagcccatccgggtcctgagcctgttcgatggcatcgccaccggtctgctggtgctgaaggacctgggcatccaggtggataggtacattgcctccgaggtgtgcgaggactccatcaccgtgggaatggtgcgtcatcagggcaagatcatgtacgtgggcgacgtgcggagcgtgacacagaagcatatccaggagtggggccctttcgacctggtgatcggcggcagcccttgcaatgacctgagcatcgtgaacccagcccggaagggcctgtacgagggaaccggcagactgttcttcgagttttacagactgctgcacgacgcccggcctaaggaaggcgacgaccggcccttcttttggctgttcgagaatgtggtggccatgggagtcagcgacaagcgggatattagccggttcctggagagcaaccccgtgatgatcgatgccaaggaagtgagcgccgcccaccgggccagatacttctggggcaatctgcctggcatgaacagacccctggccagcaccgtgaacgacaagctggagctgcaggagtgcctggagcacggccggatcgccaagttcagcaaggtgagaaccatcaccacccgaagcaacagcatcaaacaaggcaaggaccagcactttcctgtgttcatgaacgagaaggaggacatcctgtggtgtaccgagatggagagagtgttcgggttcccagtccactacacagatgtcagcaacatgtctagactggccagacagagactgctgggaagaagctggtccgtccctgtgatcagacacctgttcgcccctctgaaggagtacttcgcctgcgtgagcagcggcaacagcaacgccaacagccggggccccagcttctctagcggcctggtgccactgtccctgagagggagccacatgggccccatggagatctacaaaaccgtgagcgcctggaagcggcagcctgtgcgcgtgctgagcctgtttcggaatatcgataaagtcctgaaaagcctgggattcctggagagcggctctggctccggcggtggcaccctgaagtacgtggaggatgtgacaaacgtggtcagacgggatgtggagaagtggggccccttcgatctggtgtacggcagcacccaacccctgggcagctcttgtgaccggtgccctggctggtacatgtttcagttccaccggatcctgcagtacgccctgccgagacaggagtcccagcggccattcttttggattttcatggacaacttgctgctgaccgaggatgaccaggaaactaccactcggttcctgcagaccgaagccgtgaccctgcaggacgtgagaggccgggactaccagaacgccatgcgggtgtggtccaacatccctggactgaaaagcaagcacgcacctctgacccctaaagaagaggagtacctgcaggcccaggtgcggagcagaagcaagctggacgcccctaaggtggatctgctggtgaagaattgcctcctgcccctgagagagtacttcaagtatttcagccagaatagtctgcccctgggaggcagcggcggcggccaggtgcccgtgaccttcgaggacatcgccgtgagcttcagccaggaggagtggaagtacctggacgagggccagaagaacctgtactgggaggtgatgaaggagaactacgagaccctgatcagcctggccgacagcgaggtggagcaggaggacaagagggccaagaacagggaggagtgccccatgctgtggggcctgatccccaggcagagcaggaagaacagcgagaaggtgagctggggcggcccaagcagcggcgcccctcctcccagcggcggcagcccagccggctccccaacctctaccgaggagggcacctctgagtccgccacccccgagagcggccctggcacctccaccgagcccagcgagggcagcgcacccggcagccctgccggcagccccacctccacagaggagggaaccagcaccgagcccagcgaaggcagcgccccaggcaccagcaccgagcctagtgagcaggagattaaacggatcaacaagatcagaagaagacttgtgaaagacagcaacaccaagaaggccggcaagacaggccccatgaaaaccctgctggttagagtgatgacacccgatctgagagagcggctggaaaacctgagaaagaagcctgaaaatatcccccagcccatcagcaatacatctagagccaacctgaataagctgctgaccgattacaccgaaatgaagaaggcgatcctgcatgtgtactgggaagagttccagaaggaccctgtgggcctgatgagccgggtggcccagcctgccagcaagaagatcgatcagaacaagctgaaacctgagatggacgagaagggcaacctgaccaccgccggctttgcctgctctcagtgtggccagcccctgttcgtgtacaagctggagcaggtgtctgagaagggcaaggcttacaccaactacttcggacggtgcaatgtggccgagcacgaaaagctgatcctgctggcccagctgaagcccgagaaggatagcgacgaagccgtgacatatagcctgggaaagtttgggcagagggccctggatttctacagcattcatgtgaccaaggagtccacccaccccgtgaagcccctggcccagatcgccggaaacagatacgcctccggacctgtgggaaaggccctgagcgacgcatgtatgggcacaatcgcctccttcctgtctaagtaccaggacatcatcatcgaacaccagaaggtggtgaagggcaaccagaagagactggagagcctgcgggagctggccggcaaggaaaacctggaataccctagcgtgaccctgccacctcagcctcacaccaaggagggcgttgatgcctacaacgaagtgatcgcccgggtgcgaatgtgggtgaacctgaacctgtggcagaagctgaagctaagcagagatgatgccaagcctctgctgagactgaagggattcccttcctttcctctggtcgagagacaggccaacgaagtggactggtgggacatggtgtgtaacgtgaagaagctgatcaacgagaaaaaggaggatggcaaggtgttttggcagaatctggctggctacaagagacaggaagccctgagaccatacctgagcagcgaggaagatcggaagaagggaaagaaattcgctcggtaccagctgggcgacctgctgctgcacctggaaaagaagcacggcgaggactggggaaaggtgtacgacgaggcctgggagcggattgacaagaaagtggaaggcctgagcaagcacatcaagctggaagaggaacggagaagcgaggacgcccagagcaaggccgccctgaccgactggctgcgggctaaggccagcttcgtgatcgagggcctgaaggaggccgacaaggacgagttctgcagatgcgagctgaagctgcagaagtggtacggggacctgcggggaaagcccttcgccatcgaagccgagaacagcatcctggacatcagcggcttcagcaagcagtacaactgtgccttcatctggcagaaggacggcgtgaagaagctgaacctgtacctgatcatcaactacttcaagggcggcaagctgcggttcaagaagatcaaacctgaagccttcgaagccaacagattctacaccgtgatcaacaaaaagagcggcgagatcgtgcccatggaggtgaacttcaacttcgacgaccccaacctgatcatcctgcctctggcctttggcaagagacagggcagagaattcatctggaacgacctgctgtccctggaaaccggcagcctgaagctggccaacggaagagtgatcgagaagacactgtacaacagaagaacccggcaggatgagcctgccctgttcgtggccctgaccttcgagcggcgggaggtcctggactcctccaatatcaaaccaatgaacctgatcggcgtggcaagaggcgaaaacatccccgccgtgatcgccctgaccgaccccgagggctgcccactgagccggtttaaggatagcctgggaaacccaacccacatcctgagaatcggcgagagctataaggagaagcagcggaccatccaggccaagaaggaggtggagcagcggagagccggcggctacagccggaagtacgccagcaaagccaagaatctggcagacgatatggtgagaaacaccgctagagatctgctgtactacgccgtgacccaggatgccatgctgatcttcgccaacctgagccggggcttcggccggcagggcaagcggaccttcatggccgagagacagtacacacggatggaggactggctgaccgccaagctggcctacgagggcctgagcaagacctacctgtccaagacactggcccagtacacctccaagacatgcagcaactgtgggtttaccatcaccagcgccgactacgacagggtgctggagaagctgaagaagacagcaacaggctggatgaccacaattaacggcaaggagctgaaggtggagggccagattacctactacaacagatacaagagacagaacgtagtcaaggacctgtccgtcgagctggatagactgagcgaagaatctgtgaacaacgacatctcctcctggacaaagggcagaagcggagaagctctgagcctcctgaagaaaagattctcccatagacccgtgcaggagaagttcgtgtgcctgaactgcggcttcgagacacacgcagccgagcaagccgccctgaacatcgccagatcctggctgttcctgcggagccaggagtacaagaaataccagacaaacaagacaaccggcaacaccgataagagagccttcgtcgagacctggcagtccttttaccggaagaagcttaaggaggtgtggaaacctgccgtgcggtctggcggatctggcggaggctccaccagccccaagaaaaagagaaaagtctaagctgccttctgcggggcttgccttctggccatgcccttcttctctcccttgcacctgtacctcttggtctttgaataaagcctgagtaggaaggctagcaaaaaaaaaaaaaaaaaaaaaaaaaaaaaaaaaaaaaaaaaaaaaaaaaaaaaaaaaaaaaaaaaaaaaaaaaaaaaaaa

SEQ ID NO: 13359 - RNA, 5785 nt, synthetic construct
  source 1..5785: mol_type = other RNA
aggaaataagagagaaaagaagagtaagaagaaatataagagccaccatggcccctaagaagaagcgtaaagtgagccggatggaacgcctcgtctacgaggtgcggcagaagtgcagaaacatcgaggacatctgcatctcctgcggatctctgaacgtgaccctggagcacccactgttcatcggcggcatgtgccagaactgtaaaaactgttttctggagtgtgcctatcaatacgacgatgacggctaccagagctactgcaccatctgttgcggcggaagagaggtgctgatgtgtggaaataacaactgctgccggtgcttctgcgtggaatgcgtggacctgctggtgggccccggcgccgcccaggccgctattaaggaagatccttggaactgctacatgtgcggccacaagggcacatacggcctgctgagacggagagaggactggcctagcagactgcagatgttcttcgccaataaccacgaccaggagttcgacccccctaaggtgtaccctcccgtccccgccgagaagagaaagcccatccgggtcctgagcctgttcgatggcatcgccaccggtctgctggtgctgaaggacctgggcatccaggtggataggtacattgcctccgaggtgtgcgaggactccatcaccgtgggaatggtgcgtcatcagggcaagatcatgtacgtgggcgacgtgcggagcgtgacacagaagcatatccaggagtggggccctttcgacctggtgatcggcggcagcccttgcaatgacctgagcatcgtgaacccagcccggaagggcctgtacgagggaaccggcagactgttcttcgagttttacagactgctgcacgacgcccggcctaaggaaggcgacgaccggcccttcttttggctgttcgagaatgtggtggccatgggagtcagcgacaagcgggatattagccggttcctggagagcaaccccgtgatgatcgatgccaaggaagtgagcgccgcccaccgggccagatacttctggggcaatctgcctggcatgaacagacccctggccagcaccgtgaacgacaagctggagctgcaggagtgcctggagcacggccggatcgccaagttcagcaaggtgagaaccatcaccacccgaagcaacagcatcaaacaaggcaaggaccagcactttcctgtgttcatgaacgagaaggaggacatcctgtggtgtaccgagatggagagagtgttcgggttcccagtccactacacagatgtcagcaacatgtctagactggccagacagagactgctgggaagaagctggtccgtccctgtgatcagacacctgttcgcccctctgaaggagtacttcgcctgcgtgagcagcggcaacagcaacgccaacagccggggccccagcttctctagcggcctggtgccactgtccctgagagggagccacatgggccccatggagatctacaaaaccgtgagcgcctggaagcggcagcctgtgcgcgtgctgagcctgtttcggaatatcgataaagtcctgaaaagcctgggattcctggagagcggctctggctccggcggtggcaccctgaagtacgtggaggatgtgacaaacgtggtcagacgggatgtggagaagtggggccccttcgatctggtgtacggcagcacccaacccctgggcagctcttgtgaccggtgccctggctggtacatgtttcagttccaccggatcctgcagtacgccctgccgagacaggagtcccagcggccattcttttggattttcatggacaacttgctgctgaccgaggatgaccaggaaactaccactcggttcctgcagaccgaagccgtgaccctgcaggacgtgagaggccgggactaccagaacgccatgcgggtgtggtccaacatccctggactgaaaagcaagcacgcacctctgacccctaaagaagaggagtacctgcaggcccaggtgcggagcagaagcaagctggacgcccctaaggtggatctgctggtgaagaattgcctcctgcccctgagagagtacttcaagtatttcagccagaatagtctgcccctgggaggcagcggcggcggcatggaggagctgctgagcttccccgacgtggccatcgacttcagcgccgaggagtgcgagtgcctggacctggcccagtggaacctgtacaaggaggtgatgctggagaactacagcaacctggtgttcctgggcctgagcttcagcaagccctacctggtgaccttcctggagcagagcagcgagccctggagcgtgaagaggaagagcgccgccgccagccaccccggcagcaagccccacggcggcccaagcagcggcgcccctcctcccagcggcggcagcccagccggctccccaacctctaccgaggagggcacctctgagtccgccacccccgagagcggccctggcacctccaccgagcccagcgagggcagcgcacccggcagccctgccggcagccccacctccacagaggagggaaccagcaccgagcccagcgaaggcagcgccccaggcaccagcaccgagcctagtgagcaggagattaaacggatcaacaagatcagaagaagacttgtgaaagacagcaacaccaagaaggccggcaagacaggccccatgaaaaccctgctggttagagtgatgacacccgatctgagagagcggctggaaaacctgagaaagaagcctgaaaatatcccccagcccatcagcaatacatctagagccaacctgaataagctgctgaccgattacaccgaaatgaagaaggcgatcctgcatgtgtactgggaagagttccagaaggaccctgtgggcctgatgagccgggtggcccagcctgccagcaagaagatcgatcagaacaagctgaaacctgagatggacgagaagggcaacctgaccaccgccggctttgcctgctctcagtgtggccagcccctgttcgtgtacaagctggagcaggtgtctgagaagggcaaggcttacaccaactacttcggacggtgcaatgtggccgagcacgaaaagctgatcctgctggcccagctgaagcccgagaaggatagcgacgaagccgtgacatatagcctgggaaagtttgggcagagggccctggatttctacagcattcatgtgaccaaggagtccacccaccccgtgaagcccctggcccagatcgccggaaacagatacgcctccggacctgtgggaaaggccctgagcgacgcatgtatgggcacaatcgcctccttcctgtctaagtaccaggacatcatcatcgaacaccagaaggtggtgaagggcaaccagaagagactggagagcctgcgggagctggccggcaaggaaaacctggaataccctagcgtgaccctgccacctcagcctcacaccaaggagggcgttgatgcctacaacgaagtgatcgcccgggtgcgaatgtgggtgaacctgaacctgtggcagaagctgaagctaagcagagatgatgccaagcctctgctgagactgaagggattcccttcctttcctctggtcgagagacaggccaacgaagtggactggtgggacatggtgtgtaacgtgaagaagctgatcaacgagaaaaaggaggatggcaaggtgttttggcagaatctggctggctacaagagacaggaagccctgagaccatacctgagcagcgaggaagatcggaagaagggaaagaaattcgctcggtaccagctgggcgacctgctgctgcacctggaaaagaagcacggcgaggactggggaaaggtgtacgacgaggcctgggagcggattgacaagaaagtggaaggcctgagcaagcacatcaagctggaagaggaacggagaagcgaggacgcccagagcaaggccgccctgaccgactggctgcgggctaaggccagcttcgtgatcgagggcctgaaggaggccgacaaggacgagttctgcagatgcgagctgaagctgcagaagtggtacggggacctgcggggaaagcccttcgccatcgaagccgagaacagcatcctggacatcagcggcttcagcaagcagtacaactgtgccttcatctggcagaaggacggcgtgaagaagctgaacctgtacctgatcatcaactacttcaagggcggcaagctgcggttcaagaagatcaaacctgaagccttcgaagccaacagattctacaccgtgatcaacaaaaagagcggcgagatcgtgcccatggaggtgaacttcaacttcgacgaccccaacctgatcatcctgcctctggcctttggcaagagacagggcagagaattcatctggaacgacctgctgtccctggaaaccggcagcctgaagctggccaacggaagagtgatcgagaagacactgtacaacagaagaacccggcaggatgagcctgccctgttcgtggccctgaccttcgagcggcgggaggtcctggactcctccaatatcaaaccaatgaacctgatcggcgtggcaagaggcgaaaacatccccgccgtgatcgccctgaccgaccccgagggctgcccactgagccggtttaaggatagcctgggaaacccaacccacatcctgagaatcggcgagagctataaggagaagcagcggaccatccaggccaagaaggaggtggagcagcggagagccggcggctacagccggaagtacgccagcaaagccaagaatctggcagacgatatggtgagaaacaccgctagagatctgctgtactacgccgtgacccaggatgccatgctgatcttcgccaacctgagccggggcttcggccggcagggcaagcggaccttcatggccgagagacagtacacacggatggaggactggctgaccgccaagctggcctacgagggcctgagcaagacctacctgtccaagacactggcccagtacacctccaagacatgcagcaactgtgggtttaccatcaccagcgccgactacgacagggtgctggagaagctgaagaagacagcaacaggctggatgaccacaattaacggcaaggagctgaaggtggagggccagattacctactacaacagatacaagagacagaacgtagtcaaggacctgtccgtcgagctggatagactgagcgaagaatctgtgaacaacgacatctcctcctggacaaagggcagaagcggagaagctctgagcctcctgaagaaaagattctcccatagacccgtgcaggagaagttcgtgtgcctgaactgcggcttcgagacacacgcagccgagcaagccgccctgaacatcgccagatcctggctgttcctgcggagccaggagtacaagaaataccagacaaacaagacaaccggcaacaccgataagagagccttcgtcgagacctggcagtccttttaccggaagaagcttaaggaggtgtggaaacctgccgtgcggtctggcggatctggcggaggctccaccagccccaagaaaaagagaaaagtctaagctgccttctgcggggcttgccttctggccatgcccttcttctctcccttgcacctgtacctcttggtctttgaataaagcctgagtaggaaggctagcaaaaaaaaaaaaaaaaaaaaaaaaaaaaaaaaaaaaaaaaaaaaaaaaaaaaaaaaaaaaaaaaaaaaaaaaaaaaaaaa

SEQ ID NO: 13360 - RNA, 5785 nt, synthetic construct
  source 1..5785: mol_type = other RNA
aggaaataagagagaaaagaagagtaagaagaaatataagagccaccatggcccctaagaagaagcgtaaagtgagccggatggaacgcctcgtctacgaggtgcggcagaagtgcagaaacatcgaggacatctgcatctcctgcggatctctgaacgtgaccctggagcacccactgttcatcggcggcatgtgccagaactgtaaaaactgttttctggagtgtgcctatcaatacgacgatgacggctaccagagctactgcaccatctgttgcggcggaagagaggtgctgatgtgtggaaataacaactgctgccggtgcttctgcgtggaatgcgtggacctgctggtgggccccggcgccgcccaggccgctattaaggaagatccttggaactgctacatgtgcggccacaagggcacatacggcctgctgagacggagagaggactggcctagcagactgcagatgttcttcgccaataaccacgaccaggagttcgacccccctaaggtgtaccctcccgtccccgccgagaagagaaagcccatccgggtcctgagcctgttcgatggcatcgccaccggtctgctggtgctgaaggacctgggcatccaggtggataggtacattgcctccgaggtgtgcgaggactccatcaccgtgggaatggtgcgtcatcagggcaagatcatgtacgtgggcgacgtgcggagcgtgacacagaagcatatccaggagtggggccctttcgacctggtgatcggcggcagcccttgcaatgacctgagcatcgtgaacccagcccggaagggcctgtacgagggaaccggcagactgttcttcgagttttacagactgctgcacgacgcccggcctaaggaaggcgacgaccggcccttcttttggctgttcgagaatgtggtggccatgggagtcagcgacaagcgggatattagccggttcctggagagcaaccccgtgatgatcgatgccaaggaagtgagcgccgcccaccgggccagatacttctggggcaatctgcctggcatgaacagacccctggccagcaccgtgaacgacaagctggagctgcaggagtgcctggagcacggccggatcgccaagttcagcaaggtgagaaccatcaccacccgaagcaacagcatcaaacaaggcaaggaccagcactttcctgtgttcatgaacgagaaggaggacatcctgtggtgtaccgagatggagagagtgttcgggttcccagtccactacacagatgtcagcaacatgtctagactggccagacagagactgctgggaagaagctggtccgtccctgtgatcagacacctgttcgcccctctgaaggagtacttcgcctgcgtgagcagcggcaacagcaacgccaacagccggggccccagcttctctagcggcctggtgccactgtccctgagagggagccacatgggccccatggagatctacaaaaccgtgagcgcctggaagcggcagcctgtgcgcgtgctgagcctgtttcggaatatcgataaagtcctgaaaagcctgggattcctggagagcggctctggctccggcggtggcaccctgaagtacgtggaggatgtgacaaacgtggtcagacgggatgtggagaagtggggccccttcgatctggtgtacggcagcacccaacccctgggcagctcttgtgaccggtgccctggctggtacatgtttcagttccaccggatcctgcagtacgccctgccgagacaggagtcccagcggccattcttttggattttcatggacaacttgctgctgaccgaggatgaccaggaaactaccactcggttcctgcagaccgaagccgtgaccctgcaggacgtgagaggccgggactaccagaacgccatgcgggtgtggtccaacatccctggactgaaaagcaagcacgcacctctgacccctaaagaagaggagtacctgcaggcccaggtgcggagcagaagcaagctggacgcccctaaggtggatctgctggtgaagaattgcctcctgcccctgagagagtacttcaagtatttcagccagaatagtctgcccctgggaggcagcggcggcggcctgcccgacagcctgaccttcaccgacgtggccatcgacttcagccaggacgagtgggagtggctgagcctggcccagaggagcctgtacaggaaggtgatgctggagaactacatgaacctggtgagcgtgggcctgtgcatcagcaagcccgacgtgatcagcctgctggagcaggagaaggagccctggatggtgaccgagcagatcaccaggggcctgtgcgccgacctggagtacatgggcggcccaagcagcggcgcccctcctcccagcggcggcagcccagccggctccccaacctctaccgaggagggcacctctgagtccgccacccccgagagcggccctggcacctccaccgagcccagcgagggcagcgcacccggcagccctgccggcagccccacctccacagaggagggaaccagcaccgagcccagcgaaggcagcgccccaggcaccagcaccgagcctagtgagcaggagattaaacggatcaacaagatcagaagaagacttgtgaaagacagcaacaccaagaaggccggcaagacaggccccatgaaaaccctgctggttagagtgatgacacccgatctgagagagcggctggaaaacctgagaaagaagcctgaaaatatcccccagcccatcagcaatacatctagagccaacctgaataagctgctgaccgattacaccgaaatgaagaaggcgatcctgcatgtgtactgggaagagttccagaaggaccctgtgggcctgatgagccgggtggcccagcctgccagcaagaagatcgatcagaacaagctgaaacctgagatggacgagaagggcaacctgaccaccgccggctttgcctgctctcagtgtggccagcccctgttcgtgtacaagctggagcaggtgtctgagaagggcaaggcttacaccaactacttcggacggtgcaatgtggccgagcacgaaaagctgatcctgctggcccagctgaagcccgagaaggatagcgacgaagccgtgacatatagcctgggaaagtttgggcagagggccctggatttctacagcattcatgtgaccaaggagtccacccaccccgtgaagcccctggcccagatcgccggaaacagatacgcctccggacctgtgggaaaggccctgagcgacgcatgtatgggcacaatcgcctccttcctgtctaagtaccaggacatcatcatcgaacaccagaaggtggtgaagggcaaccagaagagactggagagcctgcgggagctggccggcaaggaaaacctggaataccctagcgtgaccctgccacctcagcctcacaccaaggagggcgttgatgcctacaacgaagtgatcgcccgggtgcgaatgtgggtgaacctgaacctgtggcagaagctgaagctaagcagagatgatgccaagcctctgctgagactgaagggattcccttcctttcctctggtcgagagacaggccaacgaagtggactggtgggacatggtgtgtaacgtgaagaagctgatcaacgagaaaaaggaggatggcaaggtgttttggcagaatctggctggctacaagagacaggaagccctgagaccatacctgagcagcgaggaagatcggaagaagggaaagaaattcgctcggtaccagctgggcgacctgctgctgcacctggaaaagaagcacggcgaggactggggaaaggtgtacgacgaggcctgggagcggattgacaagaaagtggaaggcctgagcaagcacatcaagctggaagaggaacggagaagcgaggacgcccagagcaaggccgccctgaccgactggctgcgggctaaggccagcttcgtgatcgagggcctgaaggaggccgacaaggacgagttctgcagatgcgagctgaagctgcagaagtggtacggggacctgcggggaaagcccttcgccatcgaagccgagaacagcatcctggacatcagcggcttcagcaagcagtacaactgtgccttcatctggcagaaggacggcgtgaagaagctgaacctgtacctgatcatcaactacttcaagggcggcaagctgcggttcaagaagatcaaacctgaagccttcgaagccaacagattctacaccgtgatcaacaaaaagagcggcgagatcgtgcccatggaggtgaacttcaacttcgacgaccccaacctgatcatcctgcctctggcctttggcaagagacagggcagagaattcatctggaacgacctgctgtccctggaaaccggcagcctgaagctggccaacggaagagtgatcgagaagacactgtacaacagaagaacccggcaggatgagcctgccctgttcgtggccctgaccttcgagcggcgggaggtcctggactcctccaatatcaaaccaatgaacctgatcggcgtggcaagaggcgaaaacatccccgccgtgatcgccctgaccgaccccgagggctgcccactgagccggtttaaggatagcctgggaaacccaacccacatcctgagaatcggcgagagctataaggagaagcagcggaccatccaggccaagaaggaggtggagcagcggagagccggcggctacagccggaagtacgccagcaaagccaagaatctggcagacgatatggtgagaaacaccgctagagatctgctgtactacgccgtgacccaggatgccatgctgatcttcgccaacctgagccggggcttcggccggcagggcaagcggaccttcatggccgagagacagtacacacggatggaggactggctgaccgccaagctggcctacgagggcctgagcaagacctacctgtccaagacactggcccagtacacctccaagacatgcagcaactgtgggtttaccatcaccagcgccgactacgacagggtgctggagaagctgaagaagacagcaacaggctggatgaccacaattaacggcaaggagctgaaggtggagggccagattacctactacaacagatacaagagacagaacgtagtcaaggacctgtccgtcgagctggatagactgagcgaagaatctgtgaacaacgacatctcctcctggacaaagggcagaagcggagaagctctgagcctcctgaagaaaagattctcccatagacccgtgcaggagaagttcgtgtgcctgaactgcggcttcgagacacacgcagccgagcaagccgccctgaacatcgccagatcctggctgttcctgcggagccaggagtacaagaaataccagacaaacaagacaaccggcaacaccgataagagagccttcgtcgagacctggcagtccttttaccggaagaagcttaaggaggtgtggaaacctgccgtgcggtctggcggatctggcggaggctccaccagccccaagaaaaagagaaaagtctaagctgccttctgcggggcttgccttctggccatgcccttcttctctcccttgcacctgtacctcttggtctttgaataaagcctgagtaggaaggctagcaaaaaaaaaaaaaaaaaaaaaaaaaaaaaaaaaaaaaaaaaaaaaaaaaaaaaaaaaaaaaaaaaaaaaaaaaaaaaaaa

SEQ ID NO: 13361 - RNA, 5785 nt, synthetic construct
  source 1..5785: mol_type = other RNA
aggaaataagagagaaaagaagagtaagaagaaatataagagccaccatggcccctaagaagaagcgtaaagtgagccggatggaacgcctcgtctacgaggtgcggcagaagtgcagaaacatcgaggacatctgcatctcctgcggatctctgaacgtgaccctggagcacccactgttcatcggcggcatgtgccagaactgtaaaaactgttttctggagtgtgcctatcaatacgacgatgacggctaccagagctactgcaccatctgttgcggcggaagagaggtgctgatgtgtggaaataacaactgctgccggtgcttctgcgtggaatgcgtggacctgctggtgggccccggcgccgcccaggccgctattaaggaagatccttggaactgctacatgtgcggccacaagggcacatacggcctgctgagacggagagaggactggcctagcagactgcagatgttcttcgccaataaccacgaccaggagttcgacccccctaaggtgtaccctcccgtccccgccgagaagagaaagcccatccgggtcctgagcctgttcgatggcatcgccaccggtctgctggtgctgaaggacctgggcatccaggtggataggtacattgcctccgaggtgtgcgaggactccatcaccgtgggaatggtgcgtcatcagggcaagatcatgtacgtgggcgacgtgcggagcgtgacacagaagcatatccaggagtggggccctttcgacctggtgatcggcggcagcccttgcaatgacctgagcatcgtgaacccagcccggaagggcctgtacgagggaaccggcagactgttcttcgagttttacagactgctgcacgacgcccggcctaaggaaggcgacgaccggcccttcttttggctgttcgagaatgtggtggccatgggagtcagcgacaagcgggatattagccggttcctggagagcaaccccgtgatgatcgatgccaaggaagtgagcgccgcccaccgggccagatacttctggggcaatctgcctggcatgaacagacccctggccagcaccgtgaacgacaagctggagctgcaggagtgcctggagcacggccggatcgccaagttcagcaaggtgagaaccatcaccacccgaagcaacagcatcaaacaaggcaaggaccagcactttcctgtgttcatgaacgagaaggaggacatcctgtggtgtaccgagatggagagagtgttcgggttcccagtccactacacagatgtcagcaacatgtctagactggccagacagagactgctgggaagaagctggtccgtccctgtgatcagacacctgttcgcccctctgaaggagtacttcgcctgcgtgagcagcggcaacagcaacgccaacagccggggccccagcttctctagcggcctggtgccactgtccctgagagggagccacatgggccccatggagatctacaaaaccgtgagcgcctggaagcggcagcctgtgcgcgtgctgagcctgtttcggaatatcgataaagtcctgaaaagcctgggattcctggagagcggctctggctccggcggtggcaccctgaagtacgtggaggatgtgacaaacgtggtcagacgggatgtggagaagtggggccccttcgatctggtgtacggcagcacccaacccctgggcagctcttgtgaccggtgccctggctggtacatgtttcagttccaccggatcctgcagtacgccctgccgagacaggagtcccagcggccattcttttggattttcatggacaacttgctgctgaccgaggatgaccaggaaactaccactcggttcctgcagaccgaagccgtgaccctgcaggacgtgagaggccgggactaccagaacgccatgcgggtgtggtccaacatccctggactgaaaagcaagcacgcacctctgacccctaaagaagaggagtacctgcaggcccaggtgcggagcagaagcaagctggacgcccctaaggtggatctgctggtgaagaattgcctcctgcccctgagagagtacttcaagtatttcagccagaatagtctgcccctgggaggcagcggcggcggcgaggagacccagggcgagctgaccagcagctgcggcagcaagaccatggccaacgtgagcctggccttcagggacgtgagcatcgacctgagccaggaggagtgggagtgcctggaccccgtgcagagggacctgtacaaggacgtgatgctggagaactacagcaacctggtgagcctgggctacaccatccccaagcccgacgtgatcaccctgctggagcaggagaaggagccctggatcggcggcccaagcagcggcgcccctcctcccagcggcggcagcccagccggctccccaacctctaccgaggagggcacctctgagtccgccacccccgagagcggccctggcacctccaccgagcccagcgagggcagcgcacccggcagccctgccggcagccccacctccacagaggagggaaccagcaccgagcccagcgaaggcagcgccccaggcaccagcaccgagcctagtgagcaggagattaaacggatcaacaagatcagaagaagacttgtgaaagacagcaacaccaagaaggccggcaagacaggccccatgaaaaccctgctggttagagtgatgacacccgatctgagagagcggctggaaaacctgagaaagaagcctgaaaatatcccccagcccatcagcaatacatctagagccaacctgaataagctgctgaccgattacaccgaaatgaagaaggcgatcctgcatgtgtactgggaagagttccagaaggaccctgtgggcctgatgagccgggtggcccagcctgccagcaagaagatcgatcagaacaagctgaaacctgagatggacgagaagggcaacctgaccaccgccggctttgcctgctctcagtgtggccagcccctgttcgtgtacaagctggagcaggtgtctgagaagggcaaggcttacaccaactacttcggacggtgcaatgtggccgagcacgaaaagctgatcctgctggcccagctgaagcccgagaaggatagcgacgaagccgtgacatatagcctgggaaagtttgggcagagggccctggatttctacagcattcatgtgaccaaggagtccacccaccccgtgaagcccctggcccagatcgccggaaacagatacgcctccggacctgtgggaaaggccctgagcgacgcatgtatgggcacaatcgcctccttcctgtctaagtaccaggacatcatcatcgaacaccagaaggtggtgaagggcaaccagaagagactggagagcctgcgggagctggccggcaaggaaaacctggaataccctagcgtgaccctgccacctcagcctcacaccaaggagggcgttgatgcctacaacgaagtgatcgcccgggtgcgaatgtgggtgaacctgaacctgtggcagaagctgaagctaagcagagatgatgccaagcctctgctgagactgaagggattcccttcctttcctctggtcgagagacaggccaacgaagtggactggtgggacatggtgtgtaacgtgaagaagctgatcaacgagaaaaaggaggatggcaaggtgttttggcagaatctggctggctacaagagacaggaagccctgagaccatacctgagcagcgaggaagatcggaagaagggaaagaaattcgctcggtaccagctgggcgacctgctgctgcacctggaaaagaagcacggcgaggactggggaaaggtgtacgacgaggcctgggagcggattgacaagaaagtggaaggcctgagcaagcacatcaagctggaagaggaacggagaagcgaggacgcccagagcaaggccgccctgaccgactggctgcgggctaaggccagcttcgtgatcgagggcctgaaggaggccgacaaggacgagttctgcagatgcgagctgaagctgcagaagtggtacggggacctgcggggaaagcccttcgccatcgaagccgagaacagcatcctggacatcagcggcttcagcaagcagtacaactgtgccttcatctggcagaaggacggcgtgaagaagctgaacctgtacctgatcatcaactacttcaagggcggcaagctgcggttcaagaagatcaaacctgaagccttcgaagccaacagattctacaccgtgatcaacaaaaagagcggcgagatcgtgcccatggaggtgaacttcaacttcgacgaccccaacctgatcatcctgcctctggcctttggcaagagacagggcagagaattcatctggaacgacctgctgtccctggaaaccggcagcctgaagctggccaacggaagagtgatcgagaagacactgtacaacagaagaacccggcaggatgagcctgccctgttcgtggccctgaccttcgagcggcgggaggtcctggactcctccaatatcaaaccaatgaacctgatcggcgtggcaagaggcgaaaacatccccgccgtgatcgccctgaccgaccccgagggctgcccactgagccggtttaaggatagcctgggaaacccaacccacatcctgagaatcggcgagagctataaggagaagcagcggaccatccaggccaagaaggaggtggagcagcggagagccggcggctacagccggaagtacgccagcaaagccaagaatctggcagacgatatggtgagaaacaccgctagagatctgctgtactacgccgtgacccaggatgccatgctgatcttcgccaacctgagccggggcttcggccggcagggcaagcggaccttcatggccgagagacagtacacacggatggaggactggctgaccgccaagctggcctacgagggcctgagcaagacctacctgtccaagacactggcccagtacacctccaagacatgcagcaactgtgggtttaccatcaccagcgccgactacgacagggtgctggagaagctgaagaagacagcaacaggctggatgaccacaattaacggcaaggagctgaaggtggagggccagattacctactacaacagatacaagagacagaacgtagtcaaggacctgtccgtcgagctggatagactgagcgaagaatctgtgaacaacgacatctcctcctggacaaagggcagaagcggagaagctctgagcctcctgaagaaaagattctcccatagacccgtgcaggagaagttcgtgtgcctgaactgcggcttcgagacacacgcagccgagcaagccgccctgaacatcgccagatcctggctgttcctgcggagccaggagtacaagaaataccagacaaacaagacaaccggcaacaccgataagagagccttcgtcgagacctggcagtccttttaccggaagaagcttaaggaggtgtggaaacctgccgtgcggtctggcggatctggcggaggctccaccagccccaagaaaaagagaaaagtctaagctgccttctgcggggcttgccttctggccatgcccttcttctctcccttgcacctgtacctcttggtctttgaataaagcctgagtaggaaggctagcaaaaaaaaaaaaaaaaaaaaaaaaaaaaaaaaaaaaaaaaaaaaaaaaaaaaaaaaaaaaaaaaaaaaaaaaaaaaaaaa

SEQ ID NO: 13362 - RNA, 5785 nt, synthetic construct
  source 1..5785: mol_type = other RNA
aggaaataagagagaaaagaagagtaagaagaaatataagagccaccatggcccctaagaagaagcgtaaagtgagccggatggaacgcctcgtctacgaggtgcggcagaagtgcagaaacatcgaggacatctgcatctcctgcggatctctgaacgtgaccctggagcacccactgttcatcggcggcatgtgccagaactgtaaaaactgttttctggagtgtgcctatcaatacgacgatgacggctaccagagctactgcaccatctgttgcggcggaagagaggtgctgatgtgtggaaataacaactgctgccggtgcttctgcgtggaatgcgtggacctgctggtgggccccggcgccgcccaggccgctattaaggaagatccttggaactgctacatgtgcggccacaagggcacatacggcctgctgagacggagagaggactggcctagcagactgcagatgttcttcgccaataaccacgaccaggagttcgacccccctaaggtgtaccctcccgtccccgccgagaagagaaagcccatccgggtcctgagcctgttcgatggcatcgccaccggtctgctggtgctgaaggacctgggcatccaggtggataggtacattgcctccgaggtgtgcgaggactccatcaccgtgggaatggtgcgtcatcagggcaagatcatgtacgtgggcgacgtgcggagcgtgacacagaagcatatccaggagtggggccctttcgacctggtgatcggcggcagcccttgcaatgacctgagcatcgtgaacccagcccggaagggcctgtacgagggaaccggcagactgttcttcgagttttacagactgctgcacgacgcccggcctaaggaaggcgacgaccggcccttcttttggctgttcgagaatgtggtggccatgggagtcagcgacaagcgggatattagccggttcctggagagcaaccccgtgatgatcgatgccaaggaagtgagcgccgcccaccgggccagatacttctggggcaatctgcctggcatgaacagacccctggccagcaccgtgaacgacaagctggagctgcaggagtgcctggagcacggccggatcgccaagttcagcaaggtgagaaccatcaccacccgaagcaacagcatcaaacaaggcaaggaccagcactttcctgtgttcatgaacgagaaggaggacatcctgtggtgtaccgagatggagagagtgttcgggttcccagtccactacacagatgtcagcaacatgtctagactggccagacagagactgctgggaagaagctggtccgtccctgtgatcagacacctgttcgcccctctgaaggagtacttcgcctgcgtgagcagcggcaacagcaacgccaacagccggggccccagcttctctagcggcctggtgccactgtccctgagagggagccacatgggccccatggagatctacaaaaccgtgagcgcctggaagcggcagcctgtgcgcgtgctgagcctgtttcggaatatcgataaagtcctgaaaagcctgggattcctggagagcggctctggctccggcggtggcaccctgaagtacgtggaggatgtgacaaacgtggtcagacgggatgtggagaagtggggccccttcgatctggtgtacggcagcacccaacccctgggcagctcttgtgaccggtgccctggctggtacatgtttcagttccaccggatcctgcagtacgccctgccgagacaggagtcccagcggccattcttttggattttcatggacaacttgctgctgaccgaggatgaccaggaaactaccactcggttcctgcagaccgaagccgtgaccctgcaggacgtgagaggccgggactaccagaacgccatgcgggtgtggtccaacatccctggactgaaaagcaagcacgcacctctgacccctaaagaagaggagtacctgcaggcccaggtgcggagcagaagcaagctggacgcccctaaggtggatctgctggtgaagaattgcctcctgcccctgagagagtacttcaagtatttcagccagaatagtctgcccctgggaggcagcggcggcggctgctggggcctgctgagcttcaaggacatcagcatggagttcacctgggaggagtggcagctgctggacagcgcccagaagtacctgtacagggacgtgatcctggagaactacagccacctggtgagcctgggctaccacggcaccaagcccgacctgatcttcaagctggagcagggcgaggagccctggatgatcaacgccagggtgagcaggcagagctaccccgagggctggaaggagggcggcccaagcagcggcgcccctcctcccagcggcggcagcccagccggctccccaacctctaccgaggagggcacctctgagtccgccacccccgagagcggccctggcacctccaccgagcccagcgagggcagcgcacccggcagccctgccggcagccccacctccacagaggagggaaccagcaccgagcccagcgaaggcagcgccccaggcaccagcaccgagcctagtgagcaggagattaaacggatcaacaagatcagaagaagacttgtgaaagacagcaacaccaagaaggccggcaagacaggccccatgaaaaccctgctggttagagtgatgacacccgatctgagagagcggctggaaaacctgagaaagaagcctgaaaatatcccccagcccatcagcaatacatctagagccaacctgaataagctgctgaccgattacaccgaaatgaagaaggcgatcctgcatgtgtactgggaagagttccagaaggaccctgtgggcctgatgagccgggtggcccagcctgccagcaagaagatcgatcagaacaagctgaaacctgagatggacgagaagggcaacctgaccaccgccggctttgcctgctctcagtgtggccagcccctgttcgtgtacaagctggagcaggtgtctgagaagggcaaggcttacaccaactacttcggacggtgcaatgtggccgagcacgaaaagctgatcctgctggcccagctgaagcccgagaaggatagcgacgaagccgtgacatatagcctgggaaagtttgggcagagggccctggatttctacagcattcatgtgaccaaggagtccacccaccccgtgaagcccctggcccagatcgccggaaacagatacgcctccggacctgtgggaaaggccctgagcgacgcatgtatgggcacaatcgcctccttcctgtctaagtaccaggacatcatcatcgaacaccagaaggtggtgaagggcaaccagaagagactggagagcctgcgggagctggccggcaaggaaaacctggaataccctagcgtgaccctgccacctcagcctcacaccaaggagggcgttgatgcctacaacgaagtgatcgcccgggtgcgaatgtgggtgaacctgaacctgtggcagaagctgaagctaagcagagatgatgccaagcctctgctgagactgaagggattcccttcctttcctctggtcgagagacaggccaacgaagtggactggtgggacatggtgtgtaacgtgaagaagctgatcaacgagaaaaaggaggatggcaaggtgttttggcagaatctggctggctacaagagacaggaagccctgagaccatacctgagcagcgaggaagatcggaagaagggaaagaaattcgctcggtaccagctgggcgacctgctgctgcacctggaaaagaagcacggcgaggactggggaaaggtgtacgacgaggcctgggagcggattgacaagaaagtggaaggcctgagcaagcacatcaagctggaagaggaacggagaagcgaggacgcccagagcaaggccgccctgaccgactggctgcgggctaaggccagcttcgtgatcgagggcctgaaggaggccgacaaggacgagttctgcagatgcgagctgaagctgcagaagtggtacggggacctgcggggaaagcccttcgccatcgaagccgagaacagcatcctggacatcagcggcttcagcaagcagtacaactgtgccttcatctggcagaaggacggcgtgaagaagctgaacctgtacctgatcatcaactacttcaagggcggcaagctgcggttcaagaagatcaaacctgaagccttcgaagccaacagattctacaccgtgatcaacaaaaagagcggcgagatcgtgcccatggaggtgaacttcaacttcgacgaccccaacctgatcatcctgcctctggcctttggcaagagacagggcagagaattcatctggaacgacctgctgtccctggaaaccggcagcctgaagctggccaacggaagagtgatcgagaagacactgtacaacagaagaacccggcaggatgagcctgccctgttcgtggccctgaccttcgagcggcgggaggtcctggactcctccaatatcaaaccaatgaacctgatcggcgtggcaagaggcgaaaacatccccgccgtgatcgccctgaccgaccccgagggctgcccactgagccggtttaaggatagcctgggaaacccaacccacatcctgagaatcggcgagagctataaggagaagcagcggaccatccaggccaagaaggaggtggagcagcggagagccggcggctacagccggaagtacgccagcaaagccaagaatctggcagacgatatggtgagaaacaccgctagagatctgctgtactacgccgtgacccaggatgccatgctgatcttcgccaacctgagccggggcttcggccggcagggcaagcggaccttcatggccgagagacagtacacacggatggaggactggctgaccgccaagctggcctacgagggcctgagcaagacctacctgtccaagacactggcccagtacacctccaagacatgcagcaactgtgggtttaccatcaccagcgccgactacgacagggtgctggagaagctgaagaagacagcaacaggctggatgaccacaattaacggcaaggagctgaaggtggagggccagattacctactacaacagatacaagagacagaacgtagtcaaggacctgtccgtcgagctggatagactgagcgaagaatctgtgaacaacgacatctcctcctggacaaagggcagaagcggagaagctctgagcctcctgaagaaaagattctcccatagacccgtgcaggagaagttcgtgtgcctgaactgcggcttcgagacacacgcagccgagcaagccgccctgaacatcgccagatcctggctgttcctgcggagccaggagtacaagaaataccagacaaacaagacaaccggcaacaccgataagagagccttcgtcgagacctggcagtccttttaccggaagaagcttaaggaggtgtggaaacctgccgtgcggtctggcggatctggcggaggctccaccagccccaagaaaaagagaaaagtctaagctgccttctgcggggcttgccttctggccatgcccttcttctctcccttgcacctgtacctcttggtctttgaataaagcctgagtaggaaggctagcaaaaaaaaaaaaaaaaaaaaaaaaaaaaaaaaaaaaaaaaaaaaaaaaaaaaaaaaaaaaaaaaaaaaaaaaaaaaaaaa

SEQ ID NO: 13363 - RNA, 5785 nt, synthetic construct
  source 1..5785: mol_type = other RNA
aggaaataagagagaaaagaagagtaagaagaaatataagagccaccatggcccctaagaagaagcgtaaagtgagccggatggaacgcctcgtctacgaggtgcggcagaagtgcagaaacatcgaggacatctgcatctcctgcggatctctgaacgtgaccctggagcacccactgttcatcggcggcatgtgccagaactgtaaaaactgttttctggagtgtgcctatcaatacgacgatgacggctaccagagctactgcaccatctgttgcggcggaagagaggtgctgatgtgtggaaataacaactgctgccggtgcttctgcgtggaatgcgtggacctgctggtgggccccggcgccgcccaggccgctattaaggaagatccttggaactgctacatgtgcggccacaagggcacatacggcctgctgagacggagagaggactggcctagcagactgcagatgttcttcgccaataaccacgaccaggagttcgacccccctaaggtgtaccctcccgtccccgccgagaagagaaagcccatccgggtcctgagcctgttcgatggcatcgccaccggtctgctggtgctgaaggacctgggcatccaggtggataggtacattgcctccgaggtgtgcgaggactccatcaccgtgggaatggtgcgtcatcagggcaagatcatgtacgtgggcgacgtgcggagcgtgacacagaagcatatccaggagtggggccctttcgacctggtgatcggcggcagcccttgcaatgacctgagcatcgtgaacccagcccggaagggcctgtacgagggaaccggcagactgttcttcgagttttacagactgctgcacgacgcccggcctaaggaaggcgacgaccggcccttcttttggctgttcgagaatgtggtggccatgggagtcagcgacaagcgggatattagccggttcctggagagcaaccccgtgatgatcgatgccaaggaagtgagcgccgcccaccgggccagatacttctggggcaatctgcctggcatgaacagacccctggccagcaccgtgaacgacaagctggagctgcaggagtgcctggagcacggccggatcgccaagttcagcaaggtgagaaccatcaccacccgaagcaacagcatcaaacaaggcaaggaccagcactttcctgtgttcatgaacgagaaggaggacatcctgtggtgtaccgagatggagagagtgttcgggttcccagtccactacacagatgtcagcaacatgtctagactggccagacagagactgctgggaagaagctggtccgtccctgtgatcagacacctgttcgcccctctgaaggagtacttcgcctgcgtgagcagcggcaacagcaacgccaacagccggggccccagcttctctagcggcctggtgccactgtccctgagagggagccacatgggccccatggagatctacaaaaccgtgagcgcctggaagcggcagcctgtgcgcgtgctgagcctgtttcggaatatcgataaagtcctgaaaagcctgggattcctggagagcggctctggctccggcggtggcaccctgaagtacgtggaggatgtgacaaacgtggtcagacgggatgtggagaagtggggccccttcgatctggtgtacggcagcacccaacccctgggcagctcttgtgaccggtgccctggctggtacatgtttcagttccaccggatcctgcagtacgccctgccgagacaggagtcccagcggccattcttttggattttcatggacaacttgctgctgaccgaggatgaccaggaaactaccactcggttcctgcagaccgaagccgtgaccctgcaggacgtgagaggccgggactaccagaacgccatgcgggtgtggtccaacatccctggactgaaaagcaagcacgcacctctgacccctaaagaagaggagtacctgcaggcccaggtgcggagcagaagcaagctggacgcccctaaggtggatctgctggtgaagaattgcctcctgcccctgagagagtacttcaagtatttcagccagaatagtctgcccctgggaggcagcggcggcggcagccacgagagcgtgaccttcaaggacgtggccgtggacttcacctgggaggagtggggctacctggacaccagccagaaggagctgtactgggaggtgatgctggagaactacaggaacctggtgagcctgggcctggccgacagcaacgtggacatgatcagccagctggagagcggcgaggcccacggcatccccgtggacagcgtgctgaggagctgctggcccgacggcgacaccaggggcggcccaagcagcggcgcccctcctcccagcggcggcagcccagccggctccccaacctctaccgaggagggcacctctgagtccgccacccccgagagcggccctggcacctccaccgagcccagcgagggcagcgcacccggcagccctgccggcagccccacctccacagaggagggaaccagcaccgagcccagcgaaggcagcgccccaggcaccagcaccgagcctagtgagcaggagattaaacggatcaacaagatcagaagaagacttgtgaaagacagcaacaccaagaaggccggcaagacaggccccatgaaaaccctgctggttagagtgatgacacccgatctgagagagcggctggaaaacctgagaaagaagcctgaaaatatcccccagcccatcagcaatacatctagagccaacctgaataagctgctgaccgattacaccgaaatgaagaaggcgatcctgcatgtgtactgggaagagttccagaaggaccctgtgggcctgatgagccgggtggcccagcctgccagcaagaagatcgatcagaacaagctgaaacctgagatggacgagaagggcaacctgaccaccgccggctttgcctgctctcagtgtggccagcccctgttcgtgtacaagctggagcaggtgtctgagaagggcaaggcttacaccaactacttcggacggtgcaatgtggccgagcacgaaaagctgatcctgctggcccagctgaagcccgagaaggatagcgacgaagccgtgacatatagcctgggaaagtttgggcagagggccctggatttctacagcattcatgtgaccaaggagtccacccaccccgtgaagcccctggcccagatcgccggaaacagatacgcctccggacctgtgggaaaggccctgagcgacgcatgtatgggcacaatcgcctccttcctgtctaagtaccaggacatcatcatcgaacaccagaaggtggtgaagggcaaccagaagagactggagagcctgcgggagctggccggcaaggaaaacctggaataccctagcgtgaccctgccacctcagcctcacaccaaggagggcgttgatgcctacaacgaagtgatcgcccgggtgcgaatgtgggtgaacctgaacctgtggcagaagctgaagctaagcagagatgatgccaagcctctgctgagactgaagggattcccttcctttcctctggtcgagagacaggccaacgaagtggactggtgggacatggtgtgtaacgtgaagaagctgatcaacgagaaaaaggaggatggcaaggtgttttggcagaatctggctggctacaagagacaggaagccctgagaccatacctgagcagcgaggaagatcggaagaagggaaagaaattcgctcggtaccagctgggcgacctgctgctgcacctggaaaagaagcacggcgaggactggggaaaggtgtacgacgaggcctgggagcggattgacaagaaagtggaaggcctgagcaagcacatcaagctggaagaggaacggagaagcgaggacgcccagagcaaggccgccctgaccgactggctgcgggctaaggccagcttcgtgatcgagggcctgaaggaggccgacaaggacgagttctgcagatgcgagctgaagctgcagaagtggtacggggacctgcggggaaagcccttcgccatcgaagccgagaacagcatcctggacatcagcggcttcagcaagcagtacaactgtgccttcatctggcagaaggacggcgtgaagaagctgaacctgtacctgatcatcaactacttcaagggcggcaagctgcggttcaagaagatcaaacctgaagccttcgaagccaacagattctacaccgtgatcaacaaaaagagcggcgagatcgtgcccatggaggtgaacttcaacttcgacgaccccaacctgatcatcctgcctctggcctttggcaagagacagggcagagaattcatctggaacgacctgctgtccctggaaaccggcagcctgaagctggccaacggaagagtgatcgagaagacactgtacaacagaagaacccggcaggatgagcctgccctgttcgtggccctgaccttcgagcggcgggaggtcctggactcctccaatatcaaaccaatgaacctgatcggcgtggcaagaggcgaaaacatccccgccgtgatcgccctgaccgaccccgagggctgcccactgagccggtttaaggatagcctgggaaacccaacccacatcctgagaatcggcgagagctataaggagaagcagcggaccatccaggccaagaaggaggtggagcagcggagagccggcggctacagccggaagtacgccagcaaagccaagaatctggcagacgatatggtgagaaacaccgctagagatctgctgtactacgccgtgacccaggatgccatgctgatcttcgccaacctgagccggggcttcggccggcagggcaagcggaccttcatggccgagagacagtacacacggatggaggactggctgaccgccaagctggcctacgagggcctgagcaagacctacctgtccaagacactggcccagtacacctccaagacatgcagcaactgtgggtttaccatcaccagcgccgactacgacagggtgctggagaagctgaagaagacagcaacaggctggatgaccacaattaacggcaaggagctgaaggtggagggccagattacctactacaacagatacaagagacagaacgtagtcaaggacctgtccgtcgagctggatagactgagcgaagaatctgtgaacaacgacatctcctcctggacaaagggcagaagcggagaagctctgagcctcctgaagaaaagattctcccatagacccgtgcaggagaagttcgtgtgcctgaactgcggcttcgagacacacgcagccgagcaagccgccctgaacatcgccagatcctggctgttcctgcggagccaggagtacaagaaataccagacaaacaagacaaccggcaacaccgataagagagccttcgtcgagacctggcagtccttttaccggaagaagcttaaggaggtgtggaaacctgccgtgcggtctggcggatctggcggaggctccaccagccccaagaaaaagagaaaagtctaagctgccttctgcggggcttgccttctggccatgcccttcttctctcccttgcacctgtacctcttggtctttgaataaagcctgagtaggaaggctagcaaaaaaaaaaaaaaaaaaaaaaaaaaaaaaaaaaaaaaaaaaaaaaaaaaaaaaaaaaaaaaaaaaaaaaaaaaaaaaaa

SEQ ID NO: 13364 - RNA, 5785 nt, synthetic construct
  source 1..5785: mol_type = other RNA
aggaaataagagagaaaagaagagtaagaagaaatataagagccaccatggcccctaagaagaagcgtaaagtgagccggatggaacgcctcgtctacgaggtgcggcagaagtgcagaaacatcgaggacatctgcatctcctgcggatctctgaacgtgaccctggagcacccactgttcatcggcggcatgtgccagaactgtaaaaactgttttctggagtgtgcctatcaatacgacgatgacggctaccagagctactgcaccatctgttgcggcggaagagaggtgctgatgtgtggaaataacaactgctgccggtgcttctgcgtggaatgcgtggacctgctggtgggccccggcgccgcccaggccgctattaaggaagatccttggaactgctacatgtgcggccacaagggcacatacggcctgctgagacggagagaggactggcctagcagactgcagatgttcttcgccaataaccacgaccaggagttcgacccccctaaggtgtaccctcccgtccccgccgagaagagaaagcccatccgggtcctgagcctgttcgatggcatcgccaccggtctgctggtgctgaaggacctgggcatccaggtggataggtacattgcctccgaggtgtgcgaggactccatcaccgtgggaatggtgcgtcatcagggcaagatcatgtacgtgggcgacgtgcggagcgtgacacagaagcatatccaggagtggggccctttcgacctggtgatcggcggcagcccttgcaatgacctgagcatcgtgaacccagcccggaagggcctgtacgagggaaccggcagactgttcttcgagttttacagactgctgcacgacgcccggcctaaggaaggcgacgaccggcccttcttttggctgttcgagaatgtggtggccatgggagtcagcgacaagcgggatattagccggttcctggagagcaaccccgtgatgatcgatgccaaggaagtgagcgccgcccaccgggccagatacttctggggcaatctgcctggcatgaacagacccctggccagcaccgtgaacgacaagctggagctgcaggagtgcctggagcacggccggatcgccaagttcagcaaggtgagaaccatcaccacccgaagcaacagcatcaaacaaggcaaggaccagcactttcctgtgttcatgaacgagaaggaggacatcctgtggtgtaccgagatggagagagtgttcgggttcccagtccactacacagatgtcagcaacatgtctagactggccagacagagactgctgggaagaagctggtccgtccctgtgatcagacacctgttcgcccctctgaaggagtacttcgcctgcgtgagcagcggcaacagcaacgccaacagccggggccccagcttctctagcggcctggtgccactgtccctgagagggagccacatgggccccatggagatctacaaaaccgtgagcgcctggaagcggcagcctgtgcgcgtgctgagcctgtttcggaatatcgataaagtcctgaaaagcctgggattcctggagagcggctctggctccggcggtggcaccctgaagtacgtggaggatgtgacaaacgtggtcagacgggatgtggagaagtggggccccttcgatctggtgtacggcagcacccaacccctgggcagctcttgtgaccggtgccctggctggtacatgtttcagttccaccggatcctgcagtacgccctgccgagacaggagtcccagcggccattcttttggattttcatggacaacttgctgctgaccgaggatgaccaggaaactaccactcggttcctgcagaccgaagccgtgaccctgcaggacgtgagaggccgggactaccagaacgccatgcgggtgtggtccaacatccctggactgaaaagcaagcacgcacctctgacccctaaagaagaggagtacctgcaggcccaggtgcggagcagaagcaagctggacgcccctaaggtggatctgctggtgaagaattgcctcctgcccctgagagagtacttcaagtatttcagccagaatagtctgcccctgggaggcagcggcggcggcaggctggagagcgtgaccttcgaggacgtggccgtgtacttcacccagaaccagtgggccagcctgaaccccgcccagagggccctgtacggcgaggtgatgctggagaactacgccaacgtggccagcctggtggccttccccttccccaagcccgccctgatcagccacctggagaggggcgaggccccctggggccccgacccctgggacaccaagatccccaggggcatcggccagggcggcggcccaagcagcggcgcccctcctcccagcggcggcagcccagccggctccccaacctctaccgaggagggcacctctgagtccgccacccccgagagcggccctggcacctccaccgagcccagcgagggcagcgcacccggcagccctgccggcagccccacctccacagaggagggaaccagcaccgagcccagcgaaggcagcgccccaggcaccagcaccgagcctagtgagcaggagattaaacggatcaacaagatcagaagaagacttgtgaaagacagcaacaccaagaaggccggcaagacaggccccatgaaaaccctgctggttagagtgatgacacccgatctgagagagcggctggaaaacctgagaaagaagcctgaaaatatcccccagcccatcagcaatacatctagagccaacctgaataagctgctgaccgattacaccgaaatgaagaaggcgatcctgcatgtgtactgggaagagttccagaaggaccctgtgggcctgatgagccgggtggcccagcctgccagcaagaagatcgatcagaacaagctgaaacctgagatggacgagaagggcaacctgaccaccgccggctttgcctgctctcagtgtggccagcccctgttcgtgtacaagctggagcaggtgtctgagaagggcaaggcttacaccaactacttcggacggtgcaatgtggccgagcacgaaaagctgatcctgctggcccagctgaagcccgagaaggatagcgacgaagccgtgacatatagcctgggaaagtttgggcagagggccctggatttctacagcattcatgtgaccaaggagtccacccaccccgtgaagcccctggcccagatcgccggaaacagatacgcctccggacctgtgggaaaggccctgagcgacgcatgtatgggcacaatcgcctccttcctgtctaagtaccaggacatcatcatcgaacaccagaaggtggtgaagggcaaccagaagagactggagagcctgcgggagctggccggcaaggaaaacctggaataccctagcgtgaccctgccacctcagcctcacaccaaggagggcgttgatgcctacaacgaagtgatcgcccgggtgcgaatgtgggtgaacctgaacctgtggcagaagctgaagctaagcagagatgatgccaagcctctgctgagactgaagggattcccttcctttcctctggtcgagagacaggccaacgaagtggactggtgggacatggtgtgtaacgtgaagaagctgatcaacgagaaaaaggaggatggcaaggtgttttggcagaatctggctggctacaagagacaggaagccctgagaccatacctgagcagcgaggaagatcggaagaagggaaagaaattcgctcggtaccagctgggcgacctgctgctgcacctggaaaagaagcacggcgaggactggggaaaggtgtacgacgaggcctgggagcggattgacaagaaagtggaaggcctgagcaagcacatcaagctggaagaggaacggagaagcgaggacgcccagagcaaggccgccctgaccgactggctgcgggctaaggccagcttcgtgatcgagggcctgaaggaggccgacaaggacgagttctgcagatgcgagctgaagctgcagaagtggtacggggacctgcggggaaagcccttcgccatcgaagccgagaacagcatcctggacatcagcggcttcagcaagcagtacaactgtgccttcatctggcagaaggacggcgtgaagaagctgaacctgtacctgatcatcaactacttcaagggcggcaagctgcggttcaagaagatcaaacctgaagccttcgaagccaacagattctacaccgtgatcaacaaaaagagcggcgagatcgtgcccatggaggtgaacttcaacttcgacgaccccaacctgatcatcctgcctctggcctttggcaagagacagggcagagaattcatctggaacgacctgctgtccctggaaaccggcagcctgaagctggccaacggaagagtgatcgagaagacactgtacaacagaagaacccggcaggatgagcctgccctgttcgtggccctgaccttcgagcggcgggaggtcctggactcctccaatatcaaaccaatgaacctgatcggcgtggcaagaggcgaaaacatccccgccgtgatcgccctgaccgaccccgagggctgcccactgagccggtttaaggatagcctgggaaacccaacccacatcctgagaatcggcgagagctataaggagaagcagcggaccatccaggccaagaaggaggtggagcagcggagagccggcggctacagccggaagtacgccagcaaagccaagaatctggcagacgatatggtgagaaacaccgctagagatctgctgtactacgccgtgacccaggatgccatgctgatcttcgccaacctgagccggggcttcggccggcagggcaagcggaccttcatggccgagagacagtacacacggatggaggactggctgaccgccaagctggcctacgagggcctgagcaagacctacctgtccaagacactggcccagtacacctccaagacatgcagcaactgtgggtttaccatcaccagcgccgactacgacagggtgctggagaagctgaagaagacagcaacaggctggatgaccacaattaacggcaaggagctgaaggtggagggccagattacctactacaacagatacaagagacagaacgtagtcaaggacctgtccgtcgagctggatagactgagcgaagaatctgtgaacaacgacatctcctcctggacaaagggcagaagcggagaagctctgagcctcctgaagaaaagattctcccatagacccgtgcaggagaagttcgtgtgcctgaactgcggcttcgagacacacgcagccgagcaagccgccctgaacatcgccagatcctggctgttcctgcggagccaggagtacaagaaataccagacaaacaagacaaccggcaacaccgataagagagccttcgtcgagacctggcagtccttttaccggaagaagcttaaggaggtgtggaaacctgccgtgcggtctggcggatctggcggaggctccaccagccccaagaaaaagagaaaagtctaagctgccttctgcggggcttgccttctggccatgcccttcttctctcccttgcacctgtacctcttggtctttgaataaagcctgagtaggaaggctagcaaaaaaaaaaaaaaaaaaaaaaaaaaaaaaaaaaaaaaaaaaaaaaaaaaaaaaaaaaaaaaaaaaaaaaaaaaaaaaaa

SEQ ID NO: 13365 - RNA, 5785 nt, synthetic construct
  source 1..5785: mol_type = other RNA
aggaaataagagagaaaagaagagtaagaagaaatataagagccaccatggcccctaagaagaagcgtaaagtgagccggatggaacgcctcgtctacgaggtgcggcagaagtgcagaaacatcgaggacatctgcatctcctgcggatctctgaacgtgaccctggagcacccactgttcatcggcggcatgtgccagaactgtaaaaactgttttctggagtgtgcctatcaatacgacgatgacggctaccagagctactgcaccatctgttgcggcggaagagaggtgctgatgtgtggaaataacaactgctgccggtgcttctgcgtggaatgcgtggacctgctggtgggccccggcgccgcccaggccgctattaaggaagatccttggaactgctacatgtgcggccacaagggcacatacggcctgctgagacggagagaggactggcctagcagactgcagatgttcttcgccaataaccacgaccaggagttcgacccccctaaggtgtaccctcccgtccccgccgagaagagaaagcccatccgggtcctgagcctgttcgatggcatcgccaccggtctgctggtgctgaaggacctgggcatccaggtggataggtacattgcctccgaggtgtgcgaggactccatcaccgtgggaatggtgcgtcatcagggcaagatcatgtacgtgggcgacgtgcggagcgtgacacagaagcatatccaggagtggggccctttcgacctggtgatcggcggcagcccttgcaatgacctgagcatcgtgaacccagcccggaagggcctgtacgagggaaccggcagactgttcttcgagttttacagactgctgcacgacgcccggcctaaggaaggcgacgaccggcccttcttttggctgttcgagaatgtggtggccatgggagtcagcgacaagcgggatattagccggttcctggagagcaaccccgtgatgatcgatgccaaggaagtgagcgccgcccaccgggccagatacttctggggcaatctgcctggcatgaacagacccctggccagcaccgtgaacgacaagctggagctgcaggagtgcctggagcacggccggatcgccaagttcagcaaggtgagaaccatcaccacccgaagcaacagcatcaaacaaggcaaggaccagcactttcctgtgttcatgaacgagaaggaggacatcctgtggtgtaccgagatggagagagtgttcgggttcccagtccactacacagatgtcagcaacatgtctagactggccagacagagactgctgggaagaagctggtccgtccctgtgatcagacacctgttcgcccctctgaaggagtacttcgcctgcgtgagcagcggcaacagcaacgccaacagccggggccccagcttctctagcggcctggtgccactgtccctgagagggagccacatgggccccatggagatctacaaaaccgtgagcgcctggaagcggcagcctgtgcgcgtgctgagcctgtttcggaatatcgataaagtcctgaaaagcctgggattcctggagagcggctctggctccggcggtggcaccctgaagtacgtggaggatgtgacaaacgtggtcagacgggatgtggagaagtggggccccttcgatctggtgtacggcagcacccaacccctgggcagctcttgtgaccggtgccctggctggtacatgtttcagttccaccggatcctgcagtacgccctgccgagacaggagtcccagcggccattcttttggattttcatggacaacttgctgctgaccgaggatgaccaggaaactaccactcggttcctgcagaccgaagccgtgaccctgcaggacgtgagaggccgggactaccagaacgccatgcgggtgtggtccaacatccctggactgaaaagcaagcacgcacctctgacccctaaagaagaggagtacctgcaggcccaggtgcggagcagaagcaagctggacgcccctaaggtggatctgctggtgaagaattgcctcctgcccctgagagagtacttcaagtatttcagccagaatagtctgcccctgggaggcagcggcggcggcttccaggccagcgtgagcttcaaggacgtgaccgtggagctgacccaggaggagtggcagcagatgggccccctgcagaggaccctgtacagggacgtgatgctggagaactacaacaacctggtgagcgtgggcagctgcatctacaagcccgagctgatcttcaagctggagcagggcgaggagccctggctgctggaggaggagttcagcaaccagagctaccaggtgctggagcactacggcggcccaagcagcggcgcccctcctcccagcggcggcagcccagccggctccccaacctctaccgaggagggcacctctgagtccgccacccccgagagcggccctggcacctccaccgagcccagcgagggcagcgcacccggcagccctgccggcagccccacctccacagaggagggaaccagcaccgagcccagcgaaggcagcgccccaggcaccagcaccgagcctagtgagcaggagattaaacggatcaacaagatcagaagaagacttgtgaaagacagcaacaccaagaaggccggcaagacaggccccatgaaaaccctgctggttagagtgatgacacccgatctgagagagcggctggaaaacctgagaaagaagcctgaaaatatcccccagcccatcagcaatacatctagagccaacctgaataagctgctgaccgattacaccgaaatgaagaaggcgatcctgcatgtgtactgggaagagttccagaaggaccctgtgggcctgatgagccgggtggcccagcctgccagcaagaagatcgatcagaacaagctgaaacctgagatggacgagaagggcaacctgaccaccgccggctttgcctgctctcagtgtggccagcccctgttcgtgtacaagctggagcaggtgtctgagaagggcaaggcttacaccaactacttcggacggtgcaatgtggccgagcacgaaaagctgatcctgctggcccagctgaagcccgagaaggatagcgacgaagccgtgacatatagcctgggaaagtttgggcagagggccctggatttctacagcattcatgtgaccaaggagtccacccaccccgtgaagcccctggcccagatcgccggaaacagatacgcctccggacctgtgggaaaggccctgagcgacgcatgtatgggcacaatcgcctccttcctgtctaagtaccaggacatcatcatcgaacaccagaaggtggtgaagggcaaccagaagagactggagagcctgcgggagctggccggcaaggaaaacctggaataccctagcgtgaccctgccacctcagcctcacaccaaggagggcgttgatgcctacaacgaagtgatcgcccgggtgcgaatgtgggtgaacctgaacctgtggcagaagctgaagctaagcagagatgatgccaagcctctgctgagactgaagggattcccttcctttcctctggtcgagagacaggccaacgaagtggactggtgggacatggtgtgtaacgtgaagaagctgatcaacgagaaaaaggaggatggcaaggtgttttggcagaatctggctggctacaagagacaggaagccctgagaccatacctgagcagcgaggaagatcggaagaagggaaagaaattcgctcggtaccagctgggcgacctgctgctgcacctggaaaagaagcacggcgaggactggggaaaggtgtacgacgaggcctgggagcggattgacaagaaagtggaaggcctgagcaagcacatcaagctggaagaggaacggagaagcgaggacgcccagagcaaggccgccctgaccgactggctgcgggctaaggccagcttcgtgatcgagggcctgaaggaggccgacaaggacgagttctgcagatgcgagctgaagctgcagaagtggtacggggacctgcggggaaagcccttcgccatcgaagccgagaacagcatcctggacatcagcggcttcagcaagcagtacaactgtgccttcatctggcagaaggacggcgtgaagaagctgaacctgtacctgatcatcaactacttcaagggcggcaagctgcggttcaagaagatcaaacctgaagccttcgaagccaacagattctacaccgtgatcaacaaaaagagcggcgagatcgtgcccatggaggtgaacttcaacttcgacgaccccaacctgatcatcctgcctctggcctttggcaagagacagggcagagaattcatctggaacgacctgctgtccctggaaaccggcagcctgaagctggccaacggaagagtgatcgagaagacactgtacaacagaagaacccggcaggatgagcctgccctgttcgtggccctgaccttcgagcggcgggaggtcctggactcctccaatatcaaaccaatgaacctgatcggcgtggcaagaggcgaaaacatccccgccgtgatcgccctgaccgaccccgagggctgcccactgagccggtttaaggatagcctgggaaacccaacccacatcctgagaatcggcgagagctataaggagaagcagcggaccatccaggccaagaaggaggtggagcagcggagagccggcggctacagccggaagtacgccagcaaagccaagaatctggcagacgatatggtgagaaacaccgctagagatctgctgtactacgccgtgacccaggatgccatgctgatcttcgccaacctgagccggggcttcggccggcagggcaagcggaccttcatggccgagagacagtacacacggatggaggactggctgaccgccaagctggcctacgagggcctgagcaagacctacctgtccaagacactggcccagtacacctccaagacatgcagcaactgtgggtttaccatcaccagcgccgactacgacagggtgctggagaagctgaagaagacagcaacaggctggatgaccacaattaacggcaaggagctgaaggtggagggccagattacctactacaacagatacaagagacagaacgtagtcaaggacctgtccgtcgagctggatagactgagcgaagaatctgtgaacaacgacatctcctcctggacaaagggcagaagcggagaagctctgagcctcctgaagaaaagattctcccatagacccgtgcaggagaagttcgtgtgcctgaactgcggcttcgagacacacgcagccgagcaagccgccctgaacatcgccagatcctggctgttcctgcggagccaggagtacaagaaataccagacaaacaagacaaccggcaacaccgataagagagccttcgtcgagacctggcagtccttttaccggaagaagcttaaggaggtgtggaaacctgccgtgcggtctggcggatctggcggaggctccaccagccccaagaaaaagagaaaagtctaagctgccttctgcggggcttgccttctggccatgcccttcttctctcccttgcacctgtacctcttggtctttgaataaagcctgagtaggaaggctagcaaaaaaaaaaaaaaaaaaaaaaaaaaaaaaaaaaaaaaaaaaaaaaaaaaaaaaaaaaaaaaaaaaaaaaaaaaaaaaaa

SEQ ID NO: 13366 - RNA, 5785 nt, synthetic construct
  source 1..5785: mol_type = other RNA
aggaaataagagagaaaagaagagtaagaagaaatataagagccaccatggcccctaagaagaagcgtaaagtgagccggatggaacgcctcgtctacgaggtgcggcagaagtgcagaaacatcgaggacatctgcatctcctgcggatctctgaacgtgaccctggagcacccactgttcatcggcggcatgtgccagaactgtaaaaactgttttctggagtgtgcctatcaatacgacgatgacggctaccagagctactgcaccatctgttgcggcggaagagaggtgctgatgtgtggaaataacaactgctgccggtgcttctgcgtggaatgcgtggacctgctggtgggccccggcgccgcccaggccgctattaaggaagatccttggaactgctacatgtgcggccacaagggcacatacggcctgctgagacggagagaggactggcctagcagactgcagatgttcttcgccaataaccacgaccaggagttcgacccccctaaggtgtaccctcccgtccccgccgagaagagaaagcccatccgggtcctgagcctgttcgatggcatcgccaccggtctgctggtgctgaaggacctgggcatccaggtggataggtacattgcctccgaggtgtgcgaggactccatcaccgtgggaatggtgcgtcatcagggcaagatcatgtacgtgggcgacgtgcggagcgtgacacagaagcatatccaggagtggggccctttcgacctggtgatcggcggcagcccttgcaatgacctgagcatcgtgaacccagcccggaagggcctgtacgagggaaccggcagactgttcttcgagttttacagactgctgcacgacgcccggcctaaggaaggcgacgaccggcccttcttttggctgttcgagaatgtggtggccatgggagtcagcgacaagcgggatattagccggttcctggagagcaaccccgtgatgatcgatgccaaggaagtgagcgccgcccaccgggccagatacttctggggcaatctgcctggcatgaacagacccctggccagcaccgtgaacgacaagctggagctgcaggagtgcctggagcacggccggatcgccaagttcagcaaggtgagaaccatcaccacccgaagcaacagcatcaaacaaggcaaggaccagcactttcctgtgttcatgaacgagaaggaggacatcctgtggtgtaccgagatggagagagtgttcgggttcccagtccactacacagatgtcagcaacatgtctagactggccagacagagactgctgggaagaagctggtccgtccctgtgatcagacacctgttcgcccctctgaaggagtacttcgcctgcgtgagcagcggcaacagcaacgccaacagccggggccccagcttctctagcggcctggtgccactgtccctgagagggagccacatgggccccatggagatctacaaaaccgtgagcgcctggaagcggcagcctgtgcgcgtgctgagcctgtttcggaatatcgataaagtcctgaaaagcctgggattcctggagagcggctctggctccggcggtggcaccctgaagtacgtggaggatgtgacaaacgtggtcagacgggatgtggagaagtggggccccttcgatctggtgtacggcagcacccaacccctgggcagctcttgtgaccggtgccctggctggtacatgtttcagttccaccggatcctgcagtacgccctgccgagacaggagtcccagcggccattcttttggattttcatggacaacttgctgctgaccgaggatgaccaggaaactaccactcggttcctgcagaccgaagccgtgaccctgcaggacgtgagaggccgggactaccagaacgccatgcgggtgtggtccaacatccctggactgaaaagcaagcacgcacctctgacccctaaagaagaggagtacctgcaggcccaggtgcggagcagaagcaagctggacgcccctaaggtggatctgctggtgaagaattgcctcctgcccctgagagagtacttcaagtatttcagccagaatagtctgcccctgggaggcagcggcggcggcatgaacgccgtgacctacagggacgtgcacgtgaacttcacccaggaggagtgggccctgctggaccccagccagaagaagctgtacaaggacgtgatgctggagacctacaggaacctgaacgccatcggcttcaactgggaggcccagaacatcgaggagcactgccagagcagcaggaggcacaggaggtgcgagaggagccagagcgccgagaagcccagcgagtacacccagagggacggcggcccaagcagcggcgcccctcctcccagcggcggcagcccagccggctccccaacctctaccgaggagggcacctctgagtccgccacccccgagagcggccctggcacctccaccgagcccagcgagggcagcgcacccggcagccctgccggcagccccacctccacagaggagggaaccagcaccgagcccagcgaaggcagcgccccaggcaccagcaccgagcctagtgagcaggagattaaacggatcaacaagatcagaagaagacttgtgaaagacagcaacaccaagaaggccggcaagacaggccccatgaaaaccctgctggttagagtgatgacacccgatctgagagagcggctggaaaacctgagaaagaagcctgaaaatatcccccagcccatcagcaatacatctagagccaacctgaataagctgctgaccgattacaccgaaatgaagaaggcgatcctgcatgtgtactgggaagagttccagaaggaccctgtgggcctgatgagccgggtggcccagcctgccagcaagaagatcgatcagaacaagctgaaacctgagatggacgagaagggcaacctgaccaccgccggctttgcctgctctcagtgtggccagcccctgttcgtgtacaagctggagcaggtgtctgagaagggcaaggcttacaccaactacttcggacggtgcaatgtggccgagcacgaaaagctgatcctgctggcccagctgaagcccgagaaggatagcgacgaagccgtgacatatagcctgggaaagtttgggcagagggccctggatttctacagcattcatgtgaccaaggagtccacccaccccgtgaagcccctggcccagatcgccggaaacagatacgcctccggacctgtgggaaaggccctgagcgacgcatgtatgggcacaatcgcctccttcctgtctaagtaccaggacatcatcatcgaacaccagaaggtggtgaagggcaaccagaagagactggagagcctgcgggagctggccggcaaggaaaacctggaataccctagcgtgaccctgccacctcagcctcacaccaaggagggcgttgatgcctacaacgaagtgatcgcccgggtgcgaatgtgggtgaacctgaacctgtggcagaagctgaagctaagcagagatgatgccaagcctctgctgagactgaagggattcccttcctttcctctggtcgagagacaggccaacgaagtggactggtgggacatggtgtgtaacgtgaagaagctgatcaacgagaaaaaggaggatggcaaggtgttttggcagaatctggctggctacaagagacaggaagccctgagaccatacctgagcagcgaggaagatcggaagaagggaaagaaattcgctcggtaccagctgggcgacctgctgctgcacctggaaaagaagcacggcgaggactggggaaaggtgtacgacgaggcctgggagcggattgacaagaaagtggaaggcctgagcaagcacatcaagctggaagaggaacggagaagcgaggacgcccagagcaaggccgccctgaccgactggctgcgggctaaggccagcttcgtgatcgagggcctgaaggaggccgacaaggacgagttctgcagatgcgagctgaagctgcagaagtggtacggggacctgcggggaaagcccttcgccatcgaagccgagaacagcatcctggacatcagcggcttcagcaagcagtacaactgtgccttcatctggcagaaggacggcgtgaagaagctgaacctgtacctgatcatcaactacttcaagggcggcaagctgcggttcaagaagatcaaacctgaagccttcgaagccaacagattctacaccgtgatcaacaaaaagagcggcgagatcgtgcccatggaggtgaacttcaacttcgacgaccccaacctgatcatcctgcctctggcctttggcaagagacagggcagagaattcatctggaacgacctgctgtccctggaaaccggcagcctgaagctggccaacggaagagtgatcgagaagacactgtacaacagaagaacccggcaggatgagcctgccctgttcgtggccctgaccttcgagcggcgggaggtcctggactcctccaatatcaaaccaatgaacctgatcggcgtggcaagaggcgaaaacatccccgccgtgatcgccctgaccgaccccgagggctgcccactgagccggtttaaggatagcctgggaaacccaacccacatcctgagaatcggcgagagctataaggagaagcagcggaccatccaggccaagaaggaggtggagcagcggagagccggcggctacagccggaagtacgccagcaaagccaagaatctggcagacgatatggtgagaaacaccgctagagatctgctgtactacgccgtgacccaggatgccatgctgatcttcgccaacctgagccggggcttcggccggcagggcaagcggaccttcatggccgagagacagtacacacggatggaggactggctgaccgccaagctggcctacgagggcctgagcaagacctacctgtccaagacactggcccagtacacctccaagacatgcagcaactgtgggtttaccatcaccagcgccgactacgacagggtgctggagaagctgaagaagacagcaacaggctggatgaccacaattaacggcaaggagctgaaggtggagggccagattacctactacaacagatacaagagacagaacgtagtcaaggacctgtccgtcgagctggatagactgagcgaagaatctgtgaacaacgacatctcctcctggacaaagggcagaagcggagaagctctgagcctcctgaagaaaagattctcccatagacccgtgcaggagaagttcgtgtgcctgaactgcggcttcgagacacacgcagccgagcaagccgccctgaacatcgccagatcctggctgttcctgcggagccaggagtacaagaaataccagacaaacaagacaaccggcaacaccgataagagagccttcgtcgagacctggcagtccttttaccggaagaagcttaaggaggtgtggaaacctgccgtgcggtctggcggatctggcggaggctccaccagccccaagaaaaagagaaaagtctaagctgccttctgcggggcttgccttctggccatgcccttcttctctcccttgcacctgtacctcttggtctttgaataaagcctgagtaggaaggctagcaaaaaaaaaaaaaaaaaaaaaaaaaaaaaaaaaaaaaaaaaaaaaaaaaaaaaaaaaaaaaaaaaaaaaaaaaaaaaaaa

SEQ ID NO: 13367 - RNA, 5785 nt, synthetic construct
  source 1..5785: mol_type = other RNA
aggaaataagagagaaaagaagagtaagaagaaatataagagccaccatggcccctaagaagaagcgtaaagtgagccggatggaacgcctcgtctacgaggtgcggcagaagtgcagaaacatcgaggacatctgcatctcctgcggatctctgaacgtgaccctggagcacccactgttcatcggcggcatgtgccagaactgtaaaaactgttttctggagtgtgcctatcaatacgacgatgacggctaccagagctactgcaccatctgttgcggcggaagagaggtgctgatgtgtggaaataacaactgctgccggtgcttctgcgtggaatgcgtggacctgctggtgggccccggcgccgcccaggccgctattaaggaagatccttggaactgctacatgtgcggccacaagggcacatacggcctgctgagacggagagaggactggcctagcagactgcagatgttcttcgccaataaccacgaccaggagttcgacccccctaaggtgtaccctcccgtccccgccgagaagagaaagcccatccgggtcctgagcctgttcgatggcatcgccaccggtctgctggtgctgaaggacctgggcatccaggtggataggtacattgcctccgaggtgtgcgaggactccatcaccgtgggaatggtgcgtcatcagggcaagatcatgtacgtgggcgacgtgcggagcgtgacacagaagcatatccaggagtggggccctttcgacctggtgatcggcggcagcccttgcaatgacctgagcatcgtgaacccagcccggaagggcctgtacgagggaaccggcagactgttcttcgagttttacagactgctgcacgacgcccggcctaaggaaggcgacgaccggcccttcttttggctgttcgagaatgtggtggccatgggagtcagcgacaagcgggatattagccggttcctggagagcaaccccgtgatgatcgatgccaaggaagtgagcgccgcccaccgggccagatacttctggggcaatctgcctggcatgaacagacccctggccagcaccgtgaacgacaagctggagctgcaggagtgcctggagcacggccggatcgccaagttcagcaaggtgagaaccatcaccacccgaagcaacagcatcaaacaaggcaaggaccagcactttcctgtgttcatgaacgagaaggaggacatcctgtggtgtaccgagatggagagagtgttcgggttcccagtccactacacagatgtcagcaacatgtctagactggccagacagagactgctgggaagaagctggtccgtccctgtgatcagacacctgttcgcccctctgaaggagtacttcgcctgcgtgagcagcggcaacagcaacgccaacagccggggccccagcttctctagcggcctggtgccactgtccctgagagggagccacatgggccccatggagatctacaaaaccgtgagcgcctggaagcggcagcctgtgcgcgtgctgagcctgtttcggaatatcgataaagtcctgaaaagcctgggattcctggagagcggctctggctccggcggtggcaccctgaagtacgtggaggatgtgacaaacgtggtcagacgggatgtggagaagtggggccccttcgatctggtgtacggcagcacccaacccctgggcagctcttgtgaccggtgccctggctggtacatgtttcagttccaccggatcctgcagtacgccctgccgagacaggagtcccagcggccattcttttggattttcatggacaacttgctgctgaccgaggatgaccaggaaactaccactcggttcctgcagaccgaagccgtgaccctgcaggacgtgagaggccgggactaccagaacgccatgcgggtgtggtccaacatccctggactgaaaagcaagcacgcacctctgacccctaaagaagaggagtacctgcaggcccaggtgcggagcagaagcaagctggacgcccctaaggtggatctgctggtgaagaattgcctcctgcccctgagagagtacttcaagtatttcagccagaatagtctgcccctgggaggcagcggcggcggcctggtgagcttcgaggacgtggccatggacttcagcagggaggagtggcagcagctggaccccgcccagaggtgcctgtaccaggacgtgatgctggagatctacagccacctgctgagcgtggagggcgccctgggcctgaagaccagccagcagaagatcttcgagaaggccagcttccacaacggcaaggagagcgaggtgaccaggggcggcatgtggtgcagcatcagcgaggacctgggcggcccaagcagcggcgcccctcctcccagcggcggcagcccagccggctccccaacctctaccgaggagggcacctctgagtccgccacccccgagagcggccctggcacctccaccgagcccagcgagggcagcgcacccggcagccctgccggcagccccacctccacagaggagggaaccagcaccgagcccagcgaaggcagcgccccaggcaccagcaccgagcctagtgagcaggagattaaacggatcaacaagatcagaagaagacttgtgaaagacagcaacaccaagaaggccggcaagacaggccccatgaaaaccctgctggttagagtgatgacacccgatctgagagagcggctggaaaacctgagaaagaagcctgaaaatatcccccagcccatcagcaatacatctagagccaacctgaataagctgctgaccgattacaccgaaatgaagaaggcgatcctgcatgtgtactgggaagagttccagaaggaccctgtgggcctgatgagccgggtggcccagcctgccagcaagaagatcgatcagaacaagctgaaacctgagatggacgagaagggcaacctgaccaccgccggctttgcctgctctcagtgtggccagcccctgttcgtgtacaagctggagcaggtgtctgagaagggcaaggcttacaccaactacttcggacggtgcaatgtggccgagcacgaaaagctgatcctgctggcccagctgaagcccgagaaggatagcgacgaagccgtgacatatagcctgggaaagtttgggcagagggccctggatttctacagcattcatgtgaccaaggagtccacccaccccgtgaagcccctggcccagatcgccggaaacagatacgcctccggacctgtgggaaaggccctgagcgacgcatgtatgggcacaatcgcctccttcctgtctaagtaccaggacatcatcatcgaacaccagaaggtggtgaagggcaaccagaagagactggagagcctgcgggagctggccggcaaggaaaacctggaataccctagcgtgaccctgccacctcagcctcacaccaaggagggcgttgatgcctacaacgaagtgatcgcccgggtgcgaatgtgggtgaacctgaacctgtggcagaagctgaagctaagcagagatgatgccaagcctctgctgagactgaagggattcccttcctttcctctggtcgagagacaggccaacgaagtggactggtgggacatggtgtgtaacgtgaagaagctgatcaacgagaaaaaggaggatggcaaggtgttttggcagaatctggctggctacaagagacaggaagccctgagaccatacctgagcagcgaggaagatcggaagaagggaaagaaattcgctcggtaccagctgggcgacctgctgctgcacctggaaaagaagcacggcgaggactggggaaaggtgtacgacgaggcctgggagcggattgacaagaaagtggaaggcctgagcaagcacatcaagctggaagaggaacggagaagcgaggacgcccagagcaaggccgccctgaccgactggctgcgggctaaggccagcttcgtgatcgagggcctgaaggaggccgacaaggacgagttctgcagatgcgagctgaagctgcagaagtggtacggggacctgcggggaaagcccttcgccatcgaagccgagaacagcatcctggacatcagcggcttcagcaagcagtacaactgtgccttcatctggcagaaggacggcgtgaagaagctgaacctgtacctgatcatcaactacttcaagggcggcaagctgcggttcaagaagatcaaacctgaagccttcgaagccaacagattctacaccgtgatcaacaaaaagagcggcgagatcgtgcccatggaggtgaacttcaacttcgacgaccccaacctgatcatcctgcctctggcctttggcaagagacagggcagagaattcatctggaacgacctgctgtccctggaaaccggcagcctgaagctggccaacggaagagtgatcgagaagacactgtacaacagaagaacccggcaggatgagcctgccctgttcgtggccctgaccttcgagcggcgggaggtcctggactcctccaatatcaaaccaatgaacctgatcggcgtggcaagaggcgaaaacatccccgccgtgatcgccctgaccgaccccgagggctgcccactgagccggtttaaggatagcctgggaaacccaacccacatcctgagaatcggcgagagctataaggagaagcagcggaccatccaggccaagaaggaggtggagcagcggagagccggcggctacagccggaagtacgccagcaaagccaagaatctggcagacgatatggtgagaaacaccgctagagatctgctgtactacgccgtgacccaggatgccatgctgatcttcgccaacctgagccggggcttcggccggcagggcaagcggaccttcatggccgagagacagtacacacggatggaggactggctgaccgccaagctggcctacgagggcctgagcaagacctacctgtccaagacactggcccagtacacctccaagacatgcagcaactgtgggtttaccatcaccagcgccgactacgacagggtgctggagaagctgaagaagacagcaacaggctggatgaccacaattaacggcaaggagctgaaggtggagggccagattacctactacaacagatacaagagacagaacgtagtcaaggacctgtccgtcgagctggatagactgagcgaagaatctgtgaacaacgacatctcctcctggacaaagggcagaagcggagaagctctgagcctcctgaagaaaagattctcccatagacccgtgcaggagaagttcgtgtgcctgaactgcggcttcgagacacacgcagccgagcaagccgccctgaacatcgccagatcctggctgttcctgcggagccaggagtacaagaaataccagacaaacaagacaaccggcaacaccgataagagagccttcgtcgagacctggcagtccttttaccggaagaagcttaaggaggtgtggaaacctgccgtgcggtctggcggatctggcggaggctccaccagccccaagaaaaagagaaaagtctaagctgccttctgcggggcttgccttctggccatgcccttcttctctcccttgcacctgtacctcttggtctttgaataaagcctgagtaggaaggctagcaaaaaaaaaaaaaaaaaaaaaaaaaaaaaaaaaaaaaaaaaaaaaaaaaaaaaaaaaaaaaaaaaaaaaaaaaaaaaaaa

SEQ ID NO: 13368 - RNA, 5785 nt, synthetic construct
  source 1..5785: mol_type = other RNA
aggaaataagagagaaaagaagagtaagaagaaatataagagccaccatggcccctaagaagaagcgtaaagtgagccggatggaacgcctcgtctacgaggtgcggcagaagtgcagaaacatcgaggacatctgcatctcctgcggatctctgaacgtgaccctggagcacccactgttcatcggcggcatgtgccagaactgtaaaaactgttttctggagtgtgcctatcaatacgacgatgacggctaccagagctactgcaccatctgttgcggcggaagagaggtgctgatgtgtggaaataacaactgctgccggtgcttctgcgtggaatgcgtggacctgctggtgggccccggcgccgcccaggccgctattaaggaagatccttggaactgctacatgtgcggccacaagggcacatacggcctgctgagacggagagaggactggcctagcagactgcagatgttcttcgccaataaccacgaccaggagttcgacccccctaaggtgtaccctcccgtccccgccgagaagagaaagcccatccgggtcctgagcctgttcgatggcatcgccaccggtctgctggtgctgaaggacctgggcatccaggtggataggtacattgcctccgaggtgtgcgaggactccatcaccgtgggaatggtgcgtcatcagggcaagatcatgtacgtgggcgacgtgcggagcgtgacacagaagcatatccaggagtggggccctttcgacctggtgatcggcggcagcccttgcaatgacctgagcatcgtgaacccagcccggaagggcctgtacgagggaaccggcagactgttcttcgagttttacagactgctgcacgacgcccggcctaaggaaggcgacgaccggcccttcttttggctgttcgagaatgtggtggccatgggagtcagcgacaagcgggatattagccggttcctggagagcaaccccgtgatgatcgatgccaaggaagtgagcgccgcccaccgggccagatacttctggggcaatctgcctggcatgaacagacccctggccagcaccgtgaacgacaagctggagctgcaggagtgcctggagcacggccggatcgccaagttcagcaaggtgagaaccatcaccacccgaagcaacagcatcaaacaaggcaaggaccagcactttcctgtgttcatgaacgagaaggaggacatcctgtggtgtaccgagatggagagagtgttcgggttcccagtccactacacagatgtcagcaacatgtctagactggccagacagagactgctgggaagaagctggtccgtccctgtgatcagacacctgttcgcccctctgaaggagtacttcgcctgcgtgagcagcggcaacagcaacgccaacagccggggccccagcttctctagcggcctggtgccactgtccctgagagggagccacatgggccccatggagatctacaaaaccgtgagcgcctggaagcggcagcctgtgcgcgtgctgagcctgtttcggaatatcgataaagtcctgaaaagcctgggattcctggagagcggctctggctccggcggtggcaccctgaagtacgtggaggatgtgacaaacgtggtcagacgggatgtggagaagtggggccccttcgatctggtgtacggcagcacccaacccctgggcagctcttgtgaccggtgccctggctggtacatgtttcagttccaccggatcctgcagtacgccctgccgagacaggagtcccagcggccattcttttggattttcatggacaacttgctgctgaccgaggatgaccaggaaactaccactcggttcctgcagaccgaagccgtgaccctgcaggacgtgagaggccgggactaccagaacgccatgcgggtgtggtccaacatccctggactgaaaagcaagcacgcacctctgacccctaaagaagaggagtacctgcaggcccaggtgcggagcagaagcaagctggacgcccctaaggtggatctgctggtgaagaattgcctcctgcccctgagagagtacttcaagtatttcagccagaatagtctgcccctgggaggcagcggcggcggcagccagcacctggtgaccttcgaggacgtggccgtgaacttcacccaggaggagtggaccctgctggaccagacccagagggacctgtacagggacgtgatgctggagaactaccagaacctgatggccctgggcagcgagagctgcaagccccacgtgaacagccccctggagggcgccgaggagctgaggaccagggccaggaggatcctgcagagcgagttcatggccgagagcgacctgggcggcccaagcagcggcgcccctcctcccagcggcggcagcccagccggctccccaacctctaccgaggagggcacctctgagtccgccacccccgagagcggccctggcacctccaccgagcccagcgagggcagcgcacccggcagccctgccggcagccccacctccacagaggagggaaccagcaccgagcccagcgaaggcagcgccccaggcaccagcaccgagcctagtgagcaggagattaaacggatcaacaagatcagaagaagacttgtgaaagacagcaacaccaagaaggccggcaagacaggccccatgaaaaccctgctggttagagtgatgacacccgatctgagagagcggctggaaaacctgagaaagaagcctgaaaatatcccccagcccatcagcaatacatctagagccaacctgaataagctgctgaccgattacaccgaaatgaagaaggcgatcctgcatgtgtactgggaagagttccagaaggaccctgtgggcctgatgagccgggtggcccagcctgccagcaagaagatcgatcagaacaagctgaaacctgagatggacgagaagggcaacctgaccaccgccggctttgcctgctctcagtgtggccagcccctgttcgtgtacaagctggagcaggtgtctgagaagggcaaggcttacaccaactacttcggacggtgcaatgtggccgagcacgaaaagctgatcctgctggcccagctgaagcccgagaaggatagcgacgaagccgtgacatatagcctgggaaagtttgggcagagggccctggatttctacagcattcatgtgaccaaggagtccacccaccccgtgaagcccctggcccagatcgccggaaacagatacgcctccggacctgtgggaaaggccctgagcgacgcatgtatgggcacaatcgcctccttcctgtctaagtaccaggacatcatcatcgaacaccagaaggtggtgaagggcaaccagaagagactggagagcctgcgggagctggccggcaaggaaaacctggaataccctagcgtgaccctgccacctcagcctcacaccaaggagggcgttgatgcctacaacgaagtgatcgcccgggtgcgaatgtgggtgaacctgaacctgtggcagaagctgaagctaagcagagatgatgccaagcctctgctgagactgaagggattcccttcctttcctctggtcgagagacaggccaacgaagtggactggtgggacatggtgtgtaacgtgaagaagctgatcaacgagaaaaaggaggatggcaaggtgttttggcagaatctggctggctacaagagacaggaagccctgagaccatacctgagcagcgaggaagatcggaagaagggaaagaaattcgctcggtaccagctgggcgacctgctgctgcacctggaaaagaagcacggcgaggactggggaaaggtgtacgacgaggcctgggagcggattgacaagaaagtggaaggcctgagcaagcacatcaagctggaagaggaacggagaagcgaggacgcccagagcaaggccgccctgaccgactggctgcgggctaaggccagcttcgtgatcgagggcctgaaggaggccgacaaggacgagttctgcagatgcgagctgaagctgcagaagtggtacggggacctgcggggaaagcccttcgccatcgaagccgagaacagcatcctggacatcagcggcttcagcaagcagtacaactgtgccttcatctggcagaaggacggcgtgaagaagctgaacctgtacctgatcatcaactacttcaagggcggcaagctgcggttcaagaagatcaaacctgaagccttcgaagccaacagattctacaccgtgatcaacaaaaagagcggcgagatcgtgcccatggaggtgaacttcaacttcgacgaccccaacctgatcatcctgcctctggcctttggcaagagacagggcagagaattcatctggaacgacctgctgtccctggaaaccggcagcctgaagctggccaacggaagagtgatcgagaagacactgtacaacagaagaacccggcaggatgagcctgccctgttcgtggccctgaccttcgagcggcgggaggtcctggactcctccaatatcaaaccaatgaacctgatcggcgtggcaagaggcgaaaacatccccgccgtgatcgccctgaccgaccccgagggctgcccactgagccggtttaaggatagcctgggaaacccaacccacatcctgagaatcggcgagagctataaggagaagcagcggaccatccaggccaagaaggaggtggagcagcggagagccggcggctacagccggaagtacgccagcaaagccaagaatctggcagacgatatggtgagaaacaccgctagagatctgctgtactacgccgtgacccaggatgccatgctgatcttcgccaacctgagccggggcttcggccggcagggcaagcggaccttcatggccgagagacagtacacacggatggaggactggctgaccgccaagctggcctacgagggcctgagcaagacctacctgtccaagacactggcccagtacacctccaagacatgcagcaactgtgggtttaccatcaccagcgccgactacgacagggtgctggagaagctgaagaagacagcaacaggctggatgaccacaattaacggcaaggagctgaaggtggagggccagattacctactacaacagatacaagagacagaacgtagtcaaggacctgtccgtcgagctggatagactgagcgaagaatctgtgaacaacgacatctcctcctggacaaagggcagaagcggagaagctctgagcctcctgaagaaaagattctcccatagacccgtgcaggagaagttcgtgtgcctgaactgcggcttcgagacacacgcagccgagcaagccgccctgaacatcgccagatcctggctgttcctgcggagccaggagtacaagaaataccagacaaacaagacaaccggcaacaccgataagagagccttcgtcgagacctggcagtccttttaccggaagaagcttaaggaggtgtggaaacctgccgtgcggtctggcggatctggcggaggctccaccagccccaagaaaaagagaaaagtctaagctgccttctgcggggcttgccttctggccatgcccttcttctctcccttgcacctgtacctcttggtctttgaataaagcctgagtaggaaggctagcaaaaaaaaaaaaaaaaaaaaaaaaaaaaaaaaaaaaaaaaaaaaaaaaaaaaaaaaaaaaaaaaaaaaaaaaaaaaaaaa

SEQ ID NO: 13369 - RNA, 5785 nt, synthetic construct
  source 1..5785: mol_type = other RNA
aggaaataagagagaaaagaagagtaagaagaaatataagagccaccatggcccctaagaagaagcgtaaagtgagccggatggaacgcctcgtctacgaggtgcggcagaagtgcagaaacatcgaggacatctgcatctcctgcggatctctgaacgtgaccctggagcacccactgttcatcggcggcatgtgccagaactgtaaaaactgttttctggagtgtgcctatcaatacgacgatgacggctaccagagctactgcaccatctgttgcggcggaagagaggtgctgatgtgtggaaataacaactgctgccggtgcttctgcgtggaatgcgtggacctgctggtgggccccggcgccgcccaggccgctattaaggaagatccttggaactgctacatgtgcggccacaagggcacatacggcctgctgagacggagagaggactggcctagcagactgcagatgttcttcgccaataaccacgaccaggagttcgacccccctaaggtgtaccctcccgtccccgccgagaagagaaagcccatccgggtcctgagcctgttcgatggcatcgccaccggtctgctggtgctgaaggacctgggcatccaggtggataggtacattgcctccgaggtgtgcgaggactccatcaccgtgggaatggtgcgtcatcagggcaagatcatgtacgtgggcgacgtgcggagcgtgacacagaagcatatccaggagtggggccctttcgacctggtgatcggcggcagcccttgcaatgacctgagcatcgtgaacccagcccggaagggcctgtacgagggaaccggcagactgttcttcgagttttacagactgctgcacgacgcccggcctaaggaaggcgacgaccggcccttcttttggctgttcgagaatgtggtggccatgggagtcagcgacaagcgggatattagccggttcctggagagcaaccccgtgatgatcgatgccaaggaagtgagcgccgcccaccgggccagatacttctggggcaatctgcctggcatgaacagacccctggccagcaccgtgaacgacaagctggagctgcaggagtgcctggagcacggccggatcgccaagttcagcaaggtgagaaccatcaccacccgaagcaacagcatcaaacaaggcaaggaccagcactttcctgtgttcatgaacgagaaggaggacatcctgtggtgtaccgagatggagagagtgttcgggttcccagtccactacacagatgtcagcaacatgtctagactggccagacagagactgctgggaagaagctggtccgtccctgtgatcagacacctgttcgcccctctgaaggagtacttcgcctgcgtgagcagcggcaacagcaacgccaacagccggggccccagcttctctagcggcctggtgccactgtccctgagagggagccacatgggccccatggagatctacaaaaccgtgagcgcctggaagcggcagcctgtgcgcgtgctgagcctgtttcggaatatcgataaagtcctgaaaagcctgggattcctggagagcggctctggctccggcggtggcaccctgaagtacgtggaggatgtgacaaacgtggtcagacgggatgtggagaagtggggccccttcgatctggtgtacggcagcacccaacccctgggcagctcttgtgaccggtgccctggctggtacatgtttcagttccaccggatcctgcagtacgccctgccgagacaggagtcccagcggccattcttttggattttcatggacaacttgctgctgaccgaggatgaccaggaaactaccactcggttcctgcagaccgaagccgtgaccctgcaggacgtgagaggccgggactaccagaacgccatgcgggtgtggtccaacatccctggactgaaaagcaagcacgcacctctgacccctaaagaagaggagtacctgcaggcccaggtgcggagcagaagcaagctggacgcccctaaggtggatctgctggtgaagaattgcctcctgcccctgagagagtacttcaagtatttcagccagaatagtctgcccctgggaggcagcggcggcggcatgggcctgctgaccttcagggacgtggccatcgagttcagcctggaggagtggcagtgcctggacaccgcccagaagaacctgtacaggaacgtgatgctggagaactacaggaacctggccttcctgggcatcgccgtgagcaagcccgacctgatcatctgcctggagaaggagaaggagccctggaacatgaagaggcacgagatggtggacgagccccccggcctggccgtgagcaacggcggcccaagcagcggcgcccctcctcccagcggcggcagcccagccggctccccaacctctaccgaggagggcacctctgagtccgccacccccgagagcggccctggcacctccaccgagcccagcgagggcagcgcacccggcagccctgccggcagccccacctccacagaggagggaaccagcaccgagcccagcgaaggcagcgccccaggcaccagcaccgagcctagtgagcaggagattaaacggatcaacaagatcagaagaagacttgtgaaagacagcaacaccaagaaggccggcaagacaggccccatgaaaaccctgctggttagagtgatgacacccgatctgagagagcggctggaaaacctgagaaagaagcctgaaaatatcccccagcccatcagcaatacatctagagccaacctgaataagctgctgaccgattacaccgaaatgaagaaggcgatcctgcatgtgtactgggaagagttccagaaggaccctgtgggcctgatgagccgggtggcccagcctgccagcaagaagatcgatcagaacaagctgaaacctgagatggacgagaagggcaacctgaccaccgccggctttgcctgctctcagtgtggccagcccctgttcgtgtacaagctggagcaggtgtctgagaagggcaaggcttacaccaactacttcggacggtgcaatgtggccgagcacgaaaagctgatcctgctggcccagctgaagcccgagaaggatagcgacgaagccgtgacatatagcctgggaaagtttgggcagagggccctggatttctacagcattcatgtgaccaaggagtccacccaccccgtgaagcccctggcccagatcgccggaaacagatacgcctccggacctgtgggaaaggccctgagcgacgcatgtatgggcacaatcgcctccttcctgtctaagtaccaggacatcatcatcgaacaccagaaggtggtgaagggcaaccagaagagactggagagcctgcgggagctggccggcaaggaaaacctggaataccctagcgtgaccctgccacctcagcctcacaccaaggagggcgttgatgcctacaacgaagtgatcgcccgggtgcgaatgtgggtgaacctgaacctgtggcagaagctgaagctaagcagagatgatgccaagcctctgctgagactgaagggattcccttcctttcctctggtcgagagacaggccaacgaagtggactggtgggacatggtgtgtaacgtgaagaagctgatcaacgagaaaaaggaggatggcaaggtgttttggcagaatctggctggctacaagagacaggaagccctgagaccatacctgagcagcgaggaagatcggaagaagggaaagaaattcgctcggtaccagctgggcgacctgctgctgcacctggaaaagaagcacggcgaggactggggaaaggtgtacgacgaggcctgggagcggattgacaagaaagtggaaggcctgagcaagcacatcaagctggaagaggaacggagaagcgaggacgcccagagcaaggccgccctgaccgactggctgcgggctaaggccagcttcgtgatcgagggcctgaaggaggccgacaaggacgagttctgcagatgcgagctgaagctgcagaagtggtacggggacctgcggggaaagcccttcgccatcgaagccgagaacagcatcctggacatcagcggcttcagcaagcagtacaactgtgccttcatctggcagaaggacggcgtgaagaagctgaacctgtacctgatcatcaactacttcaagggcggcaagctgcggttcaagaagatcaaacctgaagccttcgaagccaacagattctacaccgtgatcaacaaaaagagcggcgagatcgtgcccatggaggtgaacttcaacttcgacgaccccaacctgatcatcctgcctctggcctttggcaagagacagggcagagaattcatctggaacgacctgctgtccctggaaaccggcagcctgaagctggccaacggaagagtgatcgagaagacactgtacaacagaagaacccggcaggatgagcctgccctgttcgtggccctgaccttcgagcggcgggaggtcctggactcctccaatatcaaaccaatgaacctgatcggcgtggcaagaggcgaaaacatccccgccgtgatcgccctgaccgaccccgagggctgcccactgagccggtttaaggatagcctgggaaacccaacccacatcctgagaatcggcgagagctataaggagaagcagcggaccatccaggccaagaaggaggtggagcagcggagagccggcggctacagccggaagtacgccagcaaagccaagaatctggcagacgatatggtgagaaacaccgctagagatctgctgtactacgccgtgacccaggatgccatgctgatcttcgccaacctgagccggggcttcggccggcagggcaagcggaccttcatggccgagagacagtacacacggatggaggactggctgaccgccaagctggcctacgagggcctgagcaagacctacctgtccaagacactggcccagtacacctccaagacatgcagcaactgtgggtttaccatcaccagcgccgactacgacagggtgctggagaagctgaagaagacagcaacaggctggatgaccacaattaacggcaaggagctgaaggtggagggccagattacctactacaacagatacaagagacagaacgtagtcaaggacctgtccgtcgagctggatagactgagcgaagaatctgtgaacaacgacatctcctcctggacaaagggcagaagcggagaagctctgagcctcctgaagaaaagattctcccatagacccgtgcaggagaagttcgtgtgcctgaactgcggcttcgagacacacgcagccgagcaagccgccctgaacatcgccagatcctggctgttcctgcggagccaggagtacaagaaataccagacaaacaagacaaccggcaacaccgataagagagccttcgtcgagacctggcagtccttttaccggaagaagcttaaggaggtgtggaaacctgccgtgcggtctggcggatctggcggaggctccaccagccccaagaaaaagagaaaagtctaagctgccttctgcggggcttgccttctggccatgcccttcttctctcccttgcacctgtacctcttggtctttgaataaagcctgagtaggaaggctagcaaaaaaaaaaaaaaaaaaaaaaaaaaaaaaaaaaaaaaaaaaaaaaaaaaaaaaaaaaaaaaaaaaaaaaaaaaaaaaaa

SEQ ID NO: 13370 - RNA, 5785 nt, synthetic construct
  source 1..5785: mol_type = other RNA
aggaaataagagagaaaagaagagtaagaagaaatataagagccaccatggcccctaagaagaagcgtaaagtgagccggatggaacgcctcgtctacgaggtgcggcagaagtgcagaaacatcgaggacatctgcatctcctgcggatctctgaacgtgaccctggagcacccactgttcatcggcggcatgtgccagaactgtaaaaactgttttctggagtgtgcctatcaatacgacgatgacggctaccagagctactgcaccatctgttgcggcggaagagaggtgctgatgtgtggaaataacaactgctgccggtgcttctgcgtggaatgcgtggacctgctggtgggccccggcgccgcccaggccgctattaaggaagatccttggaactgctacatgtgcggccacaagggcacatacggcctgctgagacggagagaggactggcctagcagactgcagatgttcttcgccaataaccacgaccaggagttcgacccccctaaggtgtaccctcccgtccccgccgagaagagaaagcccatccgggtcctgagcctgttcgatggcatcgccaccggtctgctggtgctgaaggacctgggcatccaggtggataggtacattgcctccgaggtgtgcgaggactccatcaccgtgggaatggtgcgtcatcagggcaagatcatgtacgtgggcgacgtgcggagcgtgacacagaagcatatccaggagtggggccctttcgacctggtgatcggcggcagcccttgcaatgacctgagcatcgtgaacccagcccggaagggcctgtacgagggaaccggcagactgttcttcgagttttacagactgctgcacgacgcccggcctaaggaaggcgacgaccggcccttcttttggctgttcgagaatgtggtggccatgggagtcagcgacaagcgggatattagccggttcctggagagcaaccccgtgatgatcgatgccaaggaagtgagcgccgcccaccgggccagatacttctggggcaatctgcctggcatgaacagacccctggccagcaccgtgaacgacaagctggagctgcaggagtgcctggagcacggccggatcgccaagttcagcaaggtgagaaccatcaccacccgaagcaacagcatcaaacaaggcaaggaccagcactttcctgtgttcatgaacgagaaggaggacatcctgtggtgtaccgagatggagagagtgttcgggttcccagtccactacacagatgtcagcaacatgtctagactggccagacagagactgctgggaagaagctggtccgtccctgtgatcagacacctgttcgcccctctgaaggagtacttcgcctgcgtgagcagcggcaacagcaacgccaacagccggggccccagcttctctagcggcctggtgccactgtccctgagagggagccacatgggccccatggagatctacaaaaccgtgagcgcctggaagcggcagcctgtgcgcgtgctgagcctgtttcggaatatcgataaagtcctgaaaagcctgggattcctggagagcggctctggctccggcggtggcaccctgaagtacgtggaggatgtgacaaacgtggtcagacgggatgtggagaagtggggccccttcgatctggtgtacggcagcacccaacccctgggcagctcttgtgaccggtgccctggctggtacatgtttcagttccaccggatcctgcagtacgccctgccgagacaggagtcccagcggccattcttttggattttcatggacaacttgctgctgaccgaggatgaccaggaaactaccactcggttcctgcagaccgaagccgtgaccctgcaggacgtgagaggccgggactaccagaacgccatgcgggtgtggtccaacatccctggactgaaaagcaagcacgcacctctgacccctaaagaagaggagtacctgcaggcccaggtgcggagcagaagcaagctggacgcccctaaggtggatctgctggtgaagaattgcctcctgcccctgagagagtacttcaagtatttcagccagaatagtctgcccctgggaggcagcggcggcggcatggccgccctgttcctgagcgccccccaccaggccaaggtgaccttcgaggacgtggccgtgtacctgagcagggaggagtggggcaggctgggccccgcccagaggggcctgtacagggacgtgatgctggagacctacggcaacctggtgagcctgggcgtgggccccgccggccccaagcccggcgtgatcagccagctggagaggggcgacgagccctgggtgctggacgtgcagggcggcggcccaagcagcggcgcccctcctcccagcggcggcagcccagccggctccccaacctctaccgaggagggcacctctgagtccgccacccccgagagcggccctggcacctccaccgagcccagcgagggcagcgcacccggcagccctgccggcagccccacctccacagaggagggaaccagcaccgagcccagcgaaggcagcgccccaggcaccagcaccgagcctagtgagcaggagattaaacggatcaacaagatcagaagaagacttgtgaaagacagcaacaccaagaaggccggcaagacaggccccatgaaaaccctgctggttagagtgatgacacccgatctgagagagcggctggaaaacctgagaaagaagcctgaaaatatcccccagcccatcagcaatacatctagagccaacctgaataagctgctgaccgattacaccgaaatgaagaaggcgatcctgcatgtgtactgggaagagttccagaaggaccctgtgggcctgatgagccgggtggcccagcctgccagcaagaagatcgatcagaacaagctgaaacctgagatggacgagaagggcaacctgaccaccgccggctttgcctgctctcagtgtggccagcccctgttcgtgtacaagctggagcaggtgtctgagaagggcaaggcttacaccaactacttcggacggtgcaatgtggccgagcacgaaaagctgatcctgctggcccagctgaagcccgagaaggatagcgacgaagccgtgacatatagcctgggaaagtttgggcagagggccctggatttctacagcattcatgtgaccaaggagtccacccaccccgtgaagcccctggcccagatcgccggaaacagatacgcctccggacctgtgggaaaggccctgagcgacgcatgtatgggcacaatcgcctccttcctgtctaagtaccaggacatcatcatcgaacaccagaaggtggtgaagggcaaccagaagagactggagagcctgcgggagctggccggcaaggaaaacctggaataccctagcgtgaccctgccacctcagcctcacaccaaggagggcgttgatgcctacaacgaagtgatcgcccgggtgcgaatgtgggtgaacctgaacctgtggcagaagctgaagctaagcagagatgatgccaagcctctgctgagactgaagggattcccttcctttcctctggtcgagagacaggccaacgaagtggactggtgggacatggtgtgtaacgtgaagaagctgatcaacgagaaaaaggaggatggcaaggtgttttggcagaatctggctggctacaagagacaggaagccctgagaccatacctgagcagcgaggaagatcggaagaagggaaagaaattcgctcggtaccagctgggcgacctgctgctgcacctggaaaagaagcacggcgaggactggggaaaggtgtacgacgaggcctgggagcggattgacaagaaagtggaaggcctgagcaagcacatcaagctggaagaggaacggagaagcgaggacgcccagagcaaggccgccctgaccgactggctgcgggctaaggccagcttcgtgatcgagggcctgaaggaggccgacaaggacgagttctgcagatgcgagctgaagctgcagaagtggtacggggacctgcggggaaagcccttcgccatcgaagccgagaacagcatcctggacatcagcggcttcagcaagcagtacaactgtgccttcatctggcagaaggacggcgtgaagaagctgaacctgtacctgatcatcaactacttcaagggcggcaagctgcggttcaagaagatcaaacctgaagccttcgaagccaacagattctacaccgtgatcaacaaaaagagcggcgagatcgtgcccatggaggtgaacttcaacttcgacgaccccaacctgatcatcctgcctctggcctttggcaagagacagggcagagaattcatctggaacgacctgctgtccctggaaaccggcagcctgaagctggccaacggaagagtgatcgagaagacactgtacaacagaagaacccggcaggatgagcctgccctgttcgtggccctgaccttcgagcggcgggaggtcctggactcctccaatatcaaaccaatgaacctgatcggcgtggcaagaggcgaaaacatccccgccgtgatcgccctgaccgaccccgagggctgcccactgagccggtttaaggatagcctgggaaacccaacccacatcctgagaatcggcgagagctataaggagaagcagcggaccatccaggccaagaaggaggtggagcagcggagagccggcggctacagccggaagtacgccagcaaagccaagaatctggcagacgatatggtgagaaacaccgctagagatctgctgtactacgccgtgacccaggatgccatgctgatcttcgccaacctgagccggggcttcggccggcagggcaagcggaccttcatggccgagagacagtacacacggatggaggactggctgaccgccaagctggcctacgagggcctgagcaagacctacctgtccaagacactggcccagtacacctccaagacatgcagcaactgtgggtttaccatcaccagcgccgactacgacagggtgctggagaagctgaagaagacagcaacaggctggatgaccacaattaacggcaaggagctgaaggtggagggccagattacctactacaacagatacaagagacagaacgtagtcaaggacctgtccgtcgagctggatagactgagcgaagaatctgtgaacaacgacatctcctcctggacaaagggcagaagcggagaagctctgagcctcctgaagaaaagattctcccatagacccgtgcaggagaagttcgtgtgcctgaactgcggcttcgagacacacgcagccgagcaagccgccctgaacatcgccagatcctggctgttcctgcggagccaggagtacaagaaataccagacaaacaagacaaccggcaacaccgataagagagccttcgtcgagacctggcagtccttttaccggaagaagcttaaggaggtgtggaaacctgccgtgcggtctggcggatctggcggaggctccaccagccccaagaaaaagagaaaagtctaagctgccttctgcggggcttgccttctggccatgcccttcttctctcccttgcacctgtacctcttggtctttgaataaagcctgagtaggaaggctagcaaaaaaaaaaaaaaaaaaaaaaaaaaaaaaaaaaaaaaaaaaaaaaaaaaaaaaaaaaaaaaaaaaaaaaaaaaaaaaaa

SEQ ID NO: 13371 - RNA, 5785 nt, synthetic construct
  source 1..5785: mol_type = other RNA
aggaaataagagagaaaagaagagtaagaagaaatataagagccaccatggcccctaagaagaagcgtaaagtgagccggatggaacgcctcgtctacgaggtgcggcagaagtgcagaaacatcgaggacatctgcatctcctgcggatctctgaacgtgaccctggagcacccactgttcatcggcggcatgtgccagaactgtaaaaactgttttctggagtgtgcctatcaatacgacgatgacggctaccagagctactgcaccatctgttgcggcggaagagaggtgctgatgtgtggaaataacaactgctgccggtgcttctgcgtggaatgcgtggacctgctggtgggccccggcgccgcccaggccgctattaaggaagatccttggaactgctacatgtgcggccacaagggcacatacggcctgctgagacggagagaggactggcctagcagactgcagatgttcttcgccaataaccacgaccaggagttcgacccccctaaggtgtaccctcccgtccccgccgagaagagaaagcccatccgggtcctgagcctgttcgatggcatcgccaccggtctgctggtgctgaaggacctgggcatccaggtggataggtacattgcctccgaggtgtgcgaggactccatcaccgtgggaatggtgcgtcatcagggcaagatcatgtacgtgggcgacgtgcggagcgtgacacagaagcatatccaggagtggggccctttcgacctggtgatcggcggcagcccttgcaatgacctgagcatcgtgaacccagcccggaagggcctgtacgagggaaccggcagactgttcttcgagttttacagactgctgcacgacgcccggcctaaggaaggcgacgaccggcccttcttttggctgttcgagaatgtggtggccatgggagtcagcgacaagcgggatattagccggttcctggagagcaaccccgtgatgatcgatgccaaggaagtgagcgccgcccaccgggccagatacttctggggcaatctgcctggcatgaacagacccctggccagcaccgtgaacgacaagctggagctgcaggagtgcctggagcacggccggatcgccaagttcagcaaggtgagaaccatcaccacccgaagcaacagcatcaaacaaggcaaggaccagcactttcctgtgttcatgaacgagaaggaggacatcctgtggtgtaccgagatggagagagtgttcgggttcccagtccactacacagatgtcagcaacatgtctagactggccagacagagactgctgggaagaagctggtccgtccctgtgatcagacacctgttcgcccctctgaaggagtacttcgcctgcgtgagcagcggcaacagcaacgccaacagccggggccccagcttctctagcggcctggtgccactgtccctgagagggagccacatgggccccatggagatctacaaaaccgtgagcgcctggaagcggcagcctgtgcgcgtgctgagcctgtttcggaatatcgataaagtcctgaaaagcctgggattcctggagagcggctctggctccggcggtggcaccctgaagtacgtggaggatgtgacaaacgtggtcagacgggatgtggagaagtggggccccttcgatctggtgtacggcagcacccaacccctgggcagctcttgtgaccggtgccctggctggtacatgtttcagttccaccggatcctgcagtacgccctgccgagacaggagtcccagcggccattcttttggattttcatggacaacttgctgctgaccgaggatgaccaggaaactaccactcggttcctgcagaccgaagccgtgaccctgcaggacgtgagaggccgggactaccagaacgccatgcgggtgtggtccaacatccctggactgaaaagcaagcacgcacctctgacccctaaagaagaggagtacctgcaggcccaggtgcggagcagaagcaagctggacgcccctaaggtggatctgctggtgaagaattgcctcctgcccctgagagagtacttcaagtatttcagccagaatagtctgcccctgggaggcagcggcggcggcatggccttcagggacgtggccgtggccttcagccagaaggagtggaagctgctgagccccgcccagaggaccctgtacagggacgtgatgctggagaactacagcctgctggtgagcctgggcatcgccttccccaagcccaagctgatcacccagctggagcagggcgacgagccctggagggaggagagcgagtgcttcctggacctgtacagcgagcccaggaccgagttccagccctgcggcggcccaagcagcggcgcccctcctcccagcggcggcagcccagccggctccccaacctctaccgaggagggcacctctgagtccgccacccccgagagcggccctggcacctccaccgagcccagcgagggcagcgcacccggcagccctgccggcagccccacctccacagaggagggaaccagcaccgagcccagcgaaggcagcgccccaggcaccagcaccgagcctagtgagcaggagattaaacggatcaacaagatcagaagaagacttgtgaaagacagcaacaccaagaaggccggcaagacaggccccatgaaaaccctgctggttagagtgatgacacccgatctgagagagcggctggaaaacctgagaaagaagcctgaaaatatcccccagcccatcagcaatacatctagagccaacctgaataagctgctgaccgattacaccgaaatgaagaaggcgatcctgcatgtgtactgggaagagttccagaaggaccctgtgggcctgatgagccgggtggcccagcctgccagcaagaagatcgatcagaacaagctgaaacctgagatggacgagaagggcaacctgaccaccgccggctttgcctgctctcagtgtggccagcccctgttcgtgtacaagctggagcaggtgtctgagaagggcaaggcttacaccaactacttcggacggtgcaatgtggccgagcacgaaaagctgatcctgctggcccagctgaagcccgagaaggatagcgacgaagccgtgacatatagcctgggaaagtttgggcagagggccctggatttctacagcattcatgtgaccaaggagtccacccaccccgtgaagcccctggcccagatcgccggaaacagatacgcctccggacctgtgggaaaggccctgagcgacgcatgtatgggcacaatcgcctccttcctgtctaagtaccaggacatcatcatcgaacaccagaaggtggtgaagggcaaccagaagagactggagagcctgcgggagctggccggcaaggaaaacctggaataccctagcgtgaccctgccacctcagcctcacaccaaggagggcgttgatgcctacaacgaagtgatcgcccgggtgcgaatgtgggtgaacctgaacctgtggcagaagctgaagctaagcagagatgatgccaagcctctgctgagactgaagggattcccttcctttcctctggtcgagagacaggccaacgaagtggactggtgggacatggtgtgtaacgtgaagaagctgatcaacgagaaaaaggaggatggcaaggtgttttggcagaatctggctggctacaagagacaggaagccctgagaccatacctgagcagcgaggaagatcggaagaagggaaagaaattcgctcggtaccagctgggcgacctgctgctgcacctggaaaagaagcacggcgaggactggggaaaggtgtacgacgaggcctgggagcggattgacaagaaagtggaaggcctgagcaagcacatcaagctggaagaggaacggagaagcgaggacgcccagagcaaggccgccctgaccgactggctgcgggctaaggccagcttcgtgatcgagggcctgaaggaggccgacaaggacgagttctgcagatgcgagctgaagctgcagaagtggtacggggacctgcggggaaagcccttcgccatcgaagccgagaacagcatcctggacatcagcggcttcagcaagcagtacaactgtgccttcatctggcagaaggacggcgtgaagaagctgaacctgtacctgatcatcaactacttcaagggcggcaagctgcggttcaagaagatcaaacctgaagccttcgaagccaacagattctacaccgtgatcaacaaaaagagcggcgagatcgtgcccatggaggtgaacttcaacttcgacgaccccaacctgatcatcctgcctctggcctttggcaagagacagggcagagaattcatctggaacgacctgctgtccctggaaaccggcagcctgaagctggccaacggaagagtgatcgagaagacactgtacaacagaagaacccggcaggatgagcctgccctgttcgtggccctgaccttcgagcggcgggaggtcctggactcctccaatatcaaaccaatgaacctgatcggcgtggcaagaggcgaaaacatccccgccgtgatcgccctgaccgaccccgagggctgcccactgagccggtttaaggatagcctgggaaacccaacccacatcctgagaatcggcgagagctataaggagaagcagcggaccatccaggccaagaaggaggtggagcagcggagagccggcggctacagccggaagtacgccagcaaagccaagaatctggcagacgatatggtgagaaacaccgctagagatctgctgtactacgccgtgacccaggatgccatgctgatcttcgccaacctgagccggggcttcggccggcagggcaagcggaccttcatggccgagagacagtacacacggatggaggactggctgaccgccaagctggcctacgagggcctgagcaagacctacctgtccaagacactggcccagtacacctccaagacatgcagcaactgtgggtttaccatcaccagcgccgactacgacagggtgctggagaagctgaagaagacagcaacaggctggatgaccacaattaacggcaaggagctgaaggtggagggccagattacctactacaacagatacaagagacagaacgtagtcaaggacctgtccgtcgagctggatagactgagcgaagaatctgtgaacaacgacatctcctcctggacaaagggcagaagcggagaagctctgagcctcctgaagaaaagattctcccatagacccgtgcaggagaagttcgtgtgcctgaactgcggcttcgagacacacgcagccgagcaagccgccctgaacatcgccagatcctggctgttcctgcggagccaggagtacaagaaataccagacaaacaagacaaccggcaacaccgataagagagccttcgtcgagacctggcagtccttttaccggaagaagcttaaggaggtgtggaaacctgccgtgcggtctggcggatctggcggaggctccaccagccccaagaaaaagagaaaagtctaagctgccttctgcggggcttgccttctggccatgcccttcttctctcccttgcacctgtacctcttggtctttgaataaagcctgagtaggaaggctagcaaaaaaaaaaaaaaaaaaaaaaaaaaaaaaaaaaaaaaaaaaaaaaaaaaaaaaaaaaaaaaaaaaaaaaaaaaaaaaaa

SEQ ID NO: 13372 - RNA, 5785 nt, synthetic construct
  source 1..5785: mol_type = other RNA
aggaaataagagagaaaagaagagtaagaagaaatataagagccaccatggcccctaagaagaagcgtaaagtgagccggatggaacgcctcgtctacgaggtgcggcagaagtgcagaaacatcgaggacatctgcatctcctgcggatctctgaacgtgaccctggagcacccactgttcatcggcggcatgtgccagaactgtaaaaactgttttctggagtgtgcctatcaatacgacgatgacggctaccagagctactgcaccatctgttgcggcggaagagaggtgctgatgtgtggaaataacaactgctgccggtgcttctgcgtggaatgcgtggacctgctggtgggccccggcgccgcccaggccgctattaaggaagatccttggaactgctacatgtgcggccacaagggcacatacggcctgctgagacggagagaggactggcctagcagactgcagatgttcttcgccaataaccacgaccaggagttcgacccccctaaggtgtaccctcccgtccccgccgagaagagaaagcccatccgggtcctgagcctgttcgatggcatcgccaccggtctgctggtgctgaaggacctgggcatccaggtggataggtacattgcctccgaggtgtgcgaggactccatcaccgtgggaatggtgcgtcatcagggcaagatcatgtacgtgggcgacgtgcggagcgtgacacagaagcatatccaggagtggggccctttcgacctggtgatcggcggcagcccttgcaatgacctgagcatcgtgaacccagcccggaagggcctgtacgagggaaccggcagactgttcttcgagttttacagactgctgcacgacgcccggcctaaggaaggcgacgaccggcccttcttttggctgttcgagaatgtggtggccatgggagtcagcgacaagcgggatattagccggttcctggagagcaaccccgtgatgatcgatgccaaggaagtgagcgccgcccaccgggccagatacttctggggcaatctgcctggcatgaacagacccctggccagcaccgtgaacgacaagctggagctgcaggagtgcctggagcacggccggatcgccaagttcagcaaggtgagaaccatcaccacccgaagcaacagcatcaaacaaggcaaggaccagcactttcctgtgttcatgaacgagaaggaggacatcctgtggtgtaccgagatggagagagtgttcgggttcccagtccactacacagatgtcagcaacatgtctagactggccagacagagactgctgggaagaagctggtccgtccctgtgatcagacacctgttcgcccctctgaaggagtacttcgcctgcgtgagcagcggcaacagcaacgccaacagccggggccccagcttctctagcggcctggtgccactgtccctgagagggagccacatgggccccatggagatctacaaaaccgtgagcgcctggaagcggcagcctgtgcgcgtgctgagcctgtttcggaatatcgataaagtcctgaaaagcctgggattcctggagagcggctctggctccggcggtggcaccctgaagtacgtggaggatgtgacaaacgtggtcagacgggatgtggagaagtggggccccttcgatctggtgtacggcagcacccaacccctgggcagctcttgtgaccggtgccctggctggtacatgtttcagttccaccggatcctgcagtacgccctgccgagacaggagtcccagcggccattcttttggattttcatggacaacttgctgctgaccgaggatgaccaggaaactaccactcggttcctgcagaccgaagccgtgaccctgcaggacgtgagaggccgggactaccagaacgccatgcgggtgtggtccaacatccctggactgaaaagcaagcacgcacctctgacccctaaagaagaggagtacctgcaggcccaggtgcggagcagaagcaagctggacgcccctaaggtggatctgctggtgaagaattgcctcctgcccctgagagagtacttcaagtatttcagccagaatagtctgcccctgggaggcagcggcggcggcatggccatgagccaggagagcctgaccttcaaggacgtgttcgtggacttcaccctggaggagtggcagcagctggacagcgcccagaagaacctgtacagggacgtgatgctggagaactacagccacctggtgagcgtgggctacctggtggagaagcccgacgtgatcttcaggctgggccccggcgaggagagctggatggccgacggcggcacccccgtgaggacctgcgccggcgagggcggcccaagcagcggcgcccctcctcccagcggcggcagcccagccggctccccaacctctaccgaggagggcacctctgagtccgccacccccgagagcggccctggcacctccaccgagcccagcgagggcagcgcacccggcagccctgccggcagccccacctccacagaggagggaaccagcaccgagcccagcgaaggcagcgccccaggcaccagcaccgagcctagtgagcaggagattaaacggatcaacaagatcagaagaagacttgtgaaagacagcaacaccaagaaggccggcaagacaggccccatgaaaaccctgctggttagagtgatgacacccgatctgagagagcggctggaaaacctgagaaagaagcctgaaaatatcccccagcccatcagcaatacatctagagccaacctgaataagctgctgaccgattacaccgaaatgaagaaggcgatcctgcatgtgtactgggaagagttccagaaggaccctgtgggcctgatgagccgggtggcccagcctgccagcaagaagatcgatcagaacaagctgaaacctgagatggacgagaagggcaacctgaccaccgccggctttgcctgctctcagtgtggccagcccctgttcgtgtacaagctggagcaggtgtctgagaagggcaaggcttacaccaactacttcggacggtgcaatgtggccgagcacgaaaagctgatcctgctggcccagctgaagcccgagaaggatagcgacgaagccgtgacatatagcctgggaaagtttgggcagagggccctggatttctacagcattcatgtgaccaaggagtccacccaccccgtgaagcccctggcccagatcgccggaaacagatacgcctccggacctgtgggaaaggccctgagcgacgcatgtatgggcacaatcgcctccttcctgtctaagtaccaggacatcatcatcgaacaccagaaggtggtgaagggcaaccagaagagactggagagcctgcgggagctggccggcaaggaaaacctggaataccctagcgtgaccctgccacctcagcctcacaccaaggagggcgttgatgcctacaacgaagtgatcgcccgggtgcgaatgtgggtgaacctgaacctgtggcagaagctgaagctaagcagagatgatgccaagcctctgctgagactgaagggattcccttcctttcctctggtcgagagacaggccaacgaagtggactggtgggacatggtgtgtaacgtgaagaagctgatcaacgagaaaaaggaggatggcaaggtgttttggcagaatctggctggctacaagagacaggaagccctgagaccatacctgagcagcgaggaagatcggaagaagggaaagaaattcgctcggtaccagctgggcgacctgctgctgcacctggaaaagaagcacggcgaggactggggaaaggtgtacgacgaggcctgggagcggattgacaagaaagtggaaggcctgagcaagcacatcaagctggaagaggaacggagaagcgaggacgcccagagcaaggccgccctgaccgactggctgcgggctaaggccagcttcgtgatcgagggcctgaaggaggccgacaaggacgagttctgcagatgcgagctgaagctgcagaagtggtacggggacctgcggggaaagcccttcgccatcgaagccgagaacagcatcctggacatcagcggcttcagcaagcagtacaactgtgccttcatctggcagaaggacggcgtgaagaagctgaacctgtacctgatcatcaactacttcaagggcggcaagctgcggttcaagaagatcaaacctgaagccttcgaagccaacagattctacaccgtgatcaacaaaaagagcggcgagatcgtgcccatggaggtgaacttcaacttcgacgaccccaacctgatcatcctgcctctggcctttggcaagagacagggcagagaattcatctggaacgacctgctgtccctggaaaccggcagcctgaagctggccaacggaagagtgatcgagaagacactgtacaacagaagaacccggcaggatgagcctgccctgttcgtggccctgaccttcgagcggcgggaggtcctggactcctccaatatcaaaccaatgaacctgatcggcgtggcaagaggcgaaaacatccccgccgtgatcgccctgaccgaccccgagggctgcccactgagccggtttaaggatagcctgggaaacccaacccacatcctgagaatcggcgagagctataaggagaagcagcggaccatccaggccaagaaggaggtggagcagcggagagccggcggctacagccggaagtacgccagcaaagccaagaatctggcagacgatatggtgagaaacaccgctagagatctgctgtactacgccgtgacccaggatgccatgctgatcttcgccaacctgagccggggcttcggccggcagggcaagcggaccttcatggccgagagacagtacacacggatggaggactggctgaccgccaagctggcctacgagggcctgagcaagacctacctgtccaagacactggcccagtacacctccaagacatgcagcaactgtgggtttaccatcaccagcgccgactacgacagggtgctggagaagctgaagaagacagcaacaggctggatgaccacaattaacggcaaggagctgaaggtggagggccagattacctactacaacagatacaagagacagaacgtagtcaaggacctgtccgtcgagctggatagactgagcgaagaatctgtgaacaacgacatctcctcctggacaaagggcagaagcggagaagctctgagcctcctgaagaaaagattctcccatagacccgtgcaggagaagttcgtgtgcctgaactgcggcttcgagacacacgcagccgagcaagccgccctgaacatcgccagatcctggctgttcctgcggagccaggagtacaagaaataccagacaaacaagacaaccggcaacaccgataagagagccttcgtcgagacctggcagtccttttaccggaagaagcttaaggaggtgtggaaacctgccgtgcggtctggcggatctggcggaggctccaccagccccaagaaaaagagaaaagtctaagctgccttctgcggggcttgccttctggccatgcccttcttctctcccttgcacctgtacctcttggtctttgaataaagcctgagtaggaaggctagcaaaaaaaaaaaaaaaaaaaaaaaaaaaaaaaaaaaaaaaaaaaaaaaaaaaaaaaaaaaaaaaaaaaaaaaaaaaaaaaa

SEQ ID NO: 13373 - RNA, 5785 nt, synthetic construct
  source 1..5785: mol_type = other RNA
aggaaataagagagaaaagaagagtaagaagaaatataagagccaccatggcccctaagaagaagcgtaaagtgagccggatggaacgcctcgtctacgaggtgcggcagaagtgcagaaacatcgaggacatctgcatctcctgcggatctctgaacgtgaccctggagcacccactgttcatcggcggcatgtgccagaactgtaaaaactgttttctggagtgtgcctatcaatacgacgatgacggctaccagagctactgcaccatctgttgcggcggaagagaggtgctgatgtgtggaaataacaactgctgccggtgcttctgcgtggaatgcgtggacctgctggtgggccccggcgccgcccaggccgctattaaggaagatccttggaactgctacatgtgcggccacaagggcacatacggcctgctgagacggagagaggactggcctagcagactgcagatgttcttcgccaataaccacgaccaggagttcgacccccctaaggtgtaccctcccgtccccgccgagaagagaaagcccatccgggtcctgagcctgttcgatggcatcgccaccggtctgctggtgctgaaggacctgggcatccaggtggataggtacattgcctccgaggtgtgcgaggactccatcaccgtgggaatggtgcgtcatcagggcaagatcatgtacgtgggcgacgtgcggagcgtgacacagaagcatatccaggagtggggccctttcgacctggtgatcggcggcagcccttgcaatgacctgagcatcgtgaacccagcccggaagggcctgtacgagggaaccggcagactgttcttcgagttttacagactgctgcacgacgcccggcctaaggaaggcgacgaccggcccttcttttggctgttcgagaatgtggtggccatgggagtcagcgacaagcgggatattagccggttcctggagagcaaccccgtgatgatcgatgccaaggaagtgagcgccgcccaccgggccagatacttctggggcaatctgcctggcatgaacagacccctggccagcaccgtgaacgacaagctggagctgcaggagtgcctggagcacggccggatcgccaagttcagcaaggtgagaaccatcaccacccgaagcaacagcatcaaacaaggcaaggaccagcactttcctgtgttcatgaacgagaaggaggacatcctgtggtgtaccgagatggagagagtgttcgggttcccagtccactacacagatgtcagcaacatgtctagactggccagacagagactgctgggaagaagctggtccgtccctgtgatcagacacctgttcgcccctctgaaggagtacttcgcctgcgtgagcagcggcaacagcaacgccaacagccggggccccagcttctctagcggcctggtgccactgtccctgagagggagccacatgggccccatggagatctacaaaaccgtgagcgcctggaagcggcagcctgtgcgcgtgctgagcctgtttcggaatatcgataaagtcctgaaaagcctgggattcctggagagcggctctggctccggcggtggcaccctgaagtacgtggaggatgtgacaaacgtggtcagacgggatgtggagaagtggggccccttcgatctggtgtacggcagcacccaacccctgggcagctcttgtgaccggtgccctggctggtacatgtttcagttccaccggatcctgcagtacgccctgccgagacaggagtcccagcggccattcttttggattttcatggacaacttgctgctgaccgaggatgaccaggaaactaccactcggttcctgcagaccgaagccgtgaccctgcaggacgtgagaggccgggactaccagaacgccatgcgggtgtggtccaacatccctggactgaaaagcaagcacgcacctctgacccctaaagaagaggagtacctgcaggcccaggtgcggagcagaagcaagctggacgcccctaaggtggatctgctggtgaagaattgcctcctgcccctgagagagtacttcaagtatttcagccagaatagtctgcccctgggaggcagcggcggcggcctgctgaccttcgaggacgtggccgtgagcttcagcgaggaggagtggaagctgctggaccccagccagaagatcctgtacaacgacgtgatgcaggagaactacgagaccgtgatcagcctgggcctgaagctgaagaacgacaccggcaacgaccagcccatcagcctgagcgccctggagatccaggccagcggcggcaaggtgctgaggaaggccaggatgaaggtggcccagaagaccggcggcccaagcagcggcgcccctcctcccagcggcggcagcccagccggctccccaacctctaccgaggagggcacctctgagtccgccacccccgagagcggccctggcacctccaccgagcccagcgagggcagcgcacccggcagccctgccggcagccccacctccacagaggagggaaccagcaccgagcccagcgaaggcagcgccccaggcaccagcaccgagcctagtgagcaggagattaaacggatcaacaagatcagaagaagacttgtgaaagacagcaacaccaagaaggccggcaagacaggccccatgaaaaccctgctggttagagtgatgacacccgatctgagagagcggctggaaaacctgagaaagaagcctgaaaatatcccccagcccatcagcaatacatctagagccaacctgaataagctgctgaccgattacaccgaaatgaagaaggcgatcctgcatgtgtactgggaagagttccagaaggaccctgtgggcctgatgagccgggtggcccagcctgccagcaagaagatcgatcagaacaagctgaaacctgagatggacgagaagggcaacctgaccaccgccggctttgcctgctctcagtgtggccagcccctgttcgtgtacaagctggagcaggtgtctgagaagggcaaggcttacaccaactacttcggacggtgcaatgtggccgagcacgaaaagctgatcctgctggcccagctgaagcccgagaaggatagcgacgaagccgtgacatatagcctgggaaagtttgggcagagggccctggatttctacagcattcatgtgaccaaggagtccacccaccccgtgaagcccctggcccagatcgccggaaacagatacgcctccggacctgtgggaaaggccctgagcgacgcatgtatgggcacaatcgcctccttcctgtctaagtaccaggacatcatcatcgaacaccagaaggtggtgaagggcaaccagaagagactggagagcctgcgggagctggccggcaaggaaaacctggaataccctagcgtgaccctgccacctcagcctcacaccaaggagggcgttgatgcctacaacgaagtgatcgcccgggtgcgaatgtgggtgaacctgaacctgtggcagaagctgaagctaagcagagatgatgccaagcctctgctgagactgaagggattcccttcctttcctctggtcgagagacaggccaacgaagtggactggtgggacatggtgtgtaacgtgaagaagctgatcaacgagaaaaaggaggatggcaaggtgttttggcagaatctggctggctacaagagacaggaagccctgagaccatacctgagcagcgaggaagatcggaagaagggaaagaaattcgctcggtaccagctgggcgacctgctgctgcacctggaaaagaagcacggcgaggactggggaaaggtgtacgacgaggcctgggagcggattgacaagaaagtggaaggcctgagcaagcacatcaagctggaagaggaacggagaagcgaggacgcccagagcaaggccgccctgaccgactggctgcgggctaaggccagcttcgtgatcgagggcctgaaggaggccgacaaggacgagttctgcagatgcgagctgaagctgcagaagtggtacggggacctgcggggaaagcccttcgccatcgaagccgagaacagcatcctggacatcagcggcttcagcaagcagtacaactgtgccttcatctggcagaaggacggcgtgaagaagctgaacctgtacctgatcatcaactacttcaagggcggcaagctgcggttcaagaagatcaaacctgaagccttcgaagccaacagattctacaccgtgatcaacaaaaagagcggcgagatcgtgcccatggaggtgaacttcaacttcgacgaccccaacctgatcatcctgcctctggcctttggcaagagacagggcagagaattcatctggaacgacctgctgtccctggaaaccggcagcctgaagctggccaacggaagagtgatcgagaagacactgtacaacagaagaacccggcaggatgagcctgccctgttcgtggccctgaccttcgagcggcgggaggtcctggactcctccaatatcaaaccaatgaacctgatcggcgtggcaagaggcgaaaacatccccgccgtgatcgccctgaccgaccccgagggctgcccactgagccggtttaaggatagcctgggaaacccaacccacatcctgagaatcggcgagagctataaggagaagcagcggaccatccaggccaagaaggaggtggagcagcggagagccggcggctacagccggaagtacgccagcaaagccaagaatctggcagacgatatggtgagaaacaccgctagagatctgctgtactacgccgtgacccaggatgccatgctgatcttcgccaacctgagccggggcttcggccggcagggcaagcggaccttcatggccgagagacagtacacacggatggaggactggctgaccgccaagctggcctacgagggcctgagcaagacctacctgtccaagacactggcccagtacacctccaagacatgcagcaactgtgggtttaccatcaccagcgccgactacgacagggtgctggagaagctgaagaagacagcaacaggctggatgaccacaattaacggcaaggagctgaaggtggagggccagattacctactacaacagatacaagagacagaacgtagtcaaggacctgtccgtcgagctggatagactgagcgaagaatctgtgaacaacgacatctcctcctggacaaagggcagaagcggagaagctctgagcctcctgaagaaaagattctcccatagacccgtgcaggagaagttcgtgtgcctgaactgcggcttcgagacacacgcagccgagcaagccgccctgaacatcgccagatcctggctgttcctgcggagccaggagtacaagaaataccagacaaacaagacaaccggcaacaccgataagagagccttcgtcgagacctggcagtccttttaccggaagaagcttaaggaggtgtggaaacctgccgtgcggtctggcggatctggcggaggctccaccagccccaagaaaaagagaaaagtctaagctgccttctgcggggcttgccttctggccatgcccttcttctctcccttgcacctgtacctcttggtctttgaataaagcctgagtaggaaggctagcaaaaaaaaaaaaaaaaaaaaaaaaaaaaaaaaaaaaaaaaaaaaaaaaaaaaaaaaaaaaaaaaaaaaaaaaaaaaaaaa

SEQ ID NO: 13374 - RNA, 5785 nt, synthetic construct
  source 1..5785: mol_type = other RNA
aggaaataagagagaaaagaagagtaagaagaaatataagagccaccatggcccctaagaagaagcgtaaagtgagccggatggaacgcctcgtctacgaggtgcggcagaagtgcagaaacatcgaggacatctgcatctcctgcggatctctgaacgtgaccctggagcacccactgttcatcggcggcatgtgccagaactgtaaaaactgttttctggagtgtgcctatcaatacgacgatgacggctaccagagctactgcaccatctgttgcggcggaagagaggtgctgatgtgtggaaataacaactgctgccggtgcttctgcgtggaatgcgtggacctgctggtgggccccggcgccgcccaggccgctattaaggaagatccttggaactgctacatgtgcggccacaagggcacatacggcctgctgagacggagagaggactggcctagcagactgcagatgttcttcgccaataaccacgaccaggagttcgacccccctaaggtgtaccctcccgtccccgccgagaagagaaagcccatccgggtcctgagcctgttcgatggcatcgccaccggtctgctggtgctgaaggacctgggcatccaggtggataggtacattgcctccgaggtgtgcgaggactccatcaccgtgggaatggtgcgtcatcagggcaagatcatgtacgtgggcgacgtgcggagcgtgacacagaagcatatccaggagtggggccctttcgacctggtgatcggcggcagcccttgcaatgacctgagcatcgtgaacccagcccggaagggcctgtacgagggaaccggcagactgttcttcgagttttacagactgctgcacgacgcccggcctaaggaaggcgacgaccggcccttcttttggctgttcgagaatgtggtggccatgggagtcagcgacaagcgggatattagccggttcctggagagcaaccccgtgatgatcgatgccaaggaagtgagcgccgcccaccgggccagatacttctggggcaatctgcctggcatgaacagacccctggccagcaccgtgaacgacaagctggagctgcaggagtgcctggagcacggccggatcgccaagttcagcaaggtgagaaccatcaccacccgaagcaacagcatcaaacaaggcaaggaccagcactttcctgtgttcatgaacgagaaggaggacatcctgtggtgtaccgagatggagagagtgttcgggttcccagtccactacacagatgtcagcaacatgtctagactggccagacagagactgctgggaagaagctggtccgtccctgtgatcagacacctgttcgcccctctgaaggagtacttcgcctgcgtgagcagcggcaacagcaacgccaacagccggggccccagcttctctagcggcctggtgccactgtccctgagagggagccacatgggccccatggagatctacaaaaccgtgagcgcctggaagcggcagcctgtgcgcgtgctgagcctgtttcggaatatcgataaagtcctgaaaagcctgggattcctggagagcggctctggctccggcggtggcaccctgaagtacgtggaggatgtgacaaacgtggtcagacgggatgtggagaagtggggccccttcgatctggtgtacggcagcacccaacccctgggcagctcttgtgaccggtgccctggctggtacatgtttcagttccaccggatcctgcagtacgccctgccgagacaggagtcccagcggccattcttttggattttcatggacaacttgctgctgaccgaggatgaccaggaaactaccactcggttcctgcagaccgaagccgtgaccctgcaggacgtgagaggccgggactaccagaacgccatgcgggtgtggtccaacatccctggactgaaaagcaagcacgcacctctgacccctaaagaagaggagtacctgcaggcccaggtgcggagcagaagcaagctggacgcccctaaggtggatctgctggtgaagaattgcctcctgcccctgagagagtacttcaagtatttcagccagaatagtctgcccctgggaggcagcggcggcggcgagcccgtgaccttcaaggacgtggccgtggtgttcagcgaggaggagctgggcctgctggacagcgtgcagaggaagctgtacagggacgtgaccctggagaacttcaggaacctggtgagcgtgggccacctgttcagcaagcccgacgtgatcagccagctggagagggaggagcagctgtggatgaccgagatccagacccagaggggcggccacagcgccgagaactgcgccgccaggggcggcccaagcagcggcgcccctcctcccagcggcggcagcccagccggctccccaacctctaccgaggagggcacctctgagtccgccacccccgagagcggccctggcacctccaccgagcccagcgagggcagcgcacccggcagccctgccggcagccccacctccacagaggagggaaccagcaccgagcccagcgaaggcagcgccccaggcaccagcaccgagcctagtgagcaggagattaaacggatcaacaagatcagaagaagacttgtgaaagacagcaacaccaagaaggccggcaagacaggccccatgaaaaccctgctggttagagtgatgacacccgatctgagagagcggctggaaaacctgagaaagaagcctgaaaatatcccccagcccatcagcaatacatctagagccaacctgaataagctgctgaccgattacaccgaaatgaagaaggcgatcctgcatgtgtactgggaagagttccagaaggaccctgtgggcctgatgagccgggtggcccagcctgccagcaagaagatcgatcagaacaagctgaaacctgagatggacgagaagggcaacctgaccaccgccggctttgcctgctctcagtgtggccagcccctgttcgtgtacaagctggagcaggtgtctgagaagggcaaggcttacaccaactacttcggacggtgcaatgtggccgagcacgaaaagctgatcctgctggcccagctgaagcccgagaaggatagcgacgaagccgtgacatatagcctgggaaagtttgggcagagggccctggatttctacagcattcatgtgaccaaggagtccacccaccccgtgaagcccctggcccagatcgccggaaacagatacgcctccggacctgtgggaaaggccctgagcgacgcatgtatgggcacaatcgcctccttcctgtctaagtaccaggacatcatcatcgaacaccagaaggtggtgaagggcaaccagaagagactggagagcctgcgggagctggccggcaaggaaaacctggaataccctagcgtgaccctgccacctcagcctcacaccaaggagggcgttgatgcctacaacgaagtgatcgcccgggtgcgaatgtgggtgaacctgaacctgtggcagaagctgaagctaagcagagatgatgccaagcctctgctgagactgaagggattcccttcctttcctctggtcgagagacaggccaacgaagtggactggtgggacatggtgtgtaacgtgaagaagctgatcaacgagaaaaaggaggatggcaaggtgttttggcagaatctggctggctacaagagacaggaagccctgagaccatacctgagcagcgaggaagatcggaagaagggaaagaaattcgctcggtaccagctgggcgacctgctgctgcacctggaaaagaagcacggcgaggactggggaaaggtgtacgacgaggcctgggagcggattgacaagaaagtggaaggcctgagcaagcacatcaagctggaagaggaacggagaagcgaggacgcccagagcaaggccgccctgaccgactggctgcgggctaaggccagcttcgtgatcgagggcctgaaggaggccgacaaggacgagttctgcagatgcgagctgaagctgcagaagtggtacggggacctgcggggaaagcccttcgccatcgaagccgagaacagcatcctggacatcagcggcttcagcaagcagtacaactgtgccttcatctggcagaaggacggcgtgaagaagctgaacctgtacctgatcatcaactacttcaagggcggcaagctgcggttcaagaagatcaaacctgaagccttcgaagccaacagattctacaccgtgatcaacaaaaagagcggcgagatcgtgcccatggaggtgaacttcaacttcgacgaccccaacctgatcatcctgcctctggcctttggcaagagacagggcagagaattcatctggaacgacctgctgtccctggaaaccggcagcctgaagctggccaacggaagagtgatcgagaagacactgtacaacagaagaacccggcaggatgagcctgccctgttcgtggccctgaccttcgagcggcgggaggtcctggactcctccaatatcaaaccaatgaacctgatcggcgtggcaagaggcgaaaacatccccgccgtgatcgccctgaccgaccccgagggctgcccactgagccggtttaaggatagcctgggaaacccaacccacatcctgagaatcggcgagagctataaggagaagcagcggaccatccaggccaagaaggaggtggagcagcggagagccggcggctacagccggaagtacgccagcaaagccaagaatctggcagacgatatggtgagaaacaccgctagagatctgctgtactacgccgtgacccaggatgccatgctgatcttcgccaacctgagccggggcttcggccggcagggcaagcggaccttcatggccgagagacagtacacacggatggaggactggctgaccgccaagctggcctacgagggcctgagcaagacctacctgtccaagacactggcccagtacacctccaagacatgcagcaactgtgggtttaccatcaccagcgccgactacgacagggtgctggagaagctgaagaagacagcaacaggctggatgaccacaattaacggcaaggagctgaaggtggagggccagattacctactacaacagatacaagagacagaacgtagtcaaggacctgtccgtcgagctggatagactgagcgaagaatctgtgaacaacgacatctcctcctggacaaagggcagaagcggagaagctctgagcctcctgaagaaaagattctcccatagacccgtgcaggagaagttcgtgtgcctgaactgcggcttcgagacacacgcagccgagcaagccgccctgaacatcgccagatcctggctgttcctgcggagccaggagtacaagaaataccagacaaacaagacaaccggcaacaccgataagagagccttcgtcgagacctggcagtccttttaccggaagaagcttaaggaggtgtggaaacctgccgtgcggtctggcggatctggcggaggctccaccagccccaagaaaaagagaaaagtctaagctgccttctgcggggcttgccttctggccatgcccttcttctctcccttgcacctgtacctcttggtctttgaataaagcctgagtaggaaggctagcaaaaaaaaaaaaaaaaaaaaaaaaaaaaaaaaaaaaaaaaaaaaaaaaaaaaaaaaaaaaaaaaaaaaaaaaaaaaaaaa

SEQ ID NO: 13375 - RNA, 5785 nt, synthetic construct
  source 1..5785: mol_type = other RNA
aggaaataagagagaaaagaagagtaagaagaaatataagagccaccatggcccctaagaagaagcgtaaagtgagccggatggaacgcctcgtctacgaggtgcggcagaagtgcagaaacatcgaggacatctgcatctcctgcggatctctgaacgtgaccctggagcacccactgttcatcggcggcatgtgccagaactgtaaaaactgttttctggagtgtgcctatcaatacgacgatgacggctaccagagctactgcaccatctgttgcggcggaagagaggtgctgatgtgtggaaataacaactgctgccggtgcttctgcgtggaatgcgtggacctgctggtgggccccggcgccgcccaggccgctattaaggaagatccttggaactgctacatgtgcggccacaagggcacatacggcctgctgagacggagagaggactggcctagcagactgcagatgttcttcgccaataaccacgaccaggagttcgacccccctaaggtgtaccctcccgtccccgccgagaagagaaagcccatccgggtcctgagcctgttcgatggcatcgccaccggtctgctggtgctgaaggacctgggcatccaggtggataggtacattgcctccgaggtgtgcgaggactccatcaccgtgggaatggtgcgtcatcagggcaagatcatgtacgtgggcgacgtgcggagcgtgacacagaagcatatccaggagtggggccctttcgacctggtgatcggcggcagcccttgcaatgacctgagcatcgtgaacccagcccggaagggcctgtacgagggaaccggcagactgttcttcgagttttacagactgctgcacgacgcccggcctaaggaaggcgacgaccggcccttcttttggctgttcgagaatgtggtggccatgggagtcagcgacaagcgggatattagccggttcctggagagcaaccccgtgatgatcgatgccaaggaagtgagcgccgcccaccgggccagatacttctggggcaatctgcctggcatgaacagacccctggccagcaccgtgaacgacaagctggagctgcaggagtgcctggagcacggccggatcgccaagttcagcaaggtgagaaccatcaccacccgaagcaacagcatcaaacaaggcaaggaccagcactttcctgtgttcatgaacgagaaggaggacatcctgtggtgtaccgagatggagagagtgttcgggttcccagtccactacacagatgtcagcaacatgtctagactggccagacagagactgctgggaagaagctggtccgtccctgtgatcagacacctgttcgcccctctgaaggagtacttcgcctgcgtgagcagcggcaacagcaacgccaacagccggggccccagcttctctagcggcctggtgccactgtccctgagagggagccacatgggccccatggagatctacaaaaccgtgagcgcctggaagcggcagcctgtgcgcgtgctgagcctgtttcggaatatcgataaagtcctgaaaagcctgggattcctggagagcggctctggctccggcggtggcaccctgaagtacgtggaggatgtgacaaacgtggtcagacgggatgtggagaagtggggccccttcgatctggtgtacggcagcacccaacccctgggcagctcttgtgaccggtgccctggctggtacatgtttcagttccaccggatcctgcagtacgccctgccgagacaggagtcccagcggccattcttttggattttcatggacaacttgctgctgaccgaggatgaccaggaaactaccactcggttcctgcagaccgaagccgtgaccctgcaggacgtgagaggccgggactaccagaacgccatgcgggtgtggtccaacatccctggactgaaaagcaagcacgcacctctgacccctaaagaagaggagtacctgcaggcccaggtgcggagcagaagcaagctggacgcccctaaggtggatctgctggtgaagaattgcctcctgcccctgagagagtacttcaagtatttcagccagaatagtctgcccctgggaggcagcggcggcggcttccagggcctggtgaccttccaggacgtggccgtgatcttcagcctggacgagtggggccacctggaccccgcccagagggagctgtacagggaggtgatgctggagaactaccagaccctggcctgcctgggcctggccgtgagcaagcccgacgtgatcgcccagctggagcagggcggcgccccctggaagctggagaaggacatccccgccagcccctgccccggcgagcagtacgtgggcggcccaagcagcggcgcccctcctcccagcggcggcagcccagccggctccccaacctctaccgaggagggcacctctgagtccgccacccccgagagcggccctggcacctccaccgagcccagcgagggcagcgcacccggcagccctgccggcagccccacctccacagaggagggaaccagcaccgagcccagcgaaggcagcgccccaggcaccagcaccgagcctagtgagcaggagattaaacggatcaacaagatcagaagaagacttgtgaaagacagcaacaccaagaaggccggcaagacaggccccatgaaaaccctgctggttagagtgatgacacccgatctgagagagcggctggaaaacctgagaaagaagcctgaaaatatcccccagcccatcagcaatacatctagagccaacctgaataagctgctgaccgattacaccgaaatgaagaaggcgatcctgcatgtgtactgggaagagttccagaaggaccctgtgggcctgatgagccgggtggcccagcctgccagcaagaagatcgatcagaacaagctgaaacctgagatggacgagaagggcaacctgaccaccgccggctttgcctgctctcagtgtggccagcccctgttcgtgtacaagctggagcaggtgtctgagaagggcaaggcttacaccaactacttcggacggtgcaatgtggccgagcacgaaaagctgatcctgctggcccagctgaagcccgagaaggatagcgacgaagccgtgacatatagcctgggaaagtttgggcagagggccctggatttctacagcattcatgtgaccaaggagtccacccaccccgtgaagcccctggcccagatcgccggaaacagatacgcctccggacctgtgggaaaggccctgagcgacgcatgtatgggcacaatcgcctccttcctgtctaagtaccaggacatcatcatcgaacaccagaaggtggtgaagggcaaccagaagagactggagagcctgcgggagctggccggcaaggaaaacctggaataccctagcgtgaccctgccacctcagcctcacaccaaggagggcgttgatgcctacaacgaagtgatcgcccgggtgcgaatgtgggtgaacctgaacctgtggcagaagctgaagctaagcagagatgatgccaagcctctgctgagactgaagggattcccttcctttcctctggtcgagagacaggccaacgaagtggactggtgggacatggtgtgtaacgtgaagaagctgatcaacgagaaaaaggaggatggcaaggtgttttggcagaatctggctggctacaagagacaggaagccctgagaccatacctgagcagcgaggaagatcggaagaagggaaagaaattcgctcggtaccagctgggcgacctgctgctgcacctggaaaagaagcacggcgaggactggggaaaggtgtacgacgaggcctgggagcggattgacaagaaagtggaaggcctgagcaagcacatcaagctggaagaggaacggagaagcgaggacgcccagagcaaggccgccctgaccgactggctgcgggctaaggccagcttcgtgatcgagggcctgaaggaggccgacaaggacgagttctgcagatgcgagctgaagctgcagaagtggtacggggacctgcggggaaagcccttcgccatcgaagccgagaacagcatcctggacatcagcggcttcagcaagcagtacaactgtgccttcatctggcagaaggacggcgtgaagaagctgaacctgtacctgatcatcaactacttcaagggcggcaagctgcggttcaagaagatcaaacctgaagccttcgaagccaacagattctacaccgtgatcaacaaaaagagcggcgagatcgtgcccatggaggtgaacttcaacttcgacgaccccaacctgatcatcctgcctctggcctttggcaagagacagggcagagaattcatctggaacgacctgctgtccctggaaaccggcagcctgaagctggccaacggaagagtgatcgagaagacactgtacaacagaagaacccggcaggatgagcctgccctgttcgtggccctgaccttcgagcggcgggaggtcctggactcctccaatatcaaaccaatgaacctgatcggcgtggcaagaggcgaaaacatccccgccgtgatcgccctgaccgaccccgagggctgcccactgagccggtttaaggatagcctgggaaacccaacccacatcctgagaatcggcgagagctataaggagaagcagcggaccatccaggccaagaaggaggtggagcagcggagagccggcggctacagccggaagtacgccagcaaagccaagaatctggcagacgatatggtgagaaacaccgctagagatctgctgtactacgccgtgacccaggatgccatgctgatcttcgccaacctgagccggggcttcggccggcagggcaagcggaccttcatggccgagagacagtacacacggatggaggactggctgaccgccaagctggcctacgagggcctgagcaagacctacctgtccaagacactggcccagtacacctccaagacatgcagcaactgtgggtttaccatcaccagcgccgactacgacagggtgctggagaagctgaagaagacagcaacaggctggatgaccacaattaacggcaaggagctgaaggtggagggccagattacctactacaacagatacaagagacagaacgtagtcaaggacctgtccgtcgagctggatagactgagcgaagaatctgtgaacaacgacatctcctcctggacaaagggcagaagcggagaagctctgagcctcctgaagaaaagattctcccatagacccgtgcaggagaagttcgtgtgcctgaactgcggcttcgagacacacgcagccgagcaagccgccctgaacatcgccagatcctggctgttcctgcggagccaggagtacaagaaataccagacaaacaagacaaccggcaacaccgataagagagccttcgtcgagacctggcagtccttttaccggaagaagcttaaggaggtgtggaaacctgccgtgcggtctggcggatctggcggaggctccaccagccccaagaaaaagagaaaagtctaagctgccttctgcggggcttgccttctggccatgcccttcttctctcccttgcacctgtacctcttggtctttgaataaagcctgagtaggaaggctagcaaaaaaaaaaaaaaaaaaaaaaaaaaaaaaaaaaaaaaaaaaaaaaaaaaaaaaaaaaaaaaaaaaaaaaaaaaaaaaaa

SEQ ID NO: 13376 - RNA, 5785 nt, synthetic construct
  source 1..5785: mol_type = other RNA
aggaaataagagagaaaagaagagtaagaagaaatataagagccaccatggcccctaagaagaagcgtaaagtgagccggatggaacgcctcgtctacgaggtgcggcagaagtgcagaaacatcgaggacatctgcatctcctgcggatctctgaacgtgaccctggagcacccactgttcatcggcggcatgtgccagaactgtaaaaactgttttctggagtgtgcctatcaatacgacgatgacggctaccagagctactgcaccatctgttgcggcggaagagaggtgctgatgtgtggaaataacaactgctgccggtgcttctgcgtggaatgcgtggacctgctggtgggccccggcgccgcccaggccgctattaaggaagatccttggaactgctacatgtgcggccacaagggcacatacggcctgctgagacggagagaggactggcctagcagactgcagatgttcttcgccaataaccacgaccaggagttcgacccccctaaggtgtaccctcccgtccccgccgagaagagaaagcccatccgggtcctgagcctgttcgatggcatcgccaccggtctgctggtgctgaaggacctgggcatccaggtggataggtacattgcctccgaggtgtgcgaggactccatcaccgtgggaatggtgcgtcatcagggcaagatcatgtacgtgggcgacgtgcggagcgtgacacagaagcatatccaggagtggggccctttcgacctggtgatcggcggcagcccttgcaatgacctgagcatcgtgaacccagcccggaagggcctgtacgagggaaccggcagactgttcttcgagttttacagactgctgcacgacgcccggcctaaggaaggcgacgaccggcccttcttttggctgttcgagaatgtggtggccatgggagtcagcgacaagcgggatattagccggttcctggagagcaaccccgtgatgatcgatgccaaggaagtgagcgccgcccaccgggccagatacttctggggcaatctgcctggcatgaacagacccctggccagcaccgtgaacgacaagctggagctgcaggagtgcctggagcacggccggatcgccaagttcagcaaggtgagaaccatcaccacccgaagcaacagcatcaaacaaggcaaggaccagcactttcctgtgttcatgaacgagaaggaggacatcctgtggtgtaccgagatggagagagtgttcgggttcccagtccactacacagatgtcagcaacatgtctagactggccagacagagactgctgggaagaagctggtccgtccctgtgatcagacacctgttcgcccctctgaaggagtacttcgcctgcgtgagcagcggcaacagcaacgccaacagccggggccccagcttctctagcggcctggtgccactgtccctgagagggagccacatgggccccatggagatctacaaaaccgtgagcgcctggaagcggcagcctgtgcgcgtgctgagcctgtttcggaatatcgataaagtcctgaaaagcctgggattcctggagagcggctctggctccggcggtggcaccctgaagtacgtggaggatgtgacaaacgtggtcagacgggatgtggagaagtggggccccttcgatctggtgtacggcagcacccaacccctgggcagctcttgtgaccggtgccctggctggtacatgtttcagttccaccggatcctgcagtacgccctgccgagacaggagtcccagcggccattcttttggattttcatggacaacttgctgctgaccgaggatgaccaggaaactaccactcggttcctgcagaccgaagccgtgaccctgcaggacgtgagaggccgggactaccagaacgccatgcgggtgtggtccaacatccctggactgaaaagcaagcacgcacctctgacccctaaagaagaggagtacctgcaggcccaggtgcggagcagaagcaagctggacgcccctaaggtggatctgctggtgaagaattgcctcctgcccctgagagagtacttcaagtatttcagccagaatagtctgcccctgggaggcagcggcggcggcacccagggccaggtgaccttcagggacgtggccatcgagttcagccaggaggagtggacctgcctggaccccgcccagaggagcctgtacagggacgtgatgctggagaactacaggaacctggccagcctgggcatcagctgcttcgacctgagcatcatcagcatgctggagcagaggaaggagcccttcaccctggagagccaggtgcagatcgccggcaaccccgacggctgggagtggggcggcccaagcagcggcgcccctcctcccagcggcggcagcccagccggctccccaacctctaccgaggagggcacctctgagtccgccacccccgagagcggccctggcacctccaccgagcccagcgagggcagcgcacccggcagccctgccggcagccccacctccacagaggagggaaccagcaccgagcccagcgaaggcagcgccccaggcaccagcaccgagcctagtgagcaggagattaaacggatcaacaagatcagaagaagacttgtgaaagacagcaacaccaagaaggccggcaagacaggccccatgaaaaccctgctggttagagtgatgacacccgatctgagagagcggctggaaaacctgagaaagaagcctgaaaatatcccccagcccatcagcaatacatctagagccaacctgaataagctgctgaccgattacaccgaaatgaagaaggcgatcctgcatgtgtactgggaagagttccagaaggaccctgtgggcctgatgagccgggtggcccagcctgccagcaagaagatcgatcagaacaagctgaaacctgagatggacgagaagggcaacctgaccaccgccggctttgcctgctctcagtgtggccagcccctgttcgtgtacaagctggagcaggtgtctgagaagggcaaggcttacaccaactacttcggacggtgcaatgtggccgagcacgaaaagctgatcctgctggcccagctgaagcccgagaaggatagcgacgaagccgtgacatatagcctgggaaagtttgggcagagggccctggatttctacagcattcatgtgaccaaggagtccacccaccccgtgaagcccctggcccagatcgccggaaacagatacgcctccggacctgtgggaaaggccctgagcgacgcatgtatgggcacaatcgcctccttcctgtctaagtaccaggacatcatcatcgaacaccagaaggtggtgaagggcaaccagaagagactggagagcctgcgggagctggccggcaaggaaaacctggaataccctagcgtgaccctgccacctcagcctcacaccaaggagggcgttgatgcctacaacgaagtgatcgcccgggtgcgaatgtgggtgaacctgaacctgtggcagaagctgaagctaagcagagatgatgccaagcctctgctgagactgaagggattcccttcctttcctctggtcgagagacaggccaacgaagtggactggtgggacatggtgtgtaacgtgaagaagctgatcaacgagaaaaaggaggatggcaaggtgttttggcagaatctggctggctacaagagacaggaagccctgagaccatacctgagcagcgaggaagatcggaagaagggaaagaaattcgctcggtaccagctgggcgacctgctgctgcacctggaaaagaagcacggcgaggactggggaaaggtgtacgacgaggcctgggagcggattgacaagaaagtggaaggcctgagcaagcacatcaagctggaagaggaacggagaagcgaggacgcccagagcaaggccgccctgaccgactggctgcgggctaaggccagcttcgtgatcgagggcctgaaggaggccgacaaggacgagttctgcagatgcgagctgaagctgcagaagtggtacggggacctgcggggaaagcccttcgccatcgaagccgagaacagcatcctggacatcagcggcttcagcaagcagtacaactgtgccttcatctggcagaaggacggcgtgaagaagctgaacctgtacctgatcatcaactacttcaagggcggcaagctgcggttcaagaagatcaaacctgaagccttcgaagccaacagattctacaccgtgatcaacaaaaagagcggcgagatcgtgcccatggaggtgaacttcaacttcgacgaccccaacctgatcatcctgcctctggcctttggcaagagacagggcagagaattcatctggaacgacctgctgtccctggaaaccggcagcctgaagctggccaacggaagagtgatcgagaagacactgtacaacagaagaacccggcaggatgagcctgccctgttcgtggccctgaccttcgagcggcgggaggtcctggactcctccaatatcaaaccaatgaacctgatcggcgtggcaagaggcgaaaacatccccgccgtgatcgccctgaccgaccccgagggctgcccactgagccggtttaaggatagcctgggaaacccaacccacatcctgagaatcggcgagagctataaggagaagcagcggaccatccaggccaagaaggaggtggagcagcggagagccggcggctacagccggaagtacgccagcaaagccaagaatctggcagacgatatggtgagaaacaccgctagagatctgctgtactacgccgtgacccaggatgccatgctgatcttcgccaacctgagccggggcttcggccggcagggcaagcggaccttcatggccgagagacagtacacacggatggaggactggctgaccgccaagctggcctacgagggcctgagcaagacctacctgtccaagacactggcccagtacacctccaagacatgcagcaactgtgggtttaccatcaccagcgccgactacgacagggtgctggagaagctgaagaagacagcaacaggctggatgaccacaattaacggcaaggagctgaaggtggagggccagattacctactacaacagatacaagagacagaacgtagtcaaggacctgtccgtcgagctggatagactgagcgaagaatctgtgaacaacgacatctcctcctggacaaagggcagaagcggagaagctctgagcctcctgaagaaaagattctcccatagacccgtgcaggagaagttcgtgtgcctgaactgcggcttcgagacacacgcagccgagcaagccgccctgaacatcgccagatcctggctgttcctgcggagccaggagtacaagaaataccagacaaacaagacaaccggcaacaccgataagagagccttcgtcgagacctggcagtccttttaccggaagaagcttaaggaggtgtggaaacctgccgtgcggtctggcggatctggcggaggctccaccagccccaagaaaaagagaaaagtctaagctgccttctgcggggcttgccttctggccatgcccttcttctctcccttgcacctgtacctcttggtctttgaataaagcctgagtaggaaggctagcaaaaaaaaaaaaaaaaaaaaaaaaaaaaaaaaaaaaaaaaaaaaaaaaaaaaaaaaaaaaaaaaaaaaaaaaaaaaaaaa

SEQ ID NO: 13377 - RNA, 5785 nt, synthetic construct
  source 1..5785: mol_type = other RNA
aggaaataagagagaaaagaagagtaagaagaaatataagagccaccatggcccctaagaagaagcgtaaagtgagccggatggaacgcctcgtctacgaggtgcggcagaagtgcagaaacatcgaggacatctgcatctcctgcggatctctgaacgtgaccctggagcacccactgttcatcggcggcatgtgccagaactgtaaaaactgttttctggagtgtgcctatcaatacgacgatgacggctaccagagctactgcaccatctgttgcggcggaagagaggtgctgatgtgtggaaataacaactgctgccggtgcttctgcgtggaatgcgtggacctgctggtgggccccggcgccgcccaggccgctattaaggaagatccttggaactgctacatgtgcggccacaagggcacatacggcctgctgagacggagagaggactggcctagcagactgcagatgttcttcgccaataaccacgaccaggagttcgacccccctaaggtgtaccctcccgtccccgccgagaagagaaagcccatccgggtcctgagcctgttcgatggcatcgccaccggtctgctggtgctgaaggacctgggcatccaggtggataggtacattgcctccgaggtgtgcgaggactccatcaccgtgggaatggtgcgtcatcagggcaagatcatgtacgtgggcgacgtgcggagcgtgacacagaagcatatccaggagtggggccctttcgacctggtgatcggcggcagcccttgcaatgacctgagcatcgtgaacccagcccggaagggcctgtacgagggaaccggcagactgttcttcgagttttacagactgctgcacgacgcccggcctaaggaaggcgacgaccggcccttcttttggctgttcgagaatgtggtggccatgggagtcagcgacaagcgggatattagccggttcctggagagcaaccccgtgatgatcgatgccaaggaagtgagcgccgcccaccgggccagatacttctggggcaatctgcctggcatgaacagacccctggccagcaccgtgaacgacaagctggagctgcaggagtgcctggagcacggccggatcgccaagttcagcaaggtgagaaccatcaccacccgaagcaacagcatcaaacaaggcaaggaccagcactttcctgtgttcatgaacgagaaggaggacatcctgtggtgtaccgagatggagagagtgttcgggttcccagtccactacacagatgtcagcaacatgtctagactggccagacagagactgctgggaagaagctggtccgtccctgtgatcagacacctgttcgcccctctgaaggagtacttcgcctgcgtgagcagcggcaacagcaacgccaacagccggggccccagcttctctagcggcctggtgccactgtccctgagagggagccacatgggccccatggagatctacaaaaccgtgagcgcctggaagcggcagcctgtgcgcgtgctgagcctgtttcggaatatcgataaagtcctgaaaagcctgggattcctggagagcggctctggctccggcggtggcaccctgaagtacgtggaggatgtgacaaacgtggtcagacgggatgtggagaagtggggccccttcgatctggtgtacggcagcacccaacccctgggcagctcttgtgaccggtgccctggctggtacatgtttcagttccaccggatcctgcagtacgccctgccgagacaggagtcccagcggccattcttttggattttcatggacaacttgctgctgaccgaggatgaccaggaaactaccactcggttcctgcagaccgaagccgtgaccctgcaggacgtgagaggccgggactaccagaacgccatgcgggtgtggtccaacatccctggactgaaaagcaagcacgcacctctgacccctaaagaagaggagtacctgcaggcccaggtgcggagcagaagcaagctggacgcccctaaggtggatctgctggtgaagaattgcctcctgcccctgagagagtacttcaagtatttcagccagaatagtctgcccctgggaggcagcggcggcggcgacagggtgaagttcaccttcagcgacgtggccgtgtacttcagcgaggaggagtggcagctgctggaggagcagcagaaggagctgtacaggaacgtgatgaaggagaactacaccaccctgaccagcctgggctacaccaccgtgaagcccgacgtgatcagcaagatcgagcagggcaagcagcccagcgtgagcagccccagcggcagcaagggcaggagggccgtgggcaggcccaccggcggcccaagcagcggcgcccctcctcccagcggcggcagcccagccggctccccaacctctaccgaggagggcacctctgagtccgccacccccgagagcggccctggcacctccaccgagcccagcgagggcagcgcacccggcagccctgccggcagccccacctccacagaggagggaaccagcaccgagcccagcgaaggcagcgccccaggcaccagcaccgagcctagtgagcaggagattaaacggatcaacaagatcagaagaagacttgtgaaagacagcaacaccaagaaggccggcaagacaggccccatgaaaaccctgctggttagagtgatgacacccgatctgagagagcggctggaaaacctgagaaagaagcctgaaaatatcccccagcccatcagcaatacatctagagccaacctgaataagctgctgaccgattacaccgaaatgaagaaggcgatcctgcatgtgtactgggaagagttccagaaggaccctgtgggcctgatgagccgggtggcccagcctgccagcaagaagatcgatcagaacaagctgaaacctgagatggacgagaagggcaacctgaccaccgccggctttgcctgctctcagtgtggccagcccctgttcgtgtacaagctggagcaggtgtctgagaagggcaaggcttacaccaactacttcggacggtgcaatgtggccgagcacgaaaagctgatcctgctggcccagctgaagcccgagaaggatagcgacgaagccgtgacatatagcctgggaaagtttgggcagagggccctggatttctacagcattcatgtgaccaaggagtccacccaccccgtgaagcccctggcccagatcgccggaaacagatacgcctccggacctgtgggaaaggccctgagcgacgcatgtatgggcacaatcgcctccttcctgtctaagtaccaggacatcatcatcgaacaccagaaggtggtgaagggcaaccagaagagactggagagcctgcgggagctggccggcaaggaaaacctggaataccctagcgtgaccctgccacctcagcctcacaccaaggagggcgttgatgcctacaacgaagtgatcgcccgggtgcgaatgtgggtgaacctgaacctgtggcagaagctgaagctaagcagagatgatgccaagcctctgctgagactgaagggattcccttcctttcctctggtcgagagacaggccaacgaagtggactggtgggacatggtgtgtaacgtgaagaagctgatcaacgagaaaaaggaggatggcaaggtgttttggcagaatctggctggctacaagagacaggaagccctgagaccatacctgagcagcgaggaagatcggaagaagggaaagaaattcgctcggtaccagctgggcgacctgctgctgcacctggaaaagaagcacggcgaggactggggaaaggtgtacgacgaggcctgggagcggattgacaagaaagtggaaggcctgagcaagcacatcaagctggaagaggaacggagaagcgaggacgcccagagcaaggccgccctgaccgactggctgcgggctaaggccagcttcgtgatcgagggcctgaaggaggccgacaaggacgagttctgcagatgcgagctgaagctgcagaagtggtacggggacctgcggggaaagcccttcgccatcgaagccgagaacagcatcctggacatcagcggcttcagcaagcagtacaactgtgccttcatctggcagaaggacggcgtgaagaagctgaacctgtacctgatcatcaactacttcaagggcggcaagctgcggttcaagaagatcaaacctgaagccttcgaagccaacagattctacaccgtgatcaacaaaaagagcggcgagatcgtgcccatggaggtgaacttcaacttcgacgaccccaacctgatcatcctgcctctggcctttggcaagagacagggcagagaattcatctggaacgacctgctgtccctggaaaccggcagcctgaagctggccaacggaagagtgatcgagaagacactgtacaacagaagaacccggcaggatgagcctgccctgttcgtggccctgaccttcgagcggcgggaggtcctggactcctccaatatcaaaccaatgaacctgatcggcgtggcaagaggcgaaaacatccccgccgtgatcgccctgaccgaccccgagggctgcccactgagccggtttaaggatagcctgggaaacccaacccacatcctgagaatcggcgagagctataaggagaagcagcggaccatccaggccaagaaggaggtggagcagcggagagccggcggctacagccggaagtacgccagcaaagccaagaatctggcagacgatatggtgagaaacaccgctagagatctgctgtactacgccgtgacccaggatgccatgctgatcttcgccaacctgagccggggcttcggccggcagggcaagcggaccttcatggccgagagacagtacacacggatggaggactggctgaccgccaagctggcctacgagggcctgagcaagacctacctgtccaagacactggcccagtacacctccaagacatgcagcaactgtgggtttaccatcaccagcgccgactacgacagggtgctggagaagctgaagaagacagcaacaggctggatgaccacaattaacggcaaggagctgaaggtggagggccagattacctactacaacagatacaagagacagaacgtagtcaaggacctgtccgtcgagctggatagactgagcgaagaatctgtgaacaacgacatctcctcctggacaaagggcagaagcggagaagctctgagcctcctgaagaaaagattctcccatagacccgtgcaggagaagttcgtgtgcctgaactgcggcttcgagacacacgcagccgagcaagccgccctgaacatcgccagatcctggctgttcctgcggagccaggagtacaagaaataccagacaaacaagacaaccggcaacaccgataagagagccttcgtcgagacctggcagtccttttaccggaagaagcttaaggaggtgtggaaacctgccgtgcggtctggcggatctggcggaggctccaccagccccaagaaaaagagaaaagtctaagctgccttctgcggggcttgccttctggccatgcccttcttctctcccttgcacctgtacctcttggtctttgaataaagcctgagtaggaaggctagcaaaaaaaaaaaaaaaaaaaaaaaaaaaaaaaaaaaaaaaaaaaaaaaaaaaaaaaaaaaaaaaaaaaaaaaaaaaaaaaa

SEQ ID NO: 13378 - RNA, 5785 nt, synthetic construct
  source 1..5785: mol_type = other RNA
aggaaataagagagaaaagaagagtaagaagaaatataagagccaccatggcccctaagaagaagcgtaaagtgagccggatggaacgcctcgtctacgaggtgcggcagaagtgcagaaacatcgaggacatctgcatctcctgcggatctctgaacgtgaccctggagcacccactgttcatcggcggcatgtgccagaactgtaaaaactgttttctggagtgtgcctatcaatacgacgatgacggctaccagagctactgcaccatctgttgcggcggaagagaggtgctgatgtgtggaaataacaactgctgccggtgcttctgcgtggaatgcgtggacctgctggtgggccccggcgccgcccaggccgctattaaggaagatccttggaactgctacatgtgcggccacaagggcacatacggcctgctgagacggagagaggactggcctagcagactgcagatgttcttcgccaataaccacgaccaggagttcgacccccctaaggtgtaccctcccgtccccgccgagaagagaaagcccatccgggtcctgagcctgttcgatggcatcgccaccggtctgctggtgctgaaggacctgggcatccaggtggataggtacattgcctccgaggtgtgcgaggactccatcaccgtgggaatggtgcgtcatcagggcaagatcatgtacgtgggcgacgtgcggagcgtgacacagaagcatatccaggagtggggccctttcgacctggtgatcggcggcagcccttgcaatgacctgagcatcgtgaacccagcccggaagggcctgtacgagggaaccggcagactgttcttcgagttttacagactgctgcacgacgcccggcctaaggaaggcgacgaccggcccttcttttggctgttcgagaatgtggtggccatgggagtcagcgacaagcgggatattagccggttcctggagagcaaccccgtgatgatcgatgccaaggaagtgagcgccgcccaccgggccagatacttctggggcaatctgcctggcatgaacagacccctggccagcaccgtgaacgacaagctggagctgcaggagtgcctggagcacggccggatcgccaagttcagcaaggtgagaaccatcaccacccgaagcaacagcatcaaacaaggcaaggaccagcactttcctgtgttcatgaacgagaaggaggacatcctgtggtgtaccgagatggagagagtgttcgggttcccagtccactacacagatgtcagcaacatgtctagactggccagacagagactgctgggaagaagctggtccgtccctgtgatcagacacctgttcgcccctctgaaggagtacttcgcctgcgtgagcagcggcaacagcaacgccaacagccggggccccagcttctctagcggcctggtgccactgtccctgagagggagccacatgggccccatggagatctacaaaaccgtgagcgcctggaagcggcagcctgtgcgcgtgctgagcctgtttcggaatatcgataaagtcctgaaaagcctgggattcctggagagcggctctggctccggcggtggcaccctgaagtacgtggaggatgtgacaaacgtggtcagacgggatgtggagaagtggggccccttcgatctggtgtacggcagcacccaacccctgggcagctcttgtgaccggtgccctggctggtacatgtttcagttccaccggatcctgcagtacgccctgccgagacaggagtcccagcggccattcttttggattttcatggacaacttgctgctgaccgaggatgaccaggaaactaccactcggttcctgcagaccgaagccgtgaccctgcaggacgtgagaggccgggactaccagaacgccatgcgggtgtggtccaacatccctggactgaaaagcaagcacgcacctctgacccctaaagaagaggagtacctgcaggcccaggtgcggagcagaagcaagctggacgcccctaaggtggatctgctggtgaagaattgcctcctgcccctgagagagtacttcaagtatttcagccagaatagtctgcccctgggaggcagcggcggcggcagccagcacctggtgaccttcgaggacgtggccgtgaacttcacccaggaggagtggaccctgctggaccagacccagagggacctgtacagggacgtgatgctggagaactaccagaacctgatggccctggccggcagcgagagctgcaagccccacgtgaacagccccctggagggcgccgaggagctgaggaccagggccaggaggatcctgcagagcgagttcatggccgagagcgacggcggcccaagcagcggcgcccctcctcccagcggcggcagcccagccggctccccaacctctaccgaggagggcacctctgagtccgccacccccgagagcggccctggcacctccaccgagcccagcgagggcagcgcacccggcagccctgccggcagccccacctccacagaggagggaaccagcaccgagcccagcgaaggcagcgccccaggcaccagcaccgagcctagtgagcaggagattaaacggatcaacaagatcagaagaagacttgtgaaagacagcaacaccaagaaggccggcaagacaggccccatgaaaaccctgctggttagagtgatgacacccgatctgagagagcggctggaaaacctgagaaagaagcctgaaaatatcccccagcccatcagcaatacatctagagccaacctgaataagctgctgaccgattacaccgaaatgaagaaggcgatcctgcatgtgtactgggaagagttccagaaggaccctgtgggcctgatgagccgggtggcccagcctgccagcaagaagatcgatcagaacaagctgaaacctgagatggacgagaagggcaacctgaccaccgccggctttgcctgctctcagtgtggccagcccctgttcgtgtacaagctggagcaggtgtctgagaagggcaaggcttacaccaactacttcggacggtgcaatgtggccgagcacgaaaagctgatcctgctggcccagctgaagcccgagaaggatagcgacgaagccgtgacatatagcctgggaaagtttgggcagagggccctggatttctacagcattcatgtgaccaaggagtccacccaccccgtgaagcccctggcccagatcgccggaaacagatacgcctccggacctgtgggaaaggccctgagcgacgcatgtatgggcacaatcgcctccttcctgtctaagtaccaggacatcatcatcgaacaccagaaggtggtgaagggcaaccagaagagactggagagcctgcgggagctggccggcaaggaaaacctggaataccctagcgtgaccctgccacctcagcctcacaccaaggagggcgttgatgcctacaacgaagtgatcgcccgggtgcgaatgtgggtgaacctgaacctgtggcagaagctgaagctaagcagagatgatgccaagcctctgctgagactgaagggattcccttcctttcctctggtcgagagacaggccaacgaagtggactggtgggacatggtgtgtaacgtgaagaagctgatcaacgagaaaaaggaggatggcaaggtgttttggcagaatctggctggctacaagagacaggaagccctgagaccatacctgagcagcgaggaagatcggaagaagggaaagaaattcgctcggtaccagctgggcgacctgctgctgcacctggaaaagaagcacggcgaggactggggaaaggtgtacgacgaggcctgggagcggattgacaagaaagtggaaggcctgagcaagcacatcaagctggaagaggaacggagaagcgaggacgcccagagcaaggccgccctgaccgactggctgcgggctaaggccagcttcgtgatcgagggcctgaaggaggccgacaaggacgagttctgcagatgcgagctgaagctgcagaagtggtacggggacctgcggggaaagcccttcgccatcgaagccgagaacagcatcctggacatcagcggcttcagcaagcagtacaactgtgccttcatctggcagaaggacggcgtgaagaagctgaacctgtacctgatcatcaactacttcaagggcggcaagctgcggttcaagaagatcaaacctgaagccttcgaagccaacagattctacaccgtgatcaacaaaaagagcggcgagatcgtgcccatggaggtgaacttcaacttcgacgaccccaacctgatcatcctgcctctggcctttggcaagagacagggcagagaattcatctggaacgacctgctgtccctggaaaccggcagcctgaagctggccaacggaagagtgatcgagaagacactgtacaacagaagaacccggcaggatgagcctgccctgttcgtggccctgaccttcgagcggcgggaggtcctggactcctccaatatcaaaccaatgaacctgatcggcgtggcaagaggcgaaaacatccccgccgtgatcgccctgaccgaccccgagggctgcccactgagccggtttaaggatagcctgggaaacccaacccacatcctgagaatcggcgagagctataaggagaagcagcggaccatccaggccaagaaggaggtggagcagcggagagccggcggctacagccggaagtacgccagcaaagccaagaatctggcagacgatatggtgagaaacaccgctagagatctgctgtactacgccgtgacccaggatgccatgctgatcttcgccaacctgagccggggcttcggccggcagggcaagcggaccttcatggccgagagacagtacacacggatggaggactggctgaccgccaagctggcctacgagggcctgagcaagacctacctgtccaagacactggcccagtacacctccaagacatgcagcaactgtgggtttaccatcaccagcgccgactacgacagggtgctggagaagctgaagaagacagcaacaggctggatgaccacaattaacggcaaggagctgaaggtggagggccagattacctactacaacagatacaagagacagaacgtagtcaaggacctgtccgtcgagctggatagactgagcgaagaatctgtgaacaacgacatctcctcctggacaaagggcagaagcggagaagctctgagcctcctgaagaaaagattctcccatagacccgtgcaggagaagttcgtgtgcctgaactgcggcttcgagacacacgcagccgagcaagccgccctgaacatcgccagatcctggctgttcctgcggagccaggagtacaagaaataccagacaaacaagacaaccggcaacaccgataagagagccttcgtcgagacctggcagtccttttaccggaagaagcttaaggaggtgtggaaacctgccgtgcggtctggcggatctggcggaggctccaccagccccaagaaaaagagaaaagtctaagctgccttctgcggggcttgccttctggccatgcccttcttctctcccttgcacctgtacctcttggtctttgaataaagcctgagtaggaaggctagcaaaaaaaaaaaaaaaaaaaaaaaaaaaaaaaaaaaaaaaaaaaaaaaaaaaaaaaaaaaaaaaaaaaaaaaaaaaaaaaa

SEQ ID NO: 13379 - RNA, 5785 nt, synthetic construct
  source 1..5785: mol_type = other RNA
aggaaataagagagaaaagaagagtaagaagaaatataagagccaccatggcccctaagaagaagcgtaaagtgagccggatggaacgcctcgtctacgaggtgcggcagaagtgcagaaacatcgaggacatctgcatctcctgcggatctctgaacgtgaccctggagcacccactgttcatcggcggcatgtgccagaactgtaaaaactgttttctggagtgtgcctatcaatacgacgatgacggctaccagagctactgcaccatctgttgcggcggaagagaggtgctgatgtgtggaaataacaactgctgccggtgcttctgcgtggaatgcgtggacctgctggtgggccccggcgccgcccaggccgctattaaggaagatccttggaactgctacatgtgcggccacaagggcacatacggcctgctgagacggagagaggactggcctagcagactgcagatgttcttcgccaataaccacgaccaggagttcgacccccctaaggtgtaccctcccgtccccgccgagaagagaaagcccatccgggtcctgagcctgttcgatggcatcgccaccggtctgctggtgctgaaggacctgggcatccaggtggataggtacattgcctccgaggtgtgcgaggactccatcaccgtgggaatggtgcgtcatcagggcaagatcatgtacgtgggcgacgtgcggagcgtgacacagaagcatatccaggagtggggccctttcgacctggtgatcggcggcagcccttgcaatgacctgagcatcgtgaacccagcccggaagggcctgtacgagggaaccggcagactgttcttcgagttttacagactgctgcacgacgcccggcctaaggaaggcgacgaccggcccttcttttggctgttcgagaatgtggtggccatgggagtcagcgacaagcgggatattagccggttcctggagagcaaccccgtgatgatcgatgccaaggaagtgagcgccgcccaccgggccagatacttctggggcaatctgcctggcatgaacagacccctggccagcaccgtgaacgacaagctggagctgcaggagtgcctggagcacggccggatcgccaagttcagcaaggtgagaaccatcaccacccgaagcaacagcatcaaacaaggcaaggaccagcactttcctgtgttcatgaacgagaaggaggacatcctgtggtgtaccgagatggagagagtgttcgggttcccagtccactacacagatgtcagcaacatgtctagactggccagacagagactgctgggaagaagctggtccgtccctgtgatcagacacctgttcgcccctctgaaggagtacttcgcctgcgtgagcagcggcaacagcaacgccaacagccggggccccagcttctctagcggcctggtgccactgtccctgagagggagccacatgggccccatggagatctacaaaaccgtgagcgcctggaagcggcagcctgtgcgcgtgctgagcctgtttcggaatatcgataaagtcctgaaaagcctgggattcctggagagcggctctggctccggcggtggcaccctgaagtacgtggaggatgtgacaaacgtggtcagacgggatgtggagaagtggggccccttcgatctggtgtacggcagcacccaacccctgggcagctcttgtgaccggtgccctggctggtacatgtttcagttccaccggatcctgcagtacgccctgccgagacaggagtcccagcggccattcttttggattttcatggacaacttgctgctgaccgaggatgaccaggaaactaccactcggttcctgcagaccgaagccgtgaccctgcaggacgtgagaggccgggactaccagaacgccatgcgggtgtggtccaacatccctggactgaaaagcaagcacgcacctctgacccctaaagaagaggagtacctgcaggcccaggtgcggagcagaagcaagctggacgcccctaaggtggatctgctggtgaagaattgcctcctgcccctgagagagtacttcaagtatttcagccagaatagtctgcccctgggaggcagcggcggcggctgcgagggcctggtgagcttcgaggacgtgaccatggacttcagcagggaggagtggcagcagctggaccccgcccagaggtgcctgtactgggacgtgatgctggagatctacagccacctgctgagcgtgggctaccacatccccaaccccgagatcatcagcaggatggagaagggcaagaagagctggatcaggggcgcccagctgccccaccagaggcacagggaggtggtgttcggcggcggcccaagcagcggcgcccctcctcccagcggcggcagcccagccggctccccaacctctaccgaggagggcacctctgagtccgccacccccgagagcggccctggcacctccaccgagcccagcgagggcagcgcacccggcagccctgccggcagccccacctccacagaggagggaaccagcaccgagcccagcgaaggcagcgccccaggcaccagcaccgagcctagtgagcaggagattaaacggatcaacaagatcagaagaagacttgtgaaagacagcaacaccaagaaggccggcaagacaggccccatgaaaaccctgctggttagagtgatgacacccgatctgagagagcggctggaaaacctgagaaagaagcctgaaaatatcccccagcccatcagcaatacatctagagccaacctgaataagctgctgaccgattacaccgaaatgaagaaggcgatcctgcatgtgtactgggaagagttccagaaggaccctgtgggcctgatgagccgggtggcccagcctgccagcaagaagatcgatcagaacaagctgaaacctgagatggacgagaagggcaacctgaccaccgccggctttgcctgctctcagtgtggccagcccctgttcgtgtacaagctggagcaggtgtctgagaagggcaaggcttacaccaactacttcggacggtgcaatgtggccgagcacgaaaagctgatcctgctggcccagctgaagcccgagaaggatagcgacgaagccgtgacatatagcctgggaaagtttgggcagagggccctggatttctacagcattcatgtgaccaaggagtccacccaccccgtgaagcccctggcccagatcgccggaaacagatacgcctccggacctgtgggaaaggccctgagcgacgcatgtatgggcacaatcgcctccttcctgtctaagtaccaggacatcatcatcgaacaccagaaggtggtgaagggcaaccagaagagactggagagcctgcgggagctggccggcaaggaaaacctggaataccctagcgtgaccctgccacctcagcctcacaccaaggagggcgttgatgcctacaacgaagtgatcgcccgggtgcgaatgtgggtgaacctgaacctgtggcagaagctgaagctaagcagagatgatgccaagcctctgctgagactgaagggattcccttcctttcctctggtcgagagacaggccaacgaagtggactggtgggacatggtgtgtaacgtgaagaagctgatcaacgagaaaaaggaggatggcaaggtgttttggcagaatctggctggctacaagagacaggaagccctgagaccatacctgagcagcgaggaagatcggaagaagggaaagaaattcgctcggtaccagctgggcgacctgctgctgcacctggaaaagaagcacggcgaggactggggaaaggtgtacgacgaggcctgggagcggattgacaagaaagtggaaggcctgagcaagcacatcaagctggaagaggaacggagaagcgaggacgcccagagcaaggccgccctgaccgactggctgcgggctaaggccagcttcgtgatcgagggcctgaaggaggccgacaaggacgagttctgcagatgcgagctgaagctgcagaagtggtacggggacctgcggggaaagcccttcgccatcgaagccgagaacagcatcctggacatcagcggcttcagcaagcagtacaactgtgccttcatctggcagaaggacggcgtgaagaagctgaacctgtacctgatcatcaactacttcaagggcggcaagctgcggttcaagaagatcaaacctgaagccttcgaagccaacagattctacaccgtgatcaacaaaaagagcggcgagatcgtgcccatggaggtgaacttcaacttcgacgaccccaacctgatcatcctgcctctggcctttggcaagagacagggcagagaattcatctggaacgacctgctgtccctggaaaccggcagcctgaagctggccaacggaagagtgatcgagaagacactgtacaacagaagaacccggcaggatgagcctgccctgttcgtggccctgaccttcgagcggcgggaggtcctggactcctccaatatcaaaccaatgaacctgatcggcgtggcaagaggcgaaaacatccccgccgtgatcgccctgaccgaccccgagggctgcccactgagccggtttaaggatagcctgggaaacccaacccacatcctgagaatcggcgagagctataaggagaagcagcggaccatccaggccaagaaggaggtggagcagcggagagccggcggctacagccggaagtacgccagcaaagccaagaatctggcagacgatatggtgagaaacaccgctagagatctgctgtactacgccgtgacccaggatgccatgctgatcttcgccaacctgagccggggcttcggccggcagggcaagcggaccttcatggccgagagacagtacacacggatggaggactggctgaccgccaagctggcctacgagggcctgagcaagacctacctgtccaagacactggcccagtacacctccaagacatgcagcaactgtgggtttaccatcaccagcgccgactacgacagggtgctggagaagctgaagaagacagcaacaggctggatgaccacaattaacggcaaggagctgaaggtggagggccagattacctactacaacagatacaagagacagaacgtagtcaaggacctgtccgtcgagctggatagactgagcgaagaatctgtgaacaacgacatctcctcctggacaaagggcagaagcggagaagctctgagcctcctgaagaaaagattctcccatagacccgtgcaggagaagttcgtgtgcctgaactgcggcttcgagacacacgcagccgagcaagccgccctgaacatcgccagatcctggctgttcctgcggagccaggagtacaagaaataccagacaaacaagacaaccggcaacaccgataagagagccttcgtcgagacctggcagtccttttaccggaagaagcttaaggaggtgtggaaacctgccgtgcggtctggcggatctggcggaggctccaccagccccaagaaaaagagaaaagtctaagctgccttctgcggggcttgccttctggccatgcccttcttctctcccttgcacctgtacctcttggtctttgaataaagcctgagtaggaaggctagcaaaaaaaaaaaaaaaaaaaaaaaaaaaaaaaaaaaaaaaaaaaaaaaaaaaaaaaaaaaaaaaaaaaaaaaaaaaaaaaa

SEQ ID NO: 13380 - RNA, 5785 nt, synthetic construct
  source 1..5785: mol_type = other RNA
aggaaataagagagaaaagaagagtaagaagaaatataagagccaccatggcccctaagaagaagcgtaaagtgagccggatggaacgcctcgtctacgaggtgcggcagaagtgcagaaacatcgaggacatctgcatctcctgcggatctctgaacgtgaccctggagcacccactgttcatcggcggcatgtgccagaactgtaaaaactgttttctggagtgtgcctatcaatacgacgatgacggctaccagagctactgcaccatctgttgcggcggaagagaggtgctgatgtgtggaaataacaactgctgccggtgcttctgcgtggaatgcgtggacctgctggtgggccccggcgccgcccaggccgctattaaggaagatccttggaactgctacatgtgcggccacaagggcacatacggcctgctgagacggagagaggactggcctagcagactgcagatgttcttcgccaataaccacgaccaggagttcgacccccctaaggtgtaccctcccgtccccgccgagaagagaaagcccatccgggtcctgagcctgttcgatggcatcgccaccggtctgctggtgctgaaggacctgggcatccaggtggataggtacattgcctccgaggtgtgcgaggactccatcaccgtgggaatggtgcgtcatcagggcaagatcatgtacgtgggcgacgtgcggagcgtgacacagaagcatatccaggagtggggccctttcgacctggtgatcggcggcagcccttgcaatgacctgagcatcgtgaacccagcccggaagggcctgtacgagggaaccggcagactgttcttcgagttttacagactgctgcacgacgcccggcctaaggaaggcgacgaccggcccttcttttggctgttcgagaatgtggtggccatgggagtcagcgacaagcgggatattagccggttcctggagagcaaccccgtgatgatcgatgccaaggaagtgagcgccgcccaccgggccagatacttctggggcaatctgcctggcatgaacagacccctggccagcaccgtgaacgacaagctggagctgcaggagtgcctggagcacggccggatcgccaagttcagcaaggtgagaaccatcaccacccgaagcaacagcatcaaacaaggcaaggaccagcactttcctgtgttcatgaacgagaaggaggacatcctgtggtgtaccgagatggagagagtgttcgggttcccagtccactacacagatgtcagcaacatgtctagactggccagacagagactgctgggaagaagctggtccgtccctgtgatcagacacctgttcgcccctctgaaggagtacttcgcctgcgtgagcagcggcaacagcaacgccaacagccggggccccagcttctctagcggcctggtgccactgtccctgagagggagccacatgggccccatggagatctacaaaaccgtgagcgcctggaagcggcagcctgtgcgcgtgctgagcctgtttcggaatatcgataaagtcctgaaaagcctgggattcctggagagcggctctggctccggcggtggcaccctgaagtacgtggaggatgtgacaaacgtggtcagacgggatgtggagaagtggggccccttcgatctggtgtacggcagcacccaacccctgggcagctcttgtgaccggtgccctggctggtacatgtttcagttccaccggatcctgcagtacgccctgccgagacaggagtcccagcggccattcttttggattttcatggacaacttgctgctgaccgaggatgaccaggaaactaccactcggttcctgcagaccgaagccgtgaccctgcaggacgtgagaggccgggactaccagaacgccatgcgggtgtggtccaacatccctggactgaaaagcaagcacgcacctctgacccctaaagaagaggagtacctgcaggcccaggtgcggagcagaagcaagctggacgcccctaaggtggatctgctggtgaagaattgcctcctgcccctgagagagtacttcaagtatttcagccagaatagtctgcccctgggaggcagcggcggcggcttccaggagcccgtgaccttcgaggacgtggccgtgtacttcacccagaacgagtgggccagcctgcaccccacccagagggccctgtacagggaggtgatgctggagaactacgccaacgtgaccagcctgagcgccttccccttccccaagcccgacctgatcttccagctggagcagggcgaggccgcctggggccccgacccctggaccctggccggcggcgaggccctgaggggcatgggcggcccaagcagcggcgcccctcctcccagcggcggcagcccagccggctccccaacctctaccgaggagggcacctctgagtccgccacccccgagagcggccctggcacctccaccgagcccagcgagggcagcgcacccggcagccctgccggcagccccacctccacagaggagggaaccagcaccgagcccagcgaaggcagcgccccaggcaccagcaccgagcctagtgagcaggagattaaacggatcaacaagatcagaagaagacttgtgaaagacagcaacaccaagaaggccggcaagacaggccccatgaaaaccctgctggttagagtgatgacacccgatctgagagagcggctggaaaacctgagaaagaagcctgaaaatatcccccagcccatcagcaatacatctagagccaacctgaataagctgctgaccgattacaccgaaatgaagaaggcgatcctgcatgtgtactgggaagagttccagaaggaccctgtgggcctgatgagccgggtggcccagcctgccagcaagaagatcgatcagaacaagctgaaacctgagatggacgagaagggcaacctgaccaccgccggctttgcctgctctcagtgtggccagcccctgttcgtgtacaagctggagcaggtgtctgagaagggcaaggcttacaccaactacttcggacggtgcaatgtggccgagcacgaaaagctgatcctgctggcccagctgaagcccgagaaggatagcgacgaagccgtgacatatagcctgggaaagtttgggcagagggccctggatttctacagcattcatgtgaccaaggagtccacccaccccgtgaagcccctggcccagatcgccggaaacagatacgcctccggacctgtgggaaaggccctgagcgacgcatgtatgggcacaatcgcctccttcctgtctaagtaccaggacatcatcatcgaacaccagaaggtggtgaagggcaaccagaagagactggagagcctgcgggagctggccggcaaggaaaacctggaataccctagcgtgaccctgccacctcagcctcacaccaaggagggcgttgatgcctacaacgaagtgatcgcccgggtgcgaatgtgggtgaacctgaacctgtggcagaagctgaagctaagcagagatgatgccaagcctctgctgagactgaagggattcccttcctttcctctggtcgagagacaggccaacgaagtggactggtgggacatggtgtgtaacgtgaagaagctgatcaacgagaaaaaggaggatggcaaggtgttttggcagaatctggctggctacaagagacaggaagccctgagaccatacctgagcagcgaggaagatcggaagaagggaaagaaattcgctcggtaccagctgggcgacctgctgctgcacctggaaaagaagcacggcgaggactggggaaaggtgtacgacgaggcctgggagcggattgacaagaaagtggaaggcctgagcaagcacatcaagctggaagaggaacggagaagcgaggacgcccagagcaaggccgccctgaccgactggctgcgggctaaggccagcttcgtgatcgagggcctgaaggaggccgacaaggacgagttctgcagatgcgagctgaagctgcagaagtggtacggggacctgcggggaaagcccttcgccatcgaagccgagaacagcatcctggacatcagcggcttcagcaagcagtacaactgtgccttcatctggcagaaggacggcgtgaagaagctgaacctgtacctgatcatcaactacttcaagggcggcaagctgcggttcaagaagatcaaacctgaagccttcgaagccaacagattctacaccgtgatcaacaaaaagagcggcgagatcgtgcccatggaggtgaacttcaacttcgacgaccccaacctgatcatcctgcctctggcctttggcaagagacagggcagagaattcatctggaacgacctgctgtccctggaaaccggcagcctgaagctggccaacggaagagtgatcgagaagacactgtacaacagaagaacccggcaggatgagcctgccctgttcgtggccctgaccttcgagcggcgggaggtcctggactcctccaatatcaaaccaatgaacctgatcggcgtggcaagaggcgaaaacatccccgccgtgatcgccctgaccgaccccgagggctgcccactgagccggtttaaggatagcctgggaaacccaacccacatcctgagaatcggcgagagctataaggagaagcagcggaccatccaggccaagaaggaggtggagcagcggagagccggcggctacagccggaagtacgccagcaaagccaagaatctggcagacgatatggtgagaaacaccgctagagatctgctgtactacgccgtgacccaggatgccatgctgatcttcgccaacctgagccggggcttcggccggcagggcaagcggaccttcatggccgagagacagtacacacggatggaggactggctgaccgccaagctggcctacgagggcctgagcaagacctacctgtccaagacactggcccagtacacctccaagacatgcagcaactgtgggtttaccatcaccagcgccgactacgacagggtgctggagaagctgaagaagacagcaacaggctggatgaccacaattaacggcaaggagctgaaggtggagggccagattacctactacaacagatacaagagacagaacgtagtcaaggacctgtccgtcgagctggatagactgagcgaagaatctgtgaacaacgacatctcctcctggacaaagggcagaagcggagaagctctgagcctcctgaagaaaagattctcccatagacccgtgcaggagaagttcgtgtgcctgaactgcggcttcgagacacacgcagccgagcaagccgccctgaacatcgccagatcctggctgttcctgcggagccaggagtacaagaaataccagacaaacaagacaaccggcaacaccgataagagagccttcgtcgagacctggcagtccttttaccggaagaagcttaaggaggtgtggaaacctgccgtgcggtctggcggatctggcggaggctccaccagccccaagaaaaagagaaaagtctaagctgccttctgcggggcttgccttctggccatgcccttcttctctcccttgcacctgtacctcttggtctttgaataaagcctgagtaggaaggctagcaaaaaaaaaaaaaaaaaaaaaaaaaaaaaaaaaaaaaaaaaaaaaaaaaaaaaaaaaaaaaaaaaaaaaaaaaaaaaaaa

SEQ ID NO: 13381 - RNA, 5782 nt, synthetic construct
  source 1..5782: mol_type = other RNA
aggaaataagagagaaaagaagagtaagaagaaatataagagccaccatggcccctaagaagaagcgtaaagtgagccggatggaacgcctcgtctacgaggtgcggcagaagtgcagaaacatcgaggacatctgcatctcctgcggatctctgaacgtgaccctggagcacccactgttcatcggcggcatgtgccagaactgtaaaaactgttttctggagtgtgcctatcaatacgacgatgacggctaccagagctactgcaccatctgttgcggcggaagagaggtgctgatgtgtggaaataacaactgctgccggtgcttctgcgtggaatgcgtggacctgctggtgggccccggcgccgcccaggccgctattaaggaagatccttggaactgctacatgtgcggccacaagggcacatacggcctgctgagacggagagaggactggcctagcagactgcagatgttcttcgccaataaccacgaccaggagttcgacccccctaaggtgtaccctcccgtccccgccgagaagagaaagcccatccgggtcctgagcctgttcgatggcatcgccaccggtctgctggtgctgaaggacctgggcatccaggtggataggtacattgcctccgaggtgtgcgaggactccatcaccgtgggaatggtgcgtcatcagggcaagatcatgtacgtgggcgacgtgcggagcgtgacacagaagcatatccaggagtggggccctttcgacctggtgatcggcggcagcccttgcaatgacctgagcatcgtgaacccagcccggaagggcctgtacgagggaaccggcagactgttcttcgagttttacagactgctgcacgacgcccggcctaaggaaggcgacgaccggcccttcttttggctgttcgagaatgtggtggccatgggagtcagcgacaagcgggatattagccggttcctggagagcaaccccgtgatgatcgatgccaaggaagtgagcgccgcccaccgggccagatacttctggggcaatctgcctggcatgaacagacccctggccagcaccgtgaacgacaagctggagctgcaggagtgcctggagcacggccggatcgccaagttcagcaaggtgagaaccatcaccacccgaagcaacagcatcaaacaaggcaaggaccagcactttcctgtgttcatgaacgagaaggaggacatcctgtggtgtaccgagatggagagagtgttcgggttcccagtccactacacagatgtcagcaacatgtctagactggccagacagagactgctgggaagaagctggtccgtccctgtgatcagacacctgttcgcccctctgaaggagtacttcgcctgcgtgagcagcggcaacagcaacgccaacagccggggccccagcttctctagcggcctggtgccactgtccctgagagggagccacatgggccccatggagatctacaaaaccgtgagcgcctggaagcggcagcctgtgcgcgtgctgagcctgtttcggaatatcgataaagtcctgaaaagcctgggattcctggagagcggctctggctccggcggtggcaccctgaagtacgtggaggatgtgacaaacgtggtcagacgggatgtggagaagtggggccccttcgatctggtgtacggcagcacccaacccctgggcagctcttgtgaccggtgccctggctggtacatgtttcagttccaccggatcctgcagtacgccctgccgagacaggagtcccagcggccattcttttggattttcatggacaacttgctgctgaccgaggatgaccaggaaactaccactcggttcctgcagaccgaagccgtgaccctgcaggacgtgagaggccgggactaccagaacgccatgcgggtgtggtccaacatccctggactgaaaagcaagcacgcacctctgacccctaaagaagaggagtacctgcaggcccaggtgcggagcagaagcaagctggacgcccctaaggtggatctgctggtgaagaattgcctcctgcccctgagagagtacttcaagtatttcagccagaatagtctgcccctgggaggcagcggcggcggcaacatgagccaggccagcgtgagcttccaggacgtgaccgtggagttcaccagagaggagtggcagcacctgggccccgtggagagaaccctgtacagagacgtgatgctggagaactacagccacctgatcagcgtgggctactgcatcaccaagcccaaggtgatcagcaagctggagaagggcgaggagccctggagcctggaggacgagttcctgaaccagagataccccggctacggcggcccaagcagcggcgcccctcctcccagcggcggcagcccagccggctccccaacctctaccgaggagggcacctctgagtccgccacccccgagagcggccctggcacctccaccgagcccagcgagggcagcgcacccggcagccctgccggcagccccacctccacagaggagggaaccagcaccgagcccagcgaaggcagcgccccaggcaccagcaccgagcctagtgagcaggagattaaacggatcaacaagatcagaagaagacttgtgaaagacagcaacaccaagaaggccggcaagacaggccccatgaaaaccctgctggttagagtgatgacacccgatctgagagagcggctggaaaacctgagaaagaagcctgaaaatatcccccagcccatcagcaatacatctagagccaacctgaataagctgctgaccgattacaccgaaatgaagaaggcgatcctgcatgtgtactgggaagagttccagaaggaccctgtgggcctgatgagccgggtggcccagcctgccagcaagaagatcgatcagaacaagctgaaacctgagatggacgagaagggcaacctgaccaccgccggctttgcctgctctcagtgtggccagcccctgttcgtgtacaagctggagcaggtgtctgagaagggcaaggcttacaccaactacttcggacggtgcaatgtggccgagcacgaaaagctgatcctgctggcccagctgaagcccgagaaggatagcgacgaagccgtgacatatagcctgggaaagtttgggcagagggccctggatttctacagcattcatgtgaccaaggagtccacccaccccgtgaagcccctggcccagatcgccggaaacagatacgcctccggacctgtgggaaaggccctgagcgacgcatgtatgggcacaatcgcctccttcctgtctaagtaccaggacatcatcatcgaacaccagaaggtggtgaagggcaaccagaagagactggagagcctgcgggagctggccggcaaggaaaacctggaataccctagcgtgaccctgccacctcagcctcacaccaaggagggcgttgatgcctacaacgaagtgatcgcccgggtgcgaatgtgggtgaacctgaacctgtggcagaagctgaagctaagcagagatgatgccaagcctctgctgagactgaagggattcccttcctttcctctggtcgagagacaggccaacgaagtggactggtgggacatggtgtgtaacgtgaagaagctgatcaacgagaaaaaggaggatggcaaggtgttttggcagaatctggctggctacaagagacaggaagccctgagaccatacctgagcagcgaggaagatcggaagaagggaaagaaattcgctcggtaccagctgggcgacctgctgctgcacctggaaaagaagcacggcgaggactggggaaaggtgtacgacgaggcctgggagcggattgacaagaaagtggaaggcctgagcaagcacatcaagctggaagaggaacggagaagcgaggacgcccagagcaaggccgccctgaccgactggctgcgggctaaggccagcttcgtgatcgagggcctgaaggaggccgacaaggacgagttctgcagatgcgagctgaagctgcagaagtggtacggggacctgcggggaaagcccttcgccatcgaagccgagaacagcatcctggacatcagcggcttcagcaagcagtacaactgtgccttcatctggcagaaggacggcgtgaagaagctgaacctgtacctgatcatcaactacttcaagggcggcaagctgcggttcaagaagatcaaacctgaagccttcgaagccaacagattctacaccgtgatcaacaaaaagagcggcgagatcgtgcccatggaggtgaacttcaacttcgacgaccccaacctgatcatcctgcctctggcctttggcaagagacagggcagagaattcatctggaacgacctgctgtccctggaaaccggcagcctgaagctggccaacggaagagtgatcgagaagacactgtacaacagaagaacccggcaggatgagcctgccctgttcgtggccctgaccttcgagcggcgggaggtcctggactcctccaatatcaaaccaatgaacctgatcggcgtggcaagaggcgaaaacatccccgccgtgatcgccctgaccgaccccgagggctgcccactgagccggtttaaggatagcctgggaaacccaacccacatcctgagaatcggcgagagctataaggagaagcagcggaccatccaggccaagaaggaggtggagcagcggagagccggcggctacagccggaagtacgccagcaaagccaagaatctggcagacgatatggtgagaaacaccgctagagatctgctgtactacgccgtgacccaggatgccatgctgatcttcgccaacctgagccggggcttcggccggcagggcaagcggaccttcatggccgagagacagtacacacggatggaggactggctgaccgccaagctggcctacgagggcctgagcaagacctacctgtccaagacactggcccagtacacctccaagacatgcagcaactgtgggtttaccatcaccagcgccgactacgacagggtgctggagaagctgaagaagacagcaacaggctggatgaccacaattaacggcaaggagctgaaggtggagggccagattacctactacaacagatacaagagacagaacgtagtcaaggacctgtccgtcgagctggatagactgagcgaagaatctgtgaacaacgacatctcctcctggacaaagggcagaagcggagaagctctgagcctcctgaagaaaagattctcccatagacccgtgcaggagaagttcgtgtgcctgaactgcggcttcgagacacacgcagccgagcaagccgccctgaacatcgccagatcctggctgttcctgcggagccaggagtacaagaaataccagacaaacaagacaaccggcaacaccgataagagagccttcgtcgagacctggcagtccttttaccggaagaagcttaaggaggtgtggaaacctgccgtgcggtctggcggatctggcggaggctccaccagccccaagaaaaagagaaaagtctaagctgccttctgcggggcttgccttctggccatgcccttcttctctcccttgcacctgtacctcttggtctttgaataaagcctgagtaggaaggctagcaaaaaaaaaaaaaaaaaaaaaaaaaaaaaaaaaaaaaaaaaaaaaaaaaaaaaaaaaaaaaaaaaaaaaaaaaaaaaaaa

SEQ ID NO: 13382 - RNA, 5785 nt, synthetic construct
  source 1..5785: mol_type = other RNA
aggaaataagagagaaaagaagagtaagaagaaatataagagccaccatggcccctaagaagaagcgtaaagtgagccggatggaacgcctcgtctacgaggtgcggcagaagtgcagaaacatcgaggacatctgcatctcctgcggatctctgaacgtgaccctggagcacccactgttcatcggcggcatgtgccagaactgtaaaaactgttttctggagtgtgcctatcaatacgacgatgacggctaccagagctactgcaccatctgttgcggcggaagagaggtgctgatgtgtggaaataacaactgctgccggtgcttctgcgtggaatgcgtggacctgctggtgggccccggcgccgcccaggccgctattaaggaagatccttggaactgctacatgtgcggccacaagggcacatacggcctgctgagacggagagaggactggcctagcagactgcagatgttcttcgccaataaccacgaccaggagttcgacccccctaaggtgtaccctcccgtccccgccgagaagagaaagcccatccgggtcctgagcctgttcgatggcatcgccaccggtctgctggtgctgaaggacctgggcatccaggtggataggtacattgcctccgaggtgtgcgaggactccatcaccgtgggaatggtgcgtcatcagggcaagatcatgtacgtgggcgacgtgcggagcgtgacacagaagcatatccaggagtggggccctttcgacctggtgatcggcggcagcccttgcaatgacctgagcatcgtgaacccagcccggaagggcctgtacgagggaaccggcagactgttcttcgagttttacagactgctgcacgacgcccggcctaaggaaggcgacgaccggcccttcttttggctgttcgagaatgtggtggccatgggagtcagcgacaagcgggatattagccggttcctggagagcaaccccgtgatgatcgatgccaaggaagtgagcgccgcccaccgggccagatacttctggggcaatctgcctggcatgaacagacccctggccagcaccgtgaacgacaagctggagctgcaggagtgcctggagcacggccggatcgccaagttcagcaaggtgagaaccatcaccacccgaagcaacagcatcaaacaaggcaaggaccagcactttcctgtgttcatgaacgagaaggaggacatcctgtggtgtaccgagatggagagagtgttcgggttcccagtccactacacagatgtcagcaacatgtctagactggccagacagagactgctgggaagaagctggtccgtccctgtgatcagacacctgttcgcccctctgaaggagtacttcgcctgcgtgagcagcggcaacagcaacgccaacagccggggccccagcttctctagcggcctggtgccactgtccctgagagggagccacatgggccccatggagatctacaaaaccgtgagcgcctggaagcggcagcctgtgcgcgtgctgagcctgtttcggaatatcgataaagtcctgaaaagcctgggattcctggagagcggctctggctccggcggtggcaccctgaagtacgtggaggatgtgacaaacgtggtcagacgggatgtggagaagtggggccccttcgatctggtgtacggcagcacccaacccctgggcagctcttgtgaccggtgccctggctggtacatgtttcagttccaccggatcctgcagtacgccctgccgagacaggagtcccagcggccattcttttggattttcatggacaacttgctgctgaccgaggatgaccaggaaactaccactcggttcctgcagaccgaagccgtgaccctgcaggacgtgagaggccgggactaccagaacgccatgcgggtgtggtccaacatccctggactgaaaagcaagcacgcacctctgacccctaaagaagaggagtacctgcaggcccaggtgcggagcagaagcaagctggacgcccctaaggtggatctgctggtgaagaattgcctcctgcccctgagagagtacttcaagtatttcagccagaatagtctgcccctgggaggcagcggcggcggcctgaaggacctggtgaccttcaaggacgtggccatcgacttcagccaggaggagtggcagtggatgaaccccgcccagaagcacctgtacaggagcatgatgctggagaactaccagagcctggtgagcctgggcctgtgcatcagcaagccctacgtgatcagcctgctggagcagggcagggagccctgggagatgaccagcgagatgaccaggagccccttcagcgactgggagagcatcggcggcccaagcagcggcgcccctcctcccagcggcggcagcccagccggctccccaacctctaccgaggagggcacctctgagtccgccacccccgagagcggccctggcacctccaccgagcccagcgagggcagcgcacccggcagccctgccggcagccccacctccacagaggagggaaccagcaccgagcccagcgaaggcagcgccccaggcaccagcaccgagcctagtgagcaggagattaaacggatcaacaagatcagaagaagacttgtgaaagacagcaacaccaagaaggccggcaagacaggccccatgaaaaccctgctggttagagtgatgacacccgatctgagagagcggctggaaaacctgagaaagaagcctgaaaatatcccccagcccatcagcaatacatctagagccaacctgaataagctgctgaccgattacaccgaaatgaagaaggcgatcctgcatgtgtactgggaagagttccagaaggaccctgtgggcctgatgagccgggtggcccagcctgccagcaagaagatcgatcagaacaagctgaaacctgagatggacgagaagggcaacctgaccaccgccggctttgcctgctctcagtgtggccagcccctgttcgtgtacaagctggagcaggtgtctgagaagggcaaggcttacaccaactacttcggacggtgcaatgtggccgagcacgaaaagctgatcctgctggcccagctgaagcccgagaaggatagcgacgaagccgtgacatatagcctgggaaagtttgggcagagggccctggatttctacagcattcatgtgaccaaggagtccacccaccccgtgaagcccctggcccagatcgccggaaacagatacgcctccggacctgtgggaaaggccctgagcgacgcatgtatgggcacaatcgcctccttcctgtctaagtaccaggacatcatcatcgaacaccagaaggtggtgaagggcaaccagaagagactggagagcctgcgggagctggccggcaaggaaaacctggaataccctagcgtgaccctgccacctcagcctcacaccaaggagggcgttgatgcctacaacgaagtgatcgcccgggtgcgaatgtgggtgaacctgaacctgtggcagaagctgaagctaagcagagatgatgccaagcctctgctgagactgaagggattcccttcctttcctctggtcgagagacaggccaacgaagtggactggtgggacatggtgtgtaacgtgaagaagctgatcaacgagaaaaaggaggatggcaaggtgttttggcagaatctggctggctacaagagacaggaagccctgagaccatacctgagcagcgaggaagatcggaagaagggaaagaaattcgctcggtaccagctgggcgacctgctgctgcacctggaaaagaagcacggcgaggactggggaaaggtgtacgacgaggcctgggagcggattgacaagaaagtggaaggcctgagcaagcacatcaagctggaagaggaacggagaagcgaggacgcccagagcaaggccgccctgaccgactggctgcgggctaaggccagcttcgtgatcgagggcctgaaggaggccgacaaggacgagttctgcagatgcgagctgaagctgcagaagtggtacggggacctgcggggaaagcccttcgccatcgaagccgagaacagcatcctggacatcagcggcttcagcaagcagtacaactgtgccttcatctggcagaaggacggcgtgaagaagctgaacctgtacctgatcatcaactacttcaagggcggcaagctgcggttcaagaagatcaaacctgaagccttcgaagccaacagattctacaccgtgatcaacaaaaagagcggcgagatcgtgcccatggaggtgaacttcaacttcgacgaccccaacctgatcatcctgcctctggcctttggcaagagacagggcagagaattcatctggaacgacctgctgtccctggaaaccggcagcctgaagctggccaacggaagagtgatcgagaagacactgtacaacagaagaacccggcaggatgagcctgccctgttcgtggccctgaccttcgagcggcgggaggtcctggactcctccaatatcaaaccaatgaacctgatcggcgtggcaagaggcgaaaacatccccgccgtgatcgccctgaccgaccccgagggctgcccactgagccggtttaaggatagcctgggaaacccaacccacatcctgagaatcggcgagagctataaggagaagcagcggaccatccaggccaagaaggaggtggagcagcggagagccggcggctacagccggaagtacgccagcaaagccaagaatctggcagacgatatggtgagaaacaccgctagagatctgctgtactacgccgtgacccaggatgccatgctgatcttcgccaacctgagccggggcttcggccggcagggcaagcggaccttcatggccgagagacagtacacacggatggaggactggctgaccgccaagctggcctacgagggcctgagcaagacctacctgtccaagacactggcccagtacacctccaagacatgcagcaactgtgggtttaccatcaccagcgccgactacgacagggtgctggagaagctgaagaagacagcaacaggctggatgaccacaattaacggcaaggagctgaaggtggagggccagattacctactacaacagatacaagagacagaacgtagtcaaggacctgtccgtcgagctggatagactgagcgaagaatctgtgaacaacgacatctcctcctggacaaagggcagaagcggagaagctctgagcctcctgaagaaaagattctcccatagacccgtgcaggagaagttcgtgtgcctgaactgcggcttcgagacacacgcagccgagcaagccgccctgaacatcgccagatcctggctgttcctgcggagccaggagtacaagaaataccagacaaacaagacaaccggcaacaccgataagagagccttcgtcgagacctggcagtccttttaccggaagaagcttaaggaggtgtggaaacctgccgtgcggtctggcggatctggcggaggctccaccagccccaagaaaaagagaaaagtctaagctgccttctgcggggcttgccttctggccatgcccttcttctctcccttgcacctgtacctcttggtctttgaataaagcctgagtaggaaggctagcaaaaaaaaaaaaaaaaaaaaaaaaaaaaaaaaaaaaaaaaaaaaaaaaaaaaaaaaaaaaaaaaaaaaaaaaaaaaaaaa

SEQ ID NO: 13383 - RNA, 5785 nt, synthetic construct
  source 1..5785: mol_type = other RNA
aggaaataagagagaaaagaagagtaagaagaaatataagagccaccatggcccctaagaagaagcgtaaagtgagccggatggaacgcctcgtctacgaggtgcggcagaagtgcagaaacatcgaggacatctgcatctcctgcggatctctgaacgtgaccctggagcacccactgttcatcggcggcatgtgccagaactgtaaaaactgttttctggagtgtgcctatcaatacgacgatgacggctaccagagctactgcaccatctgttgcggcggaagagaggtgctgatgtgtggaaataacaactgctgccggtgcttctgcgtggaatgcgtggacctgctggtgggccccggcgccgcccaggccgctattaaggaagatccttggaactgctacatgtgcggccacaagggcacatacggcctgctgagacggagagaggactggcctagcagactgcagatgttcttcgccaataaccacgaccaggagttcgacccccctaaggtgtaccctcccgtccccgccgagaagagaaagcccatccgggtcctgagcctgttcgatggcatcgccaccggtctgctggtgctgaaggacctgggcatccaggtggataggtacattgcctccgaggtgtgcgaggactccatcaccgtgggaatggtgcgtcatcagggcaagatcatgtacgtgggcgacgtgcggagcgtgacacagaagcatatccaggagtggggccctttcgacctggtgatcggcggcagcccttgcaatgacctgagcatcgtgaacccagcccggaagggcctgtacgagggaaccggcagactgttcttcgagttttacagactgctgcacgacgcccggcctaaggaaggcgacgaccggcccttcttttggctgttcgagaatgtggtggccatgggagtcagcgacaagcgggatattagccggttcctggagagcaaccccgtgatgatcgatgccaaggaagtgagcgccgcccaccgggccagatacttctggggcaatctgcctggcatgaacagacccctggccagcaccgtgaacgacaagctggagctgcaggagtgcctggagcacggccggatcgccaagttcagcaaggtgagaaccatcaccacccgaagcaacagcatcaaacaaggcaaggaccagcactttcctgtgttcatgaacgagaaggaggacatcctgtggtgtaccgagatggagagagtgttcgggttcccagtccactacacagatgtcagcaacatgtctagactggccagacagagactgctgggaagaagctggtccgtccctgtgatcagacacctgttcgcccctctgaaggagtacttcgcctgcgtgagcagcggcaacagcaacgccaacagccggggccccagcttctctagcggcctggtgccactgtccctgagagggagccacatgggccccatggagatctacaaaaccgtgagcgcctggaagcggcagcctgtgcgcgtgctgagcctgtttcggaatatcgataaagtcctgaaaagcctgggattcctggagagcggctctggctccggcggtggcaccctgaagtacgtggaggatgtgacaaacgtggtcagacgggatgtggagaagtggggccccttcgatctggtgtacggcagcacccaacccctgggcagctcttgtgaccggtgccctggctggtacatgtttcagttccaccggatcctgcagtacgccctgccgagacaggagtcccagcggccattcttttggattttcatggacaacttgctgctgaccgaggatgaccaggaaactaccactcggttcctgcagaccgaagccgtgaccctgcaggacgtgagaggccgggactaccagaacgccatgcgggtgtggtccaacatccctggactgaaaagcaagcacgcacctctgacccctaaagaagaggagtacctgcaggcccaggtgcggagcagaagcaagctggacgcccctaaggtggatctgctggtgaagaattgcctcctgcccctgagagagtacttcaagtatttcagccagaatagtctgcccctgggaggcagcggcggcggcatggacatggcccaggagcccgtgaccttcagggacgtggccatctacttcagcagggaggagtgggcctgcctggagcccagccagagggccctgtacagggacgtgatgctggacaacttcagcagcgtggccgccctgggcttctgcagccccaggcccgacctggtgagcaggctggagcagtgggaggagccctgggtggaggactgggagaggcccgagctgcaggccgtgcagaggggcggcccaagcagcggcgcccctcctcccagcggcggcagcccagccggctccccaacctctaccgaggagggcacctctgagtccgccacccccgagagcggccctggcacctccaccgagcccagcgagggcagcgcacccggcagccctgccggcagccccacctccacagaggagggaaccagcaccgagcccagcgaaggcagcgccccaggcaccagcaccgagcctagtgagcaggagattaaacggatcaacaagatcagaagaagacttgtgaaagacagcaacaccaagaaggccggcaagacaggccccatgaaaaccctgctggttagagtgatgacacccgatctgagagagcggctggaaaacctgagaaagaagcctgaaaatatcccccagcccatcagcaatacatctagagccaacctgaataagctgctgaccgattacaccgaaatgaagaaggcgatcctgcatgtgtactgggaagagttccagaaggaccctgtgggcctgatgagccgggtggcccagcctgccagcaagaagatcgatcagaacaagctgaaacctgagatggacgagaagggcaacctgaccaccgccggctttgcctgctctcagtgtggccagcccctgttcgtgtacaagctggagcaggtgtctgagaagggcaaggcttacaccaactacttcggacggtgcaatgtggccgagcacgaaaagctgatcctgctggcccagctgaagcccgagaaggatagcgacgaagccgtgacatatagcctgggaaagtttgggcagagggccctggatttctacagcattcatgtgaccaaggagtccacccaccccgtgaagcccctggcccagatcgccggaaacagatacgcctccggacctgtgggaaaggccctgagcgacgcatgtatgggcacaatcgcctccttcctgtctaagtaccaggacatcatcatcgaacaccagaaggtggtgaagggcaaccagaagagactggagagcctgcgggagctggccggcaaggaaaacctggaataccctagcgtgaccctgccacctcagcctcacaccaaggagggcgttgatgcctacaacgaagtgatcgcccgggtgcgaatgtgggtgaacctgaacctgtggcagaagctgaagctaagcagagatgatgccaagcctctgctgagactgaagggattcccttcctttcctctggtcgagagacaggccaacgaagtggactggtgggacatggtgtgtaacgtgaagaagctgatcaacgagaaaaaggaggatggcaaggtgttttggcagaatctggctggctacaagagacaggaagccctgagaccatacctgagcagcgaggaagatcggaagaagggaaagaaattcgctcggtaccagctgggcgacctgctgctgcacctggaaaagaagcacggcgaggactggggaaaggtgtacgacgaggcctgggagcggattgacaagaaagtggaaggcctgagcaagcacatcaagctggaagaggaacggagaagcgaggacgcccagagcaaggccgccctgaccgactggctgcgggctaaggccagcttcgtgatcgagggcctgaaggaggccgacaaggacgagttctgcagatgcgagctgaagctgcagaagtggtacggggacctgcggggaaagcccttcgccatcgaagccgagaacagcatcctggacatcagcggcttcagcaagcagtacaactgtgccttcatctggcagaaggacggcgtgaagaagctgaacctgtacctgatcatcaactacttcaagggcggcaagctgcggttcaagaagatcaaacctgaagccttcgaagccaacagattctacaccgtgatcaacaaaaagagcggcgagatcgtgcccatggaggtgaacttcaacttcgacgaccccaacctgatcatcctgcctctggcctttggcaagagacagggcagagaattcatctggaacgacctgctgtccctggaaaccggcagcctgaagctggccaacggaagagtgatcgagaagacactgtacaacagaagaacccggcaggatgagcctgccctgttcgtggccctgaccttcgagcggcgggaggtcctggactcctccaatatcaaaccaatgaacctgatcggcgtggcaagaggcgaaaacatccccgccgtgatcgccctgaccgaccccgagggctgcccactgagccggtttaaggatagcctgggaaacccaacccacatcctgagaatcggcgagagctataaggagaagcagcggaccatccaggccaagaaggaggtggagcagcggagagccggcggctacagccggaagtacgccagcaaagccaagaatctggcagacgatatggtgagaaacaccgctagagatctgctgtactacgccgtgacccaggatgccatgctgatcttcgccaacctgagccggggcttcggccggcagggcaagcggaccttcatggccgagagacagtacacacggatggaggactggctgaccgccaagctggcctacgagggcctgagcaagacctacctgtccaagacactggcccagtacacctccaagacatgcagcaactgtgggtttaccatcaccagcgccgactacgacagggtgctggagaagctgaagaagacagcaacaggctggatgaccacaattaacggcaaggagctgaaggtggagggccagattacctactacaacagatacaagagacagaacgtagtcaaggacctgtccgtcgagctggatagactgagcgaagaatctgtgaacaacgacatctcctcctggacaaagggcagaagcggagaagctctgagcctcctgaagaaaagattctcccatagacccgtgcaggagaagttcgtgtgcctgaactgcggcttcgagacacacgcagccgagcaagccgccctgaacatcgccagatcctggctgttcctgcggagccaggagtacaagaaataccagacaaacaagacaaccggcaacaccgataagagagccttcgtcgagacctggcagtccttttaccggaagaagcttaaggaggtgtggaaacctgccgtgcggtctggcggatctggcggaggctccaccagccccaagaaaaagagaaaagtctaagctgccttctgcggggcttgccttctggccatgcccttcttctctcccttgcacctgtacctcttggtctttgaataaagcctgagtaggaaggctagcaaaaaaaaaaaaaaaaaaaaaaaaaaaaaaaaaaaaaaaaaaaaaaaaaaaaaaaaaaaaaaaaaaaaaaaaaaaaaaaa

SEQ ID NO: 13384 - RNA, 5785 nt, synthetic construct
  source 1..5785: mol_type = other RNA
aggaaataagagagaaaagaagagtaagaagaaatataagagccaccatggcccctaagaagaagcgtaaagtgagccggatggaacgcctcgtctacgaggtgcggcagaagtgcagaaacatcgaggacatctgcatctcctgcggatctctgaacgtgaccctggagcacccactgttcatcggcggcatgtgccagaactgtaaaaactgttttctggagtgtgcctatcaatacgacgatgacggctaccagagctactgcaccatctgttgcggcggaagagaggtgctgatgtgtggaaataacaactgctgccggtgcttctgcgtggaatgcgtggacctgctggtgggccccggcgccgcccaggccgctattaaggaagatccttggaactgctacatgtgcggccacaagggcacatacggcctgctgagacggagagaggactggcctagcagactgcagatgttcttcgccaataaccacgaccaggagttcgacccccctaaggtgtaccctcccgtccccgccgagaagagaaagcccatccgggtcctgagcctgttcgatggcatcgccaccggtctgctggtgctgaaggacctgggcatccaggtggataggtacattgcctccgaggtgtgcgaggactccatcaccgtgggaatggtgcgtcatcagggcaagatcatgtacgtgggcgacgtgcggagcgtgacacagaagcatatccaggagtggggccctttcgacctggtgatcggcggcagcccttgcaatgacctgagcatcgtgaacccagcccggaagggcctgtacgagggaaccggcagactgttcttcgagttttacagactgctgcacgacgcccggcctaaggaaggcgacgaccggcccttcttttggctgttcgagaatgtggtggccatgggagtcagcgacaagcgggatattagccggttcctggagagcaaccccgtgatgatcgatgccaaggaagtgagcgccgcccaccgggccagatacttctggggcaatctgcctggcatgaacagacccctggccagcaccgtgaacgacaagctggagctgcaggagtgcctggagcacggccggatcgccaagttcagcaaggtgagaaccatcaccacccgaagcaacagcatcaaacaaggcaaggaccagcactttcctgtgttcatgaacgagaaggaggacatcctgtggtgtaccgagatggagagagtgttcgggttcccagtccactacacagatgtcagcaacatgtctagactggccagacagagactgctgggaagaagctggtccgtccctgtgatcagacacctgttcgcccctctgaaggagtacttcgcctgcgtgagcagcggcaacagcaacgccaacagccggggccccagcttctctagcggcctggtgccactgtccctgagagggagccacatgggccccatggagatctacaaaaccgtgagcgcctggaagcggcagcctgtgcgcgtgctgagcctgtttcggaatatcgataaagtcctgaaaagcctgggattcctggagagcggctctggctccggcggtggcaccctgaagtacgtggaggatgtgacaaacgtggtcagacgggatgtggagaagtggggccccttcgatctggtgtacggcagcacccaacccctgggcagctcttgtgaccggtgccctggctggtacatgtttcagttccaccggatcctgcagtacgccctgccgagacaggagtcccagcggccattcttttggattttcatggacaacttgctgctgaccgaggatgaccaggaaactaccactcggttcctgcagaccgaagccgtgaccctgcaggacgtgagaggccgggactaccagaacgccatgcgggtgtggtccaacatccctggactgaaaagcaagcacgcacctctgacccctaaagaagaggagtacctgcaggcccaggtgcggagcagaagcaagctggacgcccctaaggtggatctgctggtgaagaattgcctcctgcccctgagagagtacttcaagtatttcagccagaatagtctgcccctgggaggcagcggcggcggcatgggcctgctgaccttcagggacgtggccatcgagttcagcctggaggagtggcagtgcctggacaccgcccagaagaacctgtacaggaacgtgatgctggagaactacaggaacctggccttcctgggcgtggccgtgagcaagcccgacctgatcatctgcctggagaaggacaaggagccctggaacatgaagaggcacgagatggtggacgagccccccggcctgaccgtgagcaacggcggcccaagcagcggcgcccctcctcccagcggcggcagcccagccggctccccaacctctaccgaggagggcacctctgagtccgccacccccgagagcggccctggcacctccaccgagcccagcgagggcagcgcacccggcagccctgccggcagccccacctccacagaggagggaaccagcaccgagcccagcgaaggcagcgccccaggcaccagcaccgagcctagtgagcaggagattaaacggatcaacaagatcagaagaagacttgtgaaagacagcaacaccaagaaggccggcaagacaggccccatgaaaaccctgctggttagagtgatgacacccgatctgagagagcggctggaaaacctgagaaagaagcctgaaaatatcccccagcccatcagcaatacatctagagccaacctgaataagctgctgaccgattacaccgaaatgaagaaggcgatcctgcatgtgtactgggaagagttccagaaggaccctgtgggcctgatgagccgggtggcccagcctgccagcaagaagatcgatcagaacaagctgaaacctgagatggacgagaagggcaacctgaccaccgccggctttgcctgctctcagtgtggccagcccctgttcgtgtacaagctggagcaggtgtctgagaagggcaaggcttacaccaactacttcggacggtgcaatgtggccgagcacgaaaagctgatcctgctggcccagctgaagcccgagaaggatagcgacgaagccgtgacatatagcctgggaaagtttgggcagagggccctggatttctacagcattcatgtgaccaaggagtccacccaccccgtgaagcccctggcccagatcgccggaaacagatacgcctccggacctgtgggaaaggccctgagcgacgcatgtatgggcacaatcgcctccttcctgtctaagtaccaggacatcatcatcgaacaccagaaggtggtgaagggcaaccagaagagactggagagcctgcgggagctggccggcaaggaaaacctggaataccctagcgtgaccctgccacctcagcctcacaccaaggagggcgttgatgcctacaacgaagtgatcgcccgggtgcgaatgtgggtgaacctgaacctgtggcagaagctgaagctaagcagagatgatgccaagcctctgctgagactgaagggattcccttcctttcctctggtcgagagacaggccaacgaagtggactggtgggacatggtgtgtaacgtgaagaagctgatcaacgagaaaaaggaggatggcaaggtgttttggcagaatctggctggctacaagagacaggaagccctgagaccatacctgagcagcgaggaagatcggaagaagggaaagaaattcgctcggtaccagctgggcgacctgctgctgcacctggaaaagaagcacggcgaggactggggaaaggtgtacgacgaggcctgggagcggattgacaagaaagtggaaggcctgagcaagcacatcaagctggaagaggaacggagaagcgaggacgcccagagcaaggccgccctgaccgactggctgcgggctaaggccagcttcgtgatcgagggcctgaaggaggccgacaaggacgagttctgcagatgcgagctgaagctgcagaagtggtacggggacctgcggggaaagcccttcgccatcgaagccgagaacagcatcctggacatcagcggcttcagcaagcagtacaactgtgccttcatctggcagaaggacggcgtgaagaagctgaacctgtacctgatcatcaactacttcaagggcggcaagctgcggttcaagaagatcaaacctgaagccttcgaagccaacagattctacaccgtgatcaacaaaaagagcggcgagatcgtgcccatggaggtgaacttcaacttcgacgaccccaacctgatcatcctgcctctggcctttggcaagagacagggcagagaattcatctggaacgacctgctgtccctggaaaccggcagcctgaagctggccaacggaagagtgatcgagaagacactgtacaacagaagaacccggcaggatgagcctgccctgttcgtggccctgaccttcgagcggcgggaggtcctggactcctccaatatcaaaccaatgaacctgatcggcgtggcaagaggcgaaaacatccccgccgtgatcgccctgaccgaccccgagggctgcccactgagccggtttaaggatagcctgggaaacccaacccacatcctgagaatcggcgagagctataaggagaagcagcggaccatccaggccaagaaggaggtggagcagcggagagccggcggctacagccggaagtacgccagcaaagccaagaatctggcagacgatatggtgagaaacaccgctagagatctgctgtactacgccgtgacccaggatgccatgctgatcttcgccaacctgagccggggcttcggccggcagggcaagcggaccttcatggccgagagacagtacacacggatggaggactggctgaccgccaagctggcctacgagggcctgagcaagacctacctgtccaagacactggcccagtacacctccaagacatgcagcaactgtgggtttaccatcaccagcgccgactacgacagggtgctggagaagctgaagaagacagcaacaggctggatgaccacaattaacggcaaggagctgaaggtggagggccagattacctactacaacagatacaagagacagaacgtagtcaaggacctgtccgtcgagctggatagactgagcgaagaatctgtgaacaacgacatctcctcctggacaaagggcagaagcggagaagctctgagcctcctgaagaaaagattctcccatagacccgtgcaggagaagttcgtgtgcctgaactgcggcttcgagacacacgcagccgagcaagccgccctgaacatcgccagatcctggctgttcctgcggagccaggagtacaagaaataccagacaaacaagacaaccggcaacaccgataagagagccttcgtcgagacctggcagtccttttaccggaagaagcttaaggaggtgtggaaacctgccgtgcggtctggcggatctggcggaggctccaccagccccaagaaaaagagaaaagtctaagctgccttctgcggggcttgccttctggccatgcccttcttctctcccttgcacctgtacctcttggtctttgaataaagcctgagtaggaaggctagcaaaaaaaaaaaaaaaaaaaaaaaaaaaaaaaaaaaaaaaaaaaaaaaaaaaaaaaaaaaaaaaaaaaaaaaaaaaaaaaa

SEQ ID NO: 13385 - RNA, 5785 nt, synthetic construct
  source 1..5785: mol_type = other RNA
aggaaataagagagaaaagaagagtaagaagaaatataagagccaccatggcccctaagaagaagcgtaaagtgagccggatggaacgcctcgtctacgaggtgcggcagaagtgcagaaacatcgaggacatctgcatctcctgcggatctctgaacgtgaccctggagcacccactgttcatcggcggcatgtgccagaactgtaaaaactgttttctggagtgtgcctatcaatacgacgatgacggctaccagagctactgcaccatctgttgcggcggaagagaggtgctgatgtgtggaaataacaactgctgccggtgcttctgcgtggaatgcgtggacctgctggtgggccccggcgccgcccaggccgctattaaggaagatccttggaactgctacatgtgcggccacaagggcacatacggcctgctgagacggagagaggactggcctagcagactgcagatgttcttcgccaataaccacgaccaggagttcgacccccctaaggtgtaccctcccgtccccgccgagaagagaaagcccatccgggtcctgagcctgttcgatggcatcgccaccggtctgctggtgctgaaggacctgggcatccaggtggataggtacattgcctccgaggtgtgcgaggactccatcaccgtgggaatggtgcgtcatcagggcaagatcatgtacgtgggcgacgtgcggagcgtgacacagaagcatatccaggagtggggccctttcgacctggtgatcggcggcagcccttgcaatgacctgagcatcgtgaacccagcccggaagggcctgtacgagggaaccggcagactgttcttcgagttttacagactgctgcacgacgcccggcctaaggaaggcgacgaccggcccttcttttggctgttcgagaatgtggtggccatgggagtcagcgacaagcgggatattagccggttcctggagagcaaccccgtgatgatcgatgccaaggaagtgagcgccgcccaccgggccagatacttctggggcaatctgcctggcatgaacagacccctggccagcaccgtgaacgacaagctggagctgcaggagtgcctggagcacggccggatcgccaagttcagcaaggtgagaaccatcaccacccgaagcaacagcatcaaacaaggcaaggaccagcactttcctgtgttcatgaacgagaaggaggacatcctgtggtgtaccgagatggagagagtgttcgggttcccagtccactacacagatgtcagcaacatgtctagactggccagacagagactgctgggaagaagctggtccgtccctgtgatcagacacctgttcgcccctctgaaggagtacttcgcctgcgtgagcagcggcaacagcaacgccaacagccggggccccagcttctctagcggcctggtgccactgtccctgagagggagccacatgggccccatggagatctacaaaaccgtgagcgcctggaagcggcagcctgtgcgcgtgctgagcctgtttcggaatatcgataaagtcctgaaaagcctgggattcctggagagcggctctggctccggcggtggcaccctgaagtacgtggaggatgtgacaaacgtggtcagacgggatgtggagaagtggggccccttcgatctggtgtacggcagcacccaacccctgggcagctcttgtgaccggtgccctggctggtacatgtttcagttccaccggatcctgcagtacgccctgccgagacaggagtcccagcggccattcttttggattttcatggacaacttgctgctgaccgaggatgaccaggaaactaccactcggttcctgcagaccgaagccgtgaccctgcaggacgtgagaggccgggactaccagaacgccatgcgggtgtggtccaacatccctggactgaaaagcaagcacgcacctctgacccctaaagaagaggagtacctgcaggcccaggtgcggagcagaagcaagctggacgcccctaaggtggatctgctggtgaagaattgcctcctgcccctgagagagtacttcaagtatttcagccagaatagtctgcccctgggaggcagcggcggcggcagccccggcctgctgaccttcagggacgtggtgatcgagttcagcctggaggagtggcagtgcctggaccacgcccagcagaacctgtacagggacgtgatgctggagaactacaggaacctggtgagcctgggcatcgccgtgagcaagcccgacctgatcacctgcctggagcagaacaaggacccctggaacatcaagaggaacgagatggtgaccaagcaccccgtgatgtgcagccacggcggcccaagcagcggcgcccctcctcccagcggcggcagcccagccggctccccaacctctaccgaggagggcacctctgagtccgccacccccgagagcggccctggcacctccaccgagcccagcgagggcagcgcacccggcagccctgccggcagccccacctccacagaggagggaaccagcaccgagcccagcgaaggcagcgccccaggcaccagcaccgagcctagtgagcaggagattaaacggatcaacaagatcagaagaagacttgtgaaagacagcaacaccaagaaggccggcaagacaggccccatgaaaaccctgctggttagagtgatgacacccgatctgagagagcggctggaaaacctgagaaagaagcctgaaaatatcccccagcccatcagcaatacatctagagccaacctgaataagctgctgaccgattacaccgaaatgaagaaggcgatcctgcatgtgtactgggaagagttccagaaggaccctgtgggcctgatgagccgggtggcccagcctgccagcaagaagatcgatcagaacaagctgaaacctgagatggacgagaagggcaacctgaccaccgccggctttgcctgctctcagtgtggccagcccctgttcgtgtacaagctggagcaggtgtctgagaagggcaaggcttacaccaactacttcggacggtgcaatgtggccgagcacgaaaagctgatcctgctggcccagctgaagcccgagaaggatagcgacgaagccgtgacatatagcctgggaaagtttgggcagagggccctggatttctacagcattcatgtgaccaaggagtccacccaccccgtgaagcccctggcccagatcgccggaaacagatacgcctccggacctgtgggaaaggccctgagcgacgcatgtatgggcacaatcgcctccttcctgtctaagtaccaggacatcatcatcgaacaccagaaggtggtgaagggcaaccagaagagactggagagcctgcgggagctggccggcaaggaaaacctggaataccctagcgtgaccctgccacctcagcctcacaccaaggagggcgttgatgcctacaacgaagtgatcgcccgggtgcgaatgtgggtgaacctgaacctgtggcagaagctgaagctaagcagagatgatgccaagcctctgctgagactgaagggattcccttcctttcctctggtcgagagacaggccaacgaagtggactggtgggacatggtgtgtaacgtgaagaagctgatcaacgagaaaaaggaggatggcaaggtgttttggcagaatctggctggctacaagagacaggaagccctgagaccatacctgagcagcgaggaagatcggaagaagggaaagaaattcgctcggtaccagctgggcgacctgctgctgcacctggaaaagaagcacggcgaggactggggaaaggtgtacgacgaggcctgggagcggattgacaagaaagtggaaggcctgagcaagcacatcaagctggaagaggaacggagaagcgaggacgcccagagcaaggccgccctgaccgactggctgcgggctaaggccagcttcgtgatcgagggcctgaaggaggccgacaaggacgagttctgcagatgcgagctgaagctgcagaagtggtacggggacctgcggggaaagcccttcgccatcgaagccgagaacagcatcctggacatcagcggcttcagcaagcagtacaactgtgccttcatctggcagaaggacggcgtgaagaagctgaacctgtacctgatcatcaactacttcaagggcggcaagctgcggttcaagaagatcaaacctgaagccttcgaagccaacagattctacaccgtgatcaacaaaaagagcggcgagatcgtgcccatggaggtgaacttcaacttcgacgaccccaacctgatcatcctgcctctggcctttggcaagagacagggcagagaattcatctggaacgacctgctgtccctggaaaccggcagcctgaagctggccaacggaagagtgatcgagaagacactgtacaacagaagaacccggcaggatgagcctgccctgttcgtggccctgaccttcgagcggcgggaggtcctggactcctccaatatcaaaccaatgaacctgatcggcgtggcaagaggcgaaaacatccccgccgtgatcgccctgaccgaccccgagggctgcccactgagccggtttaaggatagcctgggaaacccaacccacatcctgagaatcggcgagagctataaggagaagcagcggaccatccaggccaagaaggaggtggagcagcggagagccggcggctacagccggaagtacgccagcaaagccaagaatctggcagacgatatggtgagaaacaccgctagagatctgctgtactacgccgtgacccaggatgccatgctgatcttcgccaacctgagccggggcttcggccggcagggcaagcggaccttcatggccgagagacagtacacacggatggaggactggctgaccgccaagctggcctacgagggcctgagcaagacctacctgtccaagacactggcccagtacacctccaagacatgcagcaactgtgggtttaccatcaccagcgccgactacgacagggtgctggagaagctgaagaagacagcaacaggctggatgaccacaattaacggcaaggagctgaaggtggagggccagattacctactacaacagatacaagagacagaacgtagtcaaggacctgtccgtcgagctggatagactgagcgaagaatctgtgaacaacgacatctcctcctggacaaagggcagaagcggagaagctctgagcctcctgaagaaaagattctcccatagacccgtgcaggagaagttcgtgtgcctgaactgcggcttcgagacacacgcagccgagcaagccgccctgaacatcgccagatcctggctgttcctgcggagccaggagtacaagaaataccagacaaacaagacaaccggcaacaccgataagagagccttcgtcgagacctggcagtccttttaccggaagaagcttaaggaggtgtggaaacctgccgtgcggtctggcggatctggcggaggctccaccagccccaagaaaaagagaaaagtctaagctgccttctgcggggcttgccttctggccatgcccttcttctctcccttgcacctgtacctcttggtctttgaataaagcctgagtaggaaggctagcaaaaaaaaaaaaaaaaaaaaaaaaaaaaaaaaaaaaaaaaaaaaaaaaaaaaaaaaaaaaaaaaaaaaaaaaaaaaaaaa

SEQ ID NO: 13386 - RNA, 5785 nt, synthetic construct
  source 1..5785: mol_type = other RNA
aggaaataagagagaaaagaagagtaagaagaaatataagagccaccatggcccctaagaagaagcgtaaagtgagccggatggaacgcctcgtctacgaggtgcggcagaagtgcagaaacatcgaggacatctgcatctcctgcggatctctgaacgtgaccctggagcacccactgttcatcggcggcatgtgccagaactgtaaaaactgttttctggagtgtgcctatcaatacgacgatgacggctaccagagctactgcaccatctgttgcggcggaagagaggtgctgatgtgtggaaataacaactgctgccggtgcttctgcgtggaatgcgtggacctgctggtgggccccggcgccgcccaggccgctattaaggaagatccttggaactgctacatgtgcggccacaagggcacatacggcctgctgagacggagagaggactggcctagcagactgcagatgttcttcgccaataaccacgaccaggagttcgacccccctaaggtgtaccctcccgtccccgccgagaagagaaagcccatccgggtcctgagcctgttcgatggcatcgccaccggtctgctggtgctgaaggacctgggcatccaggtggataggtacattgcctccgaggtgtgcgaggactccatcaccgtgggaatggtgcgtcatcagggcaagatcatgtacgtgggcgacgtgcggagcgtgacacagaagcatatccaggagtggggccctttcgacctggtgatcggcggcagcccttgcaatgacctgagcatcgtgaacccagcccggaagggcctgtacgagggaaccggcagactgttcttcgagttttacagactgctgcacgacgcccggcctaaggaaggcgacgaccggcccttcttttggctgttcgagaatgtggtggccatgggagtcagcgacaagcgggatattagccggttcctggagagcaaccccgtgatgatcgatgccaaggaagtgagcgccgcccaccgggccagatacttctggggcaatctgcctggcatgaacagacccctggccagcaccgtgaacgacaagctggagctgcaggagtgcctggagcacggccggatcgccaagttcagcaaggtgagaaccatcaccacccgaagcaacagcatcaaacaaggcaaggaccagcactttcctgtgttcatgaacgagaaggaggacatcctgtggtgtaccgagatggagagagtgttcgggttcccagtccactacacagatgtcagcaacatgtctagactggccagacagagactgctgggaagaagctggtccgtccctgtgatcagacacctgttcgcccctctgaaggagtacttcgcctgcgtgagcagcggcaacagcaacgccaacagccggggccccagcttctctagcggcctggtgccactgtccctgagagggagccacatgggccccatggagatctacaaaaccgtgagcgcctggaagcggcagcctgtgcgcgtgctgagcctgtttcggaatatcgataaagtcctgaaaagcctgggattcctggagagcggctctggctccggcggtggcaccctgaagtacgtggaggatgtgacaaacgtggtcagacgggatgtggagaagtggggccccttcgatctggtgtacggcagcacccaacccctgggcagctcttgtgaccggtgccctggctggtacatgtttcagttccaccggatcctgcagtacgccctgccgagacaggagtcccagcggccattcttttggattttcatggacaacttgctgctgaccgaggatgaccaggaaactaccactcggttcctgcagaccgaagccgtgaccctgcaggacgtgagaggccgggactaccagaacgccatgcgggtgtggtccaacatccctggactgaaaagcaagcacgcacctctgacccctaaagaagaggagtacctgcaggcccaggtgcggagcagaagcaagctggacgcccctaaggtggatctgctggtgaagaattgcctcctgcccctgagagagtacttcaagtatttcagccagaatagtctgcccctgggaggcagcggcggcggcagccagggcctggtgaccttcagggacgtggccctggacttcagccaggaggagtgggagtggctggaccccagccagaaggacctgtacagggacgtgatgctggagaactacaggaacctggtgtggctgggcctgagcatcagcaagcccaacatgatcagcctgctggagcagggcaaggagccctggatggtggagaaggagatgagcgacggccagtgcgccgactgggagagctggggcggcccaagcagcggcgcccctcctcccagcggcggcagcccagccggctccccaacctctaccgaggagggcacctctgagtccgccacccccgagagcggccctggcacctccaccgagcccagcgagggcagcgcacccggcagccctgccggcagccccacctccacagaggagggaaccagcaccgagcccagcgaaggcagcgccccaggcaccagcaccgagcctagtgagcaggagattaaacggatcaacaagatcagaagaagacttgtgaaagacagcaacaccaagaaggccggcaagacaggccccatgaaaaccctgctggttagagtgatgacacccgatctgagagagcggctggaaaacctgagaaagaagcctgaaaatatcccccagcccatcagcaatacatctagagccaacctgaataagctgctgaccgattacaccgaaatgaagaaggcgatcctgcatgtgtactgggaagagttccagaaggaccctgtgggcctgatgagccgggtggcccagcctgccagcaagaagatcgatcagaacaagctgaaacctgagatggacgagaagggcaacctgaccaccgccggctttgcctgctctcagtgtggccagcccctgttcgtgtacaagctggagcaggtgtctgagaagggcaaggcttacaccaactacttcggacggtgcaatgtggccgagcacgaaaagctgatcctgctggcccagctgaagcccgagaaggatagcgacgaagccgtgacatatagcctgggaaagtttgggcagagggccctggatttctacagcattcatgtgaccaaggagtccacccaccccgtgaagcccctggcccagatcgccggaaacagatacgcctccggacctgtgggaaaggccctgagcgacgcatgtatgggcacaatcgcctccttcctgtctaagtaccaggacatcatcatcgaacaccagaaggtggtgaagggcaaccagaagagactggagagcctgcgggagctggccggcaaggaaaacctggaataccctagcgtgaccctgccacctcagcctcacaccaaggagggcgttgatgcctacaacgaagtgatcgcccgggtgcgaatgtgggtgaacctgaacctgtggcagaagctgaagctaagcagagatgatgccaagcctctgctgagactgaagggattcccttcctttcctctggtcgagagacaggccaacgaagtggactggtgggacatggtgtgtaacgtgaagaagctgatcaacgagaaaaaggaggatggcaaggtgttttggcagaatctggctggctacaagagacaggaagccctgagaccatacctgagcagcgaggaagatcggaagaagggaaagaaattcgctcggtaccagctgggcgacctgctgctgcacctggaaaagaagcacggcgaggactggggaaaggtgtacgacgaggcctgggagcggattgacaagaaagtggaaggcctgagcaagcacatcaagctggaagaggaacggagaagcgaggacgcccagagcaaggccgccctgaccgactggctgcgggctaaggccagcttcgtgatcgagggcctgaaggaggccgacaaggacgagttctgcagatgcgagctgaagctgcagaagtggtacggggacctgcggggaaagcccttcgccatcgaagccgagaacagcatcctggacatcagcggcttcagcaagcagtacaactgtgccttcatctggcagaaggacggcgtgaagaagctgaacctgtacctgatcatcaactacttcaagggcggcaagctgcggttcaagaagatcaaacctgaagccttcgaagccaacagattctacaccgtgatcaacaaaaagagcggcgagatcgtgcccatggaggtgaacttcaacttcgacgaccccaacctgatcatcctgcctctggcctttggcaagagacagggcagagaattcatctggaacgacctgctgtccctggaaaccggcagcctgaagctggccaacggaagagtgatcgagaagacactgtacaacagaagaacccggcaggatgagcctgccctgttcgtggccctgaccttcgagcggcgggaggtcctggactcctccaatatcaaaccaatgaacctgatcggcgtggcaagaggcgaaaacatccccgccgtgatcgccctgaccgaccccgagggctgcccactgagccggtttaaggatagcctgggaaacccaacccacatcctgagaatcggcgagagctataaggagaagcagcggaccatccaggccaagaaggaggtggagcagcggagagccggcggctacagccggaagtacgccagcaaagccaagaatctggcagacgatatggtgagaaacaccgctagagatctgctgtactacgccgtgacccaggatgccatgctgatcttcgccaacctgagccggggcttcggccggcagggcaagcggaccttcatggccgagagacagtacacacggatggaggactggctgaccgccaagctggcctacgagggcctgagcaagacctacctgtccaagacactggcccagtacacctccaagacatgcagcaactgtgggtttaccatcaccagcgccgactacgacagggtgctggagaagctgaagaagacagcaacaggctggatgaccacaattaacggcaaggagctgaaggtggagggccagattacctactacaacagatacaagagacagaacgtagtcaaggacctgtccgtcgagctggatagactgagcgaagaatctgtgaacaacgacatctcctcctggacaaagggcagaagcggagaagctctgagcctcctgaagaaaagattctcccatagacccgtgcaggagaagttcgtgtgcctgaactgcggcttcgagacacacgcagccgagcaagccgccctgaacatcgccagatcctggctgttcctgcggagccaggagtacaagaaataccagacaaacaagacaaccggcaacaccgataagagagccttcgtcgagacctggcagtccttttaccggaagaagcttaaggaggtgtggaaacctgccgtgcggtctggcggatctggcggaggctccaccagccccaagaaaaagagaaaagtctaagctgccttctgcggggcttgccttctggccatgcccttcttctctcccttgcacctgtacctcttggtctttgaataaagcctgagtaggaaggctagcaaaaaaaaaaaaaaaaaaaaaaaaaaaaaaaaaaaaaaaaaaaaaaaaaaaaaaaaaaaaaaaaaaaaaaaaaaaaaaaa

SEQ ID NO: 13387 - RNA, 5785 nt, synthetic construct
  source 1..5785: mol_type = other RNA
aggaaataagagagaaaagaagagtaagaagaaatataagagccaccatggcccctaagaagaagcgtaaagtgagccggatggaacgcctcgtctacgaggtgcggcagaagtgcagaaacatcgaggacatctgcatctcctgcggatctctgaacgtgaccctggagcacccactgttcatcggcggcatgtgccagaactgtaaaaactgttttctggagtgtgcctatcaatacgacgatgacggctaccagagctactgcaccatctgttgcggcggaagagaggtgctgatgtgtggaaataacaactgctgccggtgcttctgcgtggaatgcgtggacctgctggtgggccccggcgccgcccaggccgctattaaggaagatccttggaactgctacatgtgcggccacaagggcacatacggcctgctgagacggagagaggactggcctagcagactgcagatgttcttcgccaataaccacgaccaggagttcgacccccctaaggtgtaccctcccgtccccgccgagaagagaaagcccatccgggtcctgagcctgttcgatggcatcgccaccggtctgctggtgctgaaggacctgggcatccaggtggataggtacattgcctccgaggtgtgcgaggactccatcaccgtgggaatggtgcgtcatcagggcaagatcatgtacgtgggcgacgtgcggagcgtgacacagaagcatatccaggagtggggccctttcgacctggtgatcggcggcagcccttgcaatgacctgagcatcgtgaacccagcccggaagggcctgtacgagggaaccggcagactgttcttcgagttttacagactgctgcacgacgcccggcctaaggaaggcgacgaccggcccttcttttggctgttcgagaatgtggtggccatgggagtcagcgacaagcgggatattagccggttcctggagagcaaccccgtgatgatcgatgccaaggaagtgagcgccgcccaccgggccagatacttctggggcaatctgcctggcatgaacagacccctggccagcaccgtgaacgacaagctggagctgcaggagtgcctggagcacggccggatcgccaagttcagcaaggtgagaaccatcaccacccgaagcaacagcatcaaacaaggcaaggaccagcactttcctgtgttcatgaacgagaaggaggacatcctgtggtgtaccgagatggagagagtgttcgggttcccagtccactacacagatgtcagcaacatgtctagactggccagacagagactgctgggaagaagctggtccgtccctgtgatcagacacctgttcgcccctctgaaggagtacttcgcctgcgtgagcagcggcaacagcaacgccaacagccggggccccagcttctctagcggcctggtgccactgtccctgagagggagccacatgggccccatggagatctacaaaaccgtgagcgcctggaagcggcagcctgtgcgcgtgctgagcctgtttcggaatatcgataaagtcctgaaaagcctgggattcctggagagcggctctggctccggcggtggcaccctgaagtacgtggaggatgtgacaaacgtggtcagacgggatgtggagaagtggggccccttcgatctggtgtacggcagcacccaacccctgggcagctcttgtgaccggtgccctggctggtacatgtttcagttccaccggatcctgcagtacgccctgccgagacaggagtcccagcggccattcttttggattttcatggacaacttgctgctgaccgaggatgaccaggaaactaccactcggttcctgcagaccgaagccgtgaccctgcaggacgtgagaggccgggactaccagaacgccatgcgggtgtggtccaacatccctggactgaaaagcaagcacgcacctctgacccctaaagaagaggagtacctgcaggcccaggtgcggagcagaagcaagctggacgcccctaaggtggatctgctggtgaagaattgcctcctgcccctgagagagtacttcaagtatttcagccagaatagtctgcccctgggaggcagcggcggcggcatcggcagcgacctgttcagggacgtggccgtggtgttcagcagggaggagtgggagcagctgacccccgcccagagggacctgtacagggacgtgatgctggagatctacagcatcctgctgagcctgggccccgacctggccgtgagcaagcccgacgtgatcagcttcctggagcagggcaaggagccctggagggtggaggaggccgtgaccggcggcctgtgccccgtgctggagagcggcggcccaagcagcggcgcccctcctcccagcggcggcagcccagccggctccccaacctctaccgaggagggcacctctgagtccgccacccccgagagcggccctggcacctccaccgagcccagcgagggcagcgcacccggcagccctgccggcagccccacctccacagaggagggaaccagcaccgagcccagcgaaggcagcgccccaggcaccagcaccgagcctagtgagcaggagattaaacggatcaacaagatcagaagaagacttgtgaaagacagcaacaccaagaaggccggcaagacaggccccatgaaaaccctgctggttagagtgatgacacccgatctgagagagcggctggaaaacctgagaaagaagcctgaaaatatcccccagcccatcagcaatacatctagagccaacctgaataagctgctgaccgattacaccgaaatgaagaaggcgatcctgcatgtgtactgggaagagttccagaaggaccctgtgggcctgatgagccgggtggcccagcctgccagcaagaagatcgatcagaacaagctgaaacctgagatggacgagaagggcaacctgaccaccgccggctttgcctgctctcagtgtggccagcccctgttcgtgtacaagctggagcaggtgtctgagaagggcaaggcttacaccaactacttcggacggtgcaatgtggccgagcacgaaaagctgatcctgctggcccagctgaagcccgagaaggatagcgacgaagccgtgacatatagcctgggaaagtttgggcagagggccctggatttctacagcattcatgtgaccaaggagtccacccaccccgtgaagcccctggcccagatcgccggaaacagatacgcctccggacctgtgggaaaggccctgagcgacgcatgtatgggcacaatcgcctccttcctgtctaagtaccaggacatcatcatcgaacaccagaaggtggtgaagggcaaccagaagagactggagagcctgcgggagctggccggcaaggaaaacctggaataccctagcgtgaccctgccacctcagcctcacaccaaggagggcgttgatgcctacaacgaagtgatcgcccgggtgcgaatgtgggtgaacctgaacctgtggcagaagctgaagctaagcagagatgatgccaagcctctgctgagactgaagggattcccttcctttcctctggtcgagagacaggccaacgaagtggactggtgggacatggtgtgtaacgtgaagaagctgatcaacgagaaaaaggaggatggcaaggtgttttggcagaatctggctggctacaagagacaggaagccctgagaccatacctgagcagcgaggaagatcggaagaagggaaagaaattcgctcggtaccagctgggcgacctgctgctgcacctggaaaagaagcacggcgaggactggggaaaggtgtacgacgaggcctgggagcggattgacaagaaagtggaaggcctgagcaagcacatcaagctggaagaggaacggagaagcgaggacgcccagagcaaggccgccctgaccgactggctgcgggctaaggccagcttcgtgatcgagggcctgaaggaggccgacaaggacgagttctgcagatgcgagctgaagctgcagaagtggtacggggacctgcggggaaagcccttcgccatcgaagccgagaacagcatcctggacatcagcggcttcagcaagcagtacaactgtgccttcatctggcagaaggacggcgtgaagaagctgaacctgtacctgatcatcaactacttcaagggcggcaagctgcggttcaagaagatcaaacctgaagccttcgaagccaacagattctacaccgtgatcaacaaaaagagcggcgagatcgtgcccatggaggtgaacttcaacttcgacgaccccaacctgatcatcctgcctctggcctttggcaagagacagggcagagaattcatctggaacgacctgctgtccctggaaaccggcagcctgaagctggccaacggaagagtgatcgagaagacactgtacaacagaagaacccggcaggatgagcctgccctgttcgtggccctgaccttcgagcggcgggaggtcctggactcctccaatatcaaaccaatgaacctgatcggcgtggcaagaggcgaaaacatccccgccgtgatcgccctgaccgaccccgagggctgcccactgagccggtttaaggatagcctgggaaacccaacccacatcctgagaatcggcgagagctataaggagaagcagcggaccatccaggccaagaaggaggtggagcagcggagagccggcggctacagccggaagtacgccagcaaagccaagaatctggcagacgatatggtgagaaacaccgctagagatctgctgtactacgccgtgacccaggatgccatgctgatcttcgccaacctgagccggggcttcggccggcagggcaagcggaccttcatggccgagagacagtacacacggatggaggactggctgaccgccaagctggcctacgagggcctgagcaagacctacctgtccaagacactggcccagtacacctccaagacatgcagcaactgtgggtttaccatcaccagcgccgactacgacagggtgctggagaagctgaagaagacagcaacaggctggatgaccacaattaacggcaaggagctgaaggtggagggccagattacctactacaacagatacaagagacagaacgtagtcaaggacctgtccgtcgagctggatagactgagcgaagaatctgtgaacaacgacatctcctcctggacaaagggcagaagcggagaagctctgagcctcctgaagaaaagattctcccatagacccgtgcaggagaagttcgtgtgcctgaactgcggcttcgagacacacgcagccgagcaagccgccctgaacatcgccagatcctggctgttcctgcggagccaggagtacaagaaataccagacaaacaagacaaccggcaacaccgataagagagccttcgtcgagacctggcagtccttttaccggaagaagcttaaggaggtgtggaaacctgccgtgcggtctggcggatctggcggaggctccaccagccccaagaaaaagagaaaagtctaagctgccttctgcggggcttgccttctggccatgcccttcttctctcccttgcacctgtacctcttggtctttgaataaagcctgagtaggaaggctagcaaaaaaaaaaaaaaaaaaaaaaaaaaaaaaaaaaaaaaaaaaaaaaaaaaaaaaaaaaaaaaaaaaaaaaaaaaaaaaaa

SEQ ID NO: 13388 - RNA, 5785 nt, synthetic construct
  source 1..5785: mol_type = other RNA
aggaaataagagagaaaagaagagtaagaagaaatataagagccaccatggcccctaagaagaagcgtaaagtgagccggatggaacgcctcgtctacgaggtgcggcagaagtgcagaaacatcgaggacatctgcatctcctgcggatctctgaacgtgaccctggagcacccactgttcatcggcggcatgtgccagaactgtaaaaactgttttctggagtgtgcctatcaatacgacgatgacggctaccagagctactgcaccatctgttgcggcggaagagaggtgctgatgtgtggaaataacaactgctgccggtgcttctgcgtggaatgcgtggacctgctggtgggccccggcgccgcccaggccgctattaaggaagatccttggaactgctacatgtgcggccacaagggcacatacggcctgctgagacggagagaggactggcctagcagactgcagatgttcttcgccaataaccacgaccaggagttcgacccccctaaggtgtaccctcccgtccccgccgagaagagaaagcccatccgggtcctgagcctgttcgatggcatcgccaccggtctgctggtgctgaaggacctgggcatccaggtggataggtacattgcctccgaggtgtgcgaggactccatcaccgtgggaatggtgcgtcatcagggcaagatcatgtacgtgggcgacgtgcggagcgtgacacagaagcatatccaggagtggggccctttcgacctggtgatcggcggcagcccttgcaatgacctgagcatcgtgaacccagcccggaagggcctgtacgagggaaccggcagactgttcttcgagttttacagactgctgcacgacgcccggcctaaggaaggcgacgaccggcccttcttttggctgttcgagaatgtggtggccatgggagtcagcgacaagcgggatattagccggttcctggagagcaaccccgtgatgatcgatgccaaggaagtgagcgccgcccaccgggccagatacttctggggcaatctgcctggcatgaacagacccctggccagcaccgtgaacgacaagctggagctgcaggagtgcctggagcacggccggatcgccaagttcagcaaggtgagaaccatcaccacccgaagcaacagcatcaaacaaggcaaggaccagcactttcctgtgttcatgaacgagaaggaggacatcctgtggtgtaccgagatggagagagtgttcgggttcccagtccactacacagatgtcagcaacatgtctagactggccagacagagactgctgggaagaagctggtccgtccctgtgatcagacacctgttcgcccctctgaaggagtacttcgcctgcgtgagcagcggcaacagcaacgccaacagccggggccccagcttctctagcggcctggtgccactgtccctgagagggagccacatgggccccatggagatctacaaaaccgtgagcgcctggaagcggcagcctgtgcgcgtgctgagcctgtttcggaatatcgataaagtcctgaaaagcctgggattcctggagagcggctctggctccggcggtggcaccctgaagtacgtggaggatgtgacaaacgtggtcagacgggatgtggagaagtggggccccttcgatctggtgtacggcagcacccaacccctgggcagctcttgtgaccggtgccctggctggtacatgtttcagttccaccggatcctgcagtacgccctgccgagacaggagtcccagcggccattcttttggattttcatggacaacttgctgctgaccgaggatgaccaggaaactaccactcggttcctgcagaccgaagccgtgaccctgcaggacgtgagaggccgggactaccagaacgccatgcgggtgtggtccaacatccctggactgaaaagcaagcacgcacctctgacccctaaagaagaggagtacctgcaggcccaggtgcggagcagaagcaagctggacgcccctaaggtggatctgctggtgaagaattgcctcctgcccctgagagagtacttcaagtatttcagccagaatagtctgcccctgggaggcagcggcggcggcatgatcaagagccaggagagcctgaccctggaggacgtggccgtggagttcacctgggaggagtggcagctgctgggccccgcccagaaggacctgtacagggacgtgatgctggagaactacagcaacctggtgagcgtgggctaccaggccagcaagcccgacgccctgttcaagctggagcagggcgagccctggaccgtggagaacgacagccacatctgccccgagatcaagaaggtgggcggcccaagcagcggcgcccctcctcccagcggcggcagcccagccggctccccaacctctaccgaggagggcacctctgagtccgccacccccgagagcggccctggcacctccaccgagcccagcgagggcagcgcacccggcagccctgccggcagccccacctccacagaggagggaaccagcaccgagcccagcgaaggcagcgccccaggcaccagcaccgagcctagtgagcaggagattaaacggatcaacaagatcagaagaagacttgtgaaagacagcaacaccaagaaggccggcaagacaggccccatgaaaaccctgctggttagagtgatgacacccgatctgagagagcggctggaaaacctgagaaagaagcctgaaaatatcccccagcccatcagcaatacatctagagccaacctgaataagctgctgaccgattacaccgaaatgaagaaggcgatcctgcatgtgtactgggaagagttccagaaggaccctgtgggcctgatgagccgggtggcccagcctgccagcaagaagatcgatcagaacaagctgaaacctgagatggacgagaagggcaacctgaccaccgccggctttgcctgctctcagtgtggccagcccctgttcgtgtacaagctggagcaggtgtctgagaagggcaaggcttacaccaactacttcggacggtgcaatgtggccgagcacgaaaagctgatcctgctggcccagctgaagcccgagaaggatagcgacgaagccgtgacatatagcctgggaaagtttgggcagagggccctggatttctacagcattcatgtgaccaaggagtccacccaccccgtgaagcccctggcccagatcgccggaaacagatacgcctccggacctgtgggaaaggccctgagcgacgcatgtatgggcacaatcgcctccttcctgtctaagtaccaggacatcatcatcgaacaccagaaggtggtgaagggcaaccagaagagactggagagcctgcgggagctggccggcaaggaaaacctggaataccctagcgtgaccctgccacctcagcctcacaccaaggagggcgttgatgcctacaacgaagtgatcgcccgggtgcgaatgtgggtgaacctgaacctgtggcagaagctgaagctaagcagagatgatgccaagcctctgctgagactgaagggattcccttcctttcctctggtcgagagacaggccaacgaagtggactggtgggacatggtgtgtaacgtgaagaagctgatcaacgagaaaaaggaggatggcaaggtgttttggcagaatctggctggctacaagagacaggaagccctgagaccatacctgagcagcgaggaagatcggaagaagggaaagaaattcgctcggtaccagctgggcgacctgctgctgcacctggaaaagaagcacggcgaggactggggaaaggtgtacgacgaggcctgggagcggattgacaagaaagtggaaggcctgagcaagcacatcaagctggaagaggaacggagaagcgaggacgcccagagcaaggccgccctgaccgactggctgcgggctaaggccagcttcgtgatcgagggcctgaaggaggccgacaaggacgagttctgcagatgcgagctgaagctgcagaagtggtacggggacctgcggggaaagcccttcgccatcgaagccgagaacagcatcctggacatcagcggcttcagcaagcagtacaactgtgccttcatctggcagaaggacggcgtgaagaagctgaacctgtacctgatcatcaactacttcaagggcggcaagctgcggttcaagaagatcaaacctgaagccttcgaagccaacagattctacaccgtgatcaacaaaaagagcggcgagatcgtgcccatggaggtgaacttcaacttcgacgaccccaacctgatcatcctgcctctggcctttggcaagagacagggcagagaattcatctggaacgacctgctgtccctggaaaccggcagcctgaagctggccaacggaagagtgatcgagaagacactgtacaacagaagaacccggcaggatgagcctgccctgttcgtggccctgaccttcgagcggcgggaggtcctggactcctccaatatcaaaccaatgaacctgatcggcgtggcaagaggcgaaaacatccccgccgtgatcgccctgaccgaccccgagggctgcccactgagccggtttaaggatagcctgggaaacccaacccacatcctgagaatcggcgagagctataaggagaagcagcggaccatccaggccaagaaggaggtggagcagcggagagccggcggctacagccggaagtacgccagcaaagccaagaatctggcagacgatatggtgagaaacaccgctagagatctgctgtactacgccgtgacccaggatgccatgctgatcttcgccaacctgagccggggcttcggccggcagggcaagcggaccttcatggccgagagacagtacacacggatggaggactggctgaccgccaagctggcctacgagggcctgagcaagacctacctgtccaagacactggcccagtacacctccaagacatgcagcaactgtgggtttaccatcaccagcgccgactacgacagggtgctggagaagctgaagaagacagcaacaggctggatgaccacaattaacggcaaggagctgaaggtggagggccagattacctactacaacagatacaagagacagaacgtagtcaaggacctgtccgtcgagctggatagactgagcgaagaatctgtgaacaacgacatctcctcctggacaaagggcagaagcggagaagctctgagcctcctgaagaaaagattctcccatagacccgtgcaggagaagttcgtgtgcctgaactgcggcttcgagacacacgcagccgagcaagccgccctgaacatcgccagatcctggctgttcctgcggagccaggagtacaagaaataccagacaaacaagacaaccggcaacaccgataagagagccttcgtcgagacctggcagtccttttaccggaagaagcttaaggaggtgtggaaacctgccgtgcggtctggcggatctggcggaggctccaccagccccaagaaaaagagaaaagtctaagctgccttctgcggggcttgccttctggccatgcccttcttctctcccttgcacctgtacctcttggtctttgaataaagcctgagtaggaaggctagcaaaaaaaaaaaaaaaaaaaaaaaaaaaaaaaaaaaaaaaaaaaaaaaaaaaaaaaaaaaaaaaaaaaaaaaaaaaaaaaa

SEQ ID NO: 13389 - RNA, 5785 nt, synthetic construct
  source 1..5785: mol_type = other RNA
aggaaataagagagaaaagaagagtaagaagaaatataagagccaccatggcccctaagaagaagcgtaaagtgagccggatggaacgcctcgtctacgaggtgcggcagaagtgcagaaacatcgaggacatctgcatctcctgcggatctctgaacgtgaccctggagcacccactgttcatcggcggcatgtgccagaactgtaaaaactgttttctggagtgtgcctatcaatacgacgatgacggctaccagagctactgcaccatctgttgcggcggaagagaggtgctgatgtgtggaaataacaactgctgccggtgcttctgcgtggaatgcgtggacctgctggtgggccccggcgccgcccaggccgctattaaggaagatccttggaactgctacatgtgcggccacaagggcacatacggcctgctgagacggagagaggactggcctagcagactgcagatgttcttcgccaataaccacgaccaggagttcgacccccctaaggtgtaccctcccgtccccgccgagaagagaaagcccatccgggtcctgagcctgttcgatggcatcgccaccggtctgctggtgctgaaggacctgggcatccaggtggataggtacattgcctccgaggtgtgcgaggactccatcaccgtgggaatggtgcgtcatcagggcaagatcatgtacgtgggcgacgtgcggagcgtgacacagaagcatatccaggagtggggccctttcgacctggtgatcggcggcagcccttgcaatgacctgagcatcgtgaacccagcccggaagggcctgtacgagggaaccggcagactgttcttcgagttttacagactgctgcacgacgcccggcctaaggaaggcgacgaccggcccttcttttggctgttcgagaatgtggtggccatgggagtcagcgacaagcgggatattagccggttcctggagagcaaccccgtgatgatcgatgccaaggaagtgagcgccgcccaccgggccagatacttctggggcaatctgcctggcatgaacagacccctggccagcaccgtgaacgacaagctggagctgcaggagtgcctggagcacggccggatcgccaagttcagcaaggtgagaaccatcaccacccgaagcaacagcatcaaacaaggcaaggaccagcactttcctgtgttcatgaacgagaaggaggacatcctgtggtgtaccgagatggagagagtgttcgggttcccagtccactacacagatgtcagcaacatgtctagactggccagacagagactgctgggaagaagctggtccgtccctgtgatcagacacctgttcgcccctctgaaggagtacttcgcctgcgtgagcagcggcaacagcaacgccaacagccggggccccagcttctctagcggcctggtgccactgtccctgagagggagccacatgggccccatggagatctacaaaaccgtgagcgcctggaagcggcagcctgtgcgcgtgctgagcctgtttcggaatatcgataaagtcctgaaaagcctgggattcctggagagcggctctggctccggcggtggcaccctgaagtacgtggaggatgtgacaaacgtggtcagacgggatgtggagaagtggggccccttcgatctggtgtacggcagcacccaacccctgggcagctcttgtgaccggtgccctggctggtacatgtttcagttccaccggatcctgcagtacgccctgccgagacaggagtcccagcggccattcttttggattttcatggacaacttgctgctgaccgaggatgaccaggaaactaccactcggttcctgcagaccgaagccgtgaccctgcaggacgtgagaggccgggactaccagaacgccatgcgggtgtggtccaacatccctggactgaaaagcaagcacgcacctctgacccctaaagaagaggagtacctgcaggcccaggtgcggagcagaagcaagctggacgcccctaaggtggatctgctggtgaagaattgcctcctgcccctgagagagtacttcaagtatttcagccagaatagtctgcccctgggaggcagcggcggcggcatgttccaggtgaccttcagcgacgtggccatcgacttcagccacgaggagtggggctggctggacagcgcccagagggacctgtacaaggacgtgatggtgcagaactacgagaacctggtgagcctgggcctgagcatccccaagcccaacgtgatcgccctgctggaggagggcaaggacccctggatggtggagaggaagctgagcaccggcatgttccccgactgggacagcaggtggggcggcccaagcagcggcgcccctcctcccagcggcggcagcccagccggctccccaacctctaccgaggagggcacctctgagtccgccacccccgagagcggccctggcacctccaccgagcccagcgagggcagcgcacccggcagccctgccggcagccccacctccacagaggagggaaccagcaccgagcccagcgaaggcagcgccccaggcaccagcaccgagcctagtgagcaggagattaaacggatcaacaagatcagaagaagacttgtgaaagacagcaacaccaagaaggccggcaagacaggccccatgaaaaccctgctggttagagtgatgacacccgatctgagagagcggctggaaaacctgagaaagaagcctgaaaatatcccccagcccatcagcaatacatctagagccaacctgaataagctgctgaccgattacaccgaaatgaagaaggcgatcctgcatgtgtactgggaagagttccagaaggaccctgtgggcctgatgagccgggtggcccagcctgccagcaagaagatcgatcagaacaagctgaaacctgagatggacgagaagggcaacctgaccaccgccggctttgcctgctctcagtgtggccagcccctgttcgtgtacaagctggagcaggtgtctgagaagggcaaggcttacaccaactacttcggacggtgcaatgtggccgagcacgaaaagctgatcctgctggcccagctgaagcccgagaaggatagcgacgaagccgtgacatatagcctgggaaagtttgggcagagggccctggatttctacagcattcatgtgaccaaggagtccacccaccccgtgaagcccctggcccagatcgccggaaacagatacgcctccggacctgtgggaaaggccctgagcgacgcatgtatgggcacaatcgcctccttcctgtctaagtaccaggacatcatcatcgaacaccagaaggtggtgaagggcaaccagaagagactggagagcctgcgggagctggccggcaaggaaaacctggaataccctagcgtgaccctgccacctcagcctcacaccaaggagggcgttgatgcctacaacgaagtgatcgcccgggtgcgaatgtgggtgaacctgaacctgtggcagaagctgaagctaagcagagatgatgccaagcctctgctgagactgaagggattcccttcctttcctctggtcgagagacaggccaacgaagtggactggtgggacatggtgtgtaacgtgaagaagctgatcaacgagaaaaaggaggatggcaaggtgttttggcagaatctggctggctacaagagacaggaagccctgagaccatacctgagcagcgaggaagatcggaagaagggaaagaaattcgctcggtaccagctgggcgacctgctgctgcacctggaaaagaagcacggcgaggactggggaaaggtgtacgacgaggcctgggagcggattgacaagaaagtggaaggcctgagcaagcacatcaagctggaagaggaacggagaagcgaggacgcccagagcaaggccgccctgaccgactggctgcgggctaaggccagcttcgtgatcgagggcctgaaggaggccgacaaggacgagttctgcagatgcgagctgaagctgcagaagtggtacggggacctgcggggaaagcccttcgccatcgaagccgagaacagcatcctggacatcagcggcttcagcaagcagtacaactgtgccttcatctggcagaaggacggcgtgaagaagctgaacctgtacctgatcatcaactacttcaagggcggcaagctgcggttcaagaagatcaaacctgaagccttcgaagccaacagattctacaccgtgatcaacaaaaagagcggcgagatcgtgcccatggaggtgaacttcaacttcgacgaccccaacctgatcatcctgcctctggcctttggcaagagacagggcagagaattcatctggaacgacctgctgtccctggaaaccggcagcctgaagctggccaacggaagagtgatcgagaagacactgtacaacagaagaacccggcaggatgagcctgccctgttcgtggccctgaccttcgagcggcgggaggtcctggactcctccaatatcaaaccaatgaacctgatcggcgtggcaagaggcgaaaacatccccgccgtgatcgccctgaccgaccccgagggctgcccactgagccggtttaaggatagcctgggaaacccaacccacatcctgagaatcggcgagagctataaggagaagcagcggaccatccaggccaagaaggaggtggagcagcggagagccggcggctacagccggaagtacgccagcaaagccaagaatctggcagacgatatggtgagaaacaccgctagagatctgctgtactacgccgtgacccaggatgccatgctgatcttcgccaacctgagccggggcttcggccggcagggcaagcggaccttcatggccgagagacagtacacacggatggaggactggctgaccgccaagctggcctacgagggcctgagcaagacctacctgtccaagacactggcccagtacacctccaagacatgcagcaactgtgggtttaccatcaccagcgccgactacgacagggtgctggagaagctgaagaagacagcaacaggctggatgaccacaattaacggcaaggagctgaaggtggagggccagattacctactacaacagatacaagagacagaacgtagtcaaggacctgtccgtcgagctggatagactgagcgaagaatctgtgaacaacgacatctcctcctggacaaagggcagaagcggagaagctctgagcctcctgaagaaaagattctcccatagacccgtgcaggagaagttcgtgtgcctgaactgcggcttcgagacacacgcagccgagcaagccgccctgaacatcgccagatcctggctgttcctgcggagccaggagtacaagaaataccagacaaacaagacaaccggcaacaccgataagagagccttcgtcgagacctggcagtccttttaccggaagaagcttaaggaggtgtggaaacctgccgtgcggtctggcggatctggcggaggctccaccagccccaagaaaaagagaaaagtctaagctgccttctgcggggcttgccttctggccatgcccttcttctctcccttgcacctgtacctcttggtctttgaataaagcctgagtaggaaggctagcaaaaaaaaaaaaaaaaaaaaaaaaaaaaaaaaaaaaaaaaaaaaaaaaaaaaaaaaaaaaaaaaaaaaaaaaaaaaaaaa

SEQ ID NO: 13390 - RNA, 5785 nt, synthetic construct
  source 1..5785: mol_type = other RNA
aggaaataagagagaaaagaagagtaagaagaaatataagagccaccatggcccctaagaagaagcgtaaagtgagccggatggaacgcctcgtctacgaggtgcggcagaagtgcagaaacatcgaggacatctgcatctcctgcggatctctgaacgtgaccctggagcacccactgttcatcggcggcatgtgccagaactgtaaaaactgttttctggagtgtgcctatcaatacgacgatgacggctaccagagctactgcaccatctgttgcggcggaagagaggtgctgatgtgtggaaataacaactgctgccggtgcttctgcgtggaatgcgtggacctgctggtgggccccggcgccgcccaggccgctattaaggaagatccttggaactgctacatgtgcggccacaagggcacatacggcctgctgagacggagagaggactggcctagcagactgcagatgttcttcgccaataaccacgaccaggagttcgacccccctaaggtgtaccctcccgtccccgccgagaagagaaagcccatccgggtcctgagcctgttcgatggcatcgccaccggtctgctggtgctgaaggacctgggcatccaggtggataggtacattgcctccgaggtgtgcgaggactccatcaccgtgggaatggtgcgtcatcagggcaagatcatgtacgtgggcgacgtgcggagcgtgacacagaagcatatccaggagtggggccctttcgacctggtgatcggcggcagcccttgcaatgacctgagcatcgtgaacccagcccggaagggcctgtacgagggaaccggcagactgttcttcgagttttacagactgctgcacgacgcccggcctaaggaaggcgacgaccggcccttcttttggctgttcgagaatgtggtggccatgggagtcagcgacaagcgggatattagccggttcctggagagcaaccccgtgatgatcgatgccaaggaagtgagcgccgcccaccgggccagatacttctggggcaatctgcctggcatgaacagacccctggccagcaccgtgaacgacaagctggagctgcaggagtgcctggagcacggccggatcgccaagttcagcaaggtgagaaccatcaccacccgaagcaacagcatcaaacaaggcaaggaccagcactttcctgtgttcatgaacgagaaggaggacatcctgtggtgtaccgagatggagagagtgttcgggttcccagtccactacacagatgtcagcaacatgtctagactggccagacagagactgctgggaagaagctggtccgtccctgtgatcagacacctgttcgcccctctgaaggagtacttcgcctgcgtgagcagcggcaacagcaacgccaacagccggggccccagcttctctagcggcctggtgccactgtccctgagagggagccacatgggccccatggagatctacaaaaccgtgagcgcctggaagcggcagcctgtgcgcgtgctgagcctgtttcggaatatcgataaagtcctgaaaagcctgggattcctggagagcggctctggctccggcggtggcaccctgaagtacgtggaggatgtgacaaacgtggtcagacgggatgtggagaagtggggccccttcgatctggtgtacggcagcacccaacccctgggcagctcttgtgaccggtgccctggctggtacatgtttcagttccaccggatcctgcagtacgccctgccgagacaggagtcccagcggccattcttttggattttcatggacaacttgctgctgaccgaggatgaccaggaaactaccactcggttcctgcagaccgaagccgtgaccctgcaggacgtgagaggccgggactaccagaacgccatgcgggtgtggtccaacatccctggactgaaaagcaagcacgcacctctgacccctaaagaagaggagtacctgcaggcccaggtgcggagcagaagcaagctggacgcccctaaggtggatctgctggtgaagaattgcctcctgcccctgagagagtacttcaagtatttcagccagaatagtctgcccctgggaggcagcggcggcggcccccaggagcccgtgaccttcgccgacgtggccgtgctgttcacccccgaggagtggctgttcctggacagcagccagaagagcctgtacagggacgtgatgctggagaactacaggaacgtggccagcgtgggcgaccagctgtgcaagaccaggatgagcagccacctggagcagagggaggagctgtgcgtgaccgagaggggcatcttccccggcgcccacctgggcccccacctgcagggcggcccaagcagcggcgcccctcctcccagcggcggcagcccagccggctccccaacctctaccgaggagggcacctctgagtccgccacccccgagagcggccctggcacctccaccgagcccagcgagggcagcgcacccggcagccctgccggcagccccacctccacagaggagggaaccagcaccgagcccagcgaaggcagcgccccaggcaccagcaccgagcctagtgagcaggagattaaacggatcaacaagatcagaagaagacttgtgaaagacagcaacaccaagaaggccggcaagacaggccccatgaaaaccctgctggttagagtgatgacacccgatctgagagagcggctggaaaacctgagaaagaagcctgaaaatatcccccagcccatcagcaatacatctagagccaacctgaataagctgctgaccgattacaccgaaatgaagaaggcgatcctgcatgtgtactgggaagagttccagaaggaccctgtgggcctgatgagccgggtggcccagcctgccagcaagaagatcgatcagaacaagctgaaacctgagatggacgagaagggcaacctgaccaccgccggctttgcctgctctcagtgtggccagcccctgttcgtgtacaagctggagcaggtgtctgagaagggcaaggcttacaccaactacttcggacggtgcaatgtggccgagcacgaaaagctgatcctgctggcccagctgaagcccgagaaggatagcgacgaagccgtgacatatagcctgggaaagtttgggcagagggccctggatttctacagcattcatgtgaccaaggagtccacccaccccgtgaagcccctggcccagatcgccggaaacagatacgcctccggacctgtgggaaaggccctgagcgacgcatgtatgggcacaatcgcctccttcctgtctaagtaccaggacatcatcatcgaacaccagaaggtggtgaagggcaaccagaagagactggagagcctgcgggagctggccggcaaggaaaacctggaataccctagcgtgaccctgccacctcagcctcacaccaaggagggcgttgatgcctacaacgaagtgatcgcccgggtgcgaatgtgggtgaacctgaacctgtggcagaagctgaagctaagcagagatgatgccaagcctctgctgagactgaagggattcccttcctttcctctggtcgagagacaggccaacgaagtggactggtgggacatggtgtgtaacgtgaagaagctgatcaacgagaaaaaggaggatggcaaggtgttttggcagaatctggctggctacaagagacaggaagccctgagaccatacctgagcagcgaggaagatcggaagaagggaaagaaattcgctcggtaccagctgggcgacctgctgctgcacctggaaaagaagcacggcgaggactggggaaaggtgtacgacgaggcctgggagcggattgacaagaaagtggaaggcctgagcaagcacatcaagctggaagaggaacggagaagcgaggacgcccagagcaaggccgccctgaccgactggctgcgggctaaggccagcttcgtgatcgagggcctgaaggaggccgacaaggacgagttctgcagatgcgagctgaagctgcagaagtggtacggggacctgcggggaaagcccttcgccatcgaagccgagaacagcatcctggacatcagcggcttcagcaagcagtacaactgtgccttcatctggcagaaggacggcgtgaagaagctgaacctgtacctgatcatcaactacttcaagggcggcaagctgcggttcaagaagatcaaacctgaagccttcgaagccaacagattctacaccgtgatcaacaaaaagagcggcgagatcgtgcccatggaggtgaacttcaacttcgacgaccccaacctgatcatcctgcctctggcctttggcaagagacagggcagagaattcatctggaacgacctgctgtccctggaaaccggcagcctgaagctggccaacggaagagtgatcgagaagacactgtacaacagaagaacccggcaggatgagcctgccctgttcgtggccctgaccttcgagcggcgggaggtcctggactcctccaatatcaaaccaatgaacctgatcggcgtggcaagaggcgaaaacatccccgccgtgatcgccctgaccgaccccgagggctgcccactgagccggtttaaggatagcctgggaaacccaacccacatcctgagaatcggcgagagctataaggagaagcagcggaccatccaggccaagaaggaggtggagcagcggagagccggcggctacagccggaagtacgccagcaaagccaagaatctggcagacgatatggtgagaaacaccgctagagatctgctgtactacgccgtgacccaggatgccatgctgatcttcgccaacctgagccggggcttcggccggcagggcaagcggaccttcatggccgagagacagtacacacggatggaggactggctgaccgccaagctggcctacgagggcctgagcaagacctacctgtccaagacactggcccagtacacctccaagacatgcagcaactgtgggtttaccatcaccagcgccgactacgacagggtgctggagaagctgaagaagacagcaacaggctggatgaccacaattaacggcaaggagctgaaggtggagggccagattacctactacaacagatacaagagacagaacgtagtcaaggacctgtccgtcgagctggatagactgagcgaagaatctgtgaacaacgacatctcctcctggacaaagggcagaagcggagaagctctgagcctcctgaagaaaagattctcccatagacccgtgcaggagaagttcgtgtgcctgaactgcggcttcgagacacacgcagccgagcaagccgccctgaacatcgccagatcctggctgttcctgcggagccaggagtacaagaaataccagacaaacaagacaaccggcaacaccgataagagagccttcgtcgagacctggcagtccttttaccggaagaagcttaaggaggtgtggaaacctgccgtgcggtctggcggatctggcggaggctccaccagccccaagaaaaagagaaaagtctaagctgccttctgcggggcttgccttctggccatgcccttcttctctcccttgcacctgtacctcttggtctttgaataaagcctgagtaggaaggctagcaaaaaaaaaaaaaaaaaaaaaaaaaaaaaaaaaaaaaaaaaaaaaaaaaaaaaaaaaaaaaaaaaaaaaaaaaaaaaaaa

SEQ ID NO: 13391 - RNA, 5785 nt, synthetic construct
  source 1..5785: mol_type = other RNA
aggaaataagagagaaaagaagagtaagaagaaatataagagccaccatggcccctaagaagaagcgtaaagtgagccggatggaacgcctcgtctacgaggtgcggcagaagtgcagaaacatcgaggacatctgcatctcctgcggatctctgaacgtgaccctggagcacccactgttcatcggcggcatgtgccagaactgtaaaaactgttttctggagtgtgcctatcaatacgacgatgacggctaccagagctactgcaccatctgttgcggcggaagagaggtgctgatgtgtggaaataacaactgctgccggtgcttctgcgtggaatgcgtggacctgctggtgggccccggcgccgcccaggccgctattaaggaagatccttggaactgctacatgtgcggccacaagggcacatacggcctgctgagacggagagaggactggcctagcagactgcagatgttcttcgccaataaccacgaccaggagttcgacccccctaaggtgtaccctcccgtccccgccgagaagagaaagcccatccgggtcctgagcctgttcgatggcatcgccaccggtctgctggtgctgaaggacctgggcatccaggtggataggtacattgcctccgaggtgtgcgaggactccatcaccgtgggaatggtgcgtcatcagggcaagatcatgtacgtgggcgacgtgcggagcgtgacacagaagcatatccaggagtggggccctttcgacctggtgatcggcggcagcccttgcaatgacctgagcatcgtgaacccagcccggaagggcctgtacgagggaaccggcagactgttcttcgagttttacagactgctgcacgacgcccggcctaaggaaggcgacgaccggcccttcttttggctgttcgagaatgtggtggccatgggagtcagcgacaagcgggatattagccggttcctggagagcaaccccgtgatgatcgatgccaaggaagtgagcgccgcccaccgggccagatacttctggggcaatctgcctggcatgaacagacccctggccagcaccgtgaacgacaagctggagctgcaggagtgcctggagcacggccggatcgccaagttcagcaaggtgagaaccatcaccacccgaagcaacagcatcaaacaaggcaaggaccagcactttcctgtgttcatgaacgagaaggaggacatcctgtggtgtaccgagatggagagagtgttcgggttcccagtccactacacagatgtcagcaacatgtctagactggccagacagagactgctgggaagaagctggtccgtccctgtgatcagacacctgttcgcccctctgaaggagtacttcgcctgcgtgagcagcggcaacagcaacgccaacagccggggccccagcttctctagcggcctggtgccactgtccctgagagggagccacatgggccccatggagatctacaaaaccgtgagcgcctggaagcggcagcctgtgcgcgtgctgagcctgtttcggaatatcgataaagtcctgaaaagcctgggattcctggagagcggctctggctccggcggtggcaccctgaagtacgtggaggatgtgacaaacgtggtcagacgggatgtggagaagtggggccccttcgatctggtgtacggcagcacccaacccctgggcagctcttgtgaccggtgccctggctggtacatgtttcagttccaccggatcctgcagtacgccctgccgagacaggagtcccagcggccattcttttggattttcatggacaacttgctgctgaccgaggatgaccaggaaactaccactcggttcctgcagaccgaagccgtgaccctgcaggacgtgagaggccgggactaccagaacgccatgcgggtgtggtccaacatccctggactgaaaagcaagcacgcacctctgacccctaaagaagaggagtacctgcaggcccaggtgcggagcagaagcaagctggacgcccctaaggtggatctgctggtgaagaattgcctcctgcccctgagagagtacttcaagtatttcagccagaatagtctgcccctgggaggcagcggcggcggcatgatcaacgcccaggagctgctgaccctggaggacgtgaccgtggagttcacctgggaggagtggcagctgctggaccccttccagaaggacctgtacagggacgtgaccctggagatctacagcaacctggtgagcatgggctaccaggtgagcaagcccgacgccctgagcaagctggagcagggcgaggagccctggaccatggaggacgagaggcacagcaggatctgccccggcaccggcggcccaagcagcggcgcccctcctcccagcggcggcagcccagccggctccccaacctctaccgaggagggcacctctgagtccgccacccccgagagcggccctggcacctccaccgagcccagcgagggcagcgcacccggcagccctgccggcagccccacctccacagaggagggaaccagcaccgagcccagcgaaggcagcgccccaggcaccagcaccgagcctagtgagcaggagattaaacggatcaacaagatcagaagaagacttgtgaaagacagcaacaccaagaaggccggcaagacaggccccatgaaaaccctgctggttagagtgatgacacccgatctgagagagcggctggaaaacctgagaaagaagcctgaaaatatcccccagcccatcagcaatacatctagagccaacctgaataagctgctgaccgattacaccgaaatgaagaaggcgatcctgcatgtgtactgggaagagttccagaaggaccctgtgggcctgatgagccgggtggcccagcctgccagcaagaagatcgatcagaacaagctgaaacctgagatggacgagaagggcaacctgaccaccgccggctttgcctgctctcagtgtggccagcccctgttcgtgtacaagctggagcaggtgtctgagaagggcaaggcttacaccaactacttcggacggtgcaatgtggccgagcacgaaaagctgatcctgctggcccagctgaagcccgagaaggatagcgacgaagccgtgacatatagcctgggaaagtttgggcagagggccctggatttctacagcattcatgtgaccaaggagtccacccaccccgtgaagcccctggcccagatcgccggaaacagatacgcctccggacctgtgggaaaggccctgagcgacgcatgtatgggcacaatcgcctccttcctgtctaagtaccaggacatcatcatcgaacaccagaaggtggtgaagggcaaccagaagagactggagagcctgcgggagctggccggcaaggaaaacctggaataccctagcgtgaccctgccacctcagcctcacaccaaggagggcgttgatgcctacaacgaagtgatcgcccgggtgcgaatgtgggtgaacctgaacctgtggcagaagctgaagctaagcagagatgatgccaagcctctgctgagactgaagggattcccttcctttcctctggtcgagagacaggccaacgaagtggactggtgggacatggtgtgtaacgtgaagaagctgatcaacgagaaaaaggaggatggcaaggtgttttggcagaatctggctggctacaagagacaggaagccctgagaccatacctgagcagcgaggaagatcggaagaagggaaagaaattcgctcggtaccagctgggcgacctgctgctgcacctggaaaagaagcacggcgaggactggggaaaggtgtacgacgaggcctgggagcggattgacaagaaagtggaaggcctgagcaagcacatcaagctggaagaggaacggagaagcgaggacgcccagagcaaggccgccctgaccgactggctgcgggctaaggccagcttcgtgatcgagggcctgaaggaggccgacaaggacgagttctgcagatgcgagctgaagctgcagaagtggtacggggacctgcggggaaagcccttcgccatcgaagccgagaacagcatcctggacatcagcggcttcagcaagcagtacaactgtgccttcatctggcagaaggacggcgtgaagaagctgaacctgtacctgatcatcaactacttcaagggcggcaagctgcggttcaagaagatcaaacctgaagccttcgaagccaacagattctacaccgtgatcaacaaaaagagcggcgagatcgtgcccatggaggtgaacttcaacttcgacgaccccaacctgatcatcctgcctctggcctttggcaagagacagggcagagaattcatctggaacgacctgctgtccctggaaaccggcagcctgaagctggccaacggaagagtgatcgagaagacactgtacaacagaagaacccggcaggatgagcctgccctgttcgtggccctgaccttcgagcggcgggaggtcctggactcctccaatatcaaaccaatgaacctgatcggcgtggcaagaggcgaaaacatccccgccgtgatcgccctgaccgaccccgagggctgcccactgagccggtttaaggatagcctgggaaacccaacccacatcctgagaatcggcgagagctataaggagaagcagcggaccatccaggccaagaaggaggtggagcagcggagagccggcggctacagccggaagtacgccagcaaagccaagaatctggcagacgatatggtgagaaacaccgctagagatctgctgtactacgccgtgacccaggatgccatgctgatcttcgccaacctgagccggggcttcggccggcagggcaagcggaccttcatggccgagagacagtacacacggatggaggactggctgaccgccaagctggcctacgagggcctgagcaagacctacctgtccaagacactggcccagtacacctccaagacatgcagcaactgtgggtttaccatcaccagcgccgactacgacagggtgctggagaagctgaagaagacagcaacaggctggatgaccacaattaacggcaaggagctgaaggtggagggccagattacctactacaacagatacaagagacagaacgtagtcaaggacctgtccgtcgagctggatagactgagcgaagaatctgtgaacaacgacatctcctcctggacaaagggcagaagcggagaagctctgagcctcctgaagaaaagattctcccatagacccgtgcaggagaagttcgtgtgcctgaactgcggcttcgagacacacgcagccgagcaagccgccctgaacatcgccagatcctggctgttcctgcggagccaggagtacaagaaataccagacaaacaagacaaccggcaacaccgataagagagccttcgtcgagacctggcagtccttttaccggaagaagcttaaggaggtgtggaaacctgccgtgcggtctggcggatctggcggaggctccaccagccccaagaaaaagagaaaagtctaagctgccttctgcggggcttgccttctggccatgcccttcttctctcccttgcacctgtacctcttggtctttgaataaagcctgagtaggaaggctagcaaaaaaaaaaaaaaaaaaaaaaaaaaaaaaaaaaaaaaaaaaaaaaaaaaaaaaaaaaaaaaaaaaaaaaaaaaaaaaaa

SEQ ID NO: 13392 - RNA, 5785 nt, synthetic construct
  source 1..5785: mol_type = other RNA
aggaaataagagagaaaagaagagtaagaagaaatataagagccaccatggcccctaagaagaagcgtaaagtgagccggatggaacgcctcgtctacgaggtgcggcagaagtgcagaaacatcgaggacatctgcatctcctgcggatctctgaacgtgaccctggagcacccactgttcatcggcggcatgtgccagaactgtaaaaactgttttctggagtgtgcctatcaatacgacgatgacggctaccagagctactgcaccatctgttgcggcggaagagaggtgctgatgtgtggaaataacaactgctgccggtgcttctgcgtggaatgcgtggacctgctggtgggccccggcgccgcccaggccgctattaaggaagatccttggaactgctacatgtgcggccacaagggcacatacggcctgctgagacggagagaggactggcctagcagactgcagatgttcttcgccaataaccacgaccaggagttcgacccccctaaggtgtaccctcccgtccccgccgagaagagaaagcccatccgggtcctgagcctgttcgatggcatcgccaccggtctgctggtgctgaaggacctgggcatccaggtggataggtacattgcctccgaggtgtgcgaggactccatcaccgtgggaatggtgcgtcatcagggcaagatcatgtacgtgggcgacgtgcggagcgtgacacagaagcatatccaggagtggggccctttcgacctggtgatcggcggcagcccttgcaatgacctgagcatcgtgaacccagcccggaagggcctgtacgagggaaccggcagactgttcttcgagttttacagactgctgcacgacgcccggcctaaggaaggcgacgaccggcccttcttttggctgttcgagaatgtggtggccatgggagtcagcgacaagcgggatattagccggttcctggagagcaaccccgtgatgatcgatgccaaggaagtgagcgccgcccaccgggccagatacttctggggcaatctgcctggcatgaacagacccctggccagcaccgtgaacgacaagctggagctgcaggagtgcctggagcacggccggatcgccaagttcagcaaggtgagaaccatcaccacccgaagcaacagcatcaaacaaggcaaggaccagcactttcctgtgttcatgaacgagaaggaggacatcctgtggtgtaccgagatggagagagtgttcgggttcccagtccactacacagatgtcagcaacatgtctagactggccagacagagactgctgggaagaagctggtccgtccctgtgatcagacacctgttcgcccctctgaaggagtacttcgcctgcgtgagcagcggcaacagcaacgccaacagccggggccccagcttctctagcggcctggtgccactgtccctgagagggagccacatgggccccatggagatctacaaaaccgtgagcgcctggaagcggcagcctgtgcgcgtgctgagcctgtttcggaatatcgataaagtcctgaaaagcctgggattcctggagagcggctctggctccggcggtggcaccctgaagtacgtggaggatgtgacaaacgtggtcagacgggatgtggagaagtggggccccttcgatctggtgtacggcagcacccaacccctgggcagctcttgtgaccggtgccctggctggtacatgtttcagttccaccggatcctgcagtacgccctgccgagacaggagtcccagcggccattcttttggattttcatggacaacttgctgctgaccgaggatgaccaggaaactaccactcggttcctgcagaccgaagccgtgaccctgcaggacgtgagaggccgggactaccagaacgccatgcgggtgtggtccaacatccctggactgaaaagcaagcacgcacctctgacccctaaagaagaggagtacctgcaggcccaggtgcggagcagaagcaagctggacgcccctaaggtggatctgctggtgaagaattgcctcctgcccctgagagagtacttcaagtatttcagccagaatagtctgcccctgggaggcagcggcggcggcccccagggcctggtgaccttcagggacgtggccgtggacttcaccagggaggagtggaggctgctgagccccaggcagaaggagctgtacaaggaggtgatgctggagaacgccggcaacctgctgagcctgggcctgcccgtgcccagggaggacgtgatcagctacttcgagcagaaggacgtgccctggatgctggagcagaaggccctgaggagcttctgccccggcggccccgtgaagggcggcccaagcagcggcgcccctcctcccagcggcggcagcccagccggctccccaacctctaccgaggagggcacctctgagtccgccacccccgagagcggccctggcacctccaccgagcccagcgagggcagcgcacccggcagccctgccggcagccccacctccacagaggagggaaccagcaccgagcccagcgaaggcagcgccccaggcaccagcaccgagcctagtgagcaggagattaaacggatcaacaagatcagaagaagacttgtgaaagacagcaacaccaagaaggccggcaagacaggccccatgaaaaccctgctggttagagtgatgacacccgatctgagagagcggctggaaaacctgagaaagaagcctgaaaatatcccccagcccatcagcaatacatctagagccaacctgaataagctgctgaccgattacaccgaaatgaagaaggcgatcctgcatgtgtactgggaagagttccagaaggaccctgtgggcctgatgagccgggtggcccagcctgccagcaagaagatcgatcagaacaagctgaaacctgagatggacgagaagggcaacctgaccaccgccggctttgcctgctctcagtgtggccagcccctgttcgtgtacaagctggagcaggtgtctgagaagggcaaggcttacaccaactacttcggacggtgcaatgtggccgagcacgaaaagctgatcctgctggcccagctgaagcccgagaaggatagcgacgaagccgtgacatatagcctgggaaagtttgggcagagggccctggatttctacagcattcatgtgaccaaggagtccacccaccccgtgaagcccctggcccagatcgccggaaacagatacgcctccggacctgtgggaaaggccctgagcgacgcatgtatgggcacaatcgcctccttcctgtctaagtaccaggacatcatcatcgaacaccagaaggtggtgaagggcaaccagaagagactggagagcctgcgggagctggccggcaaggaaaacctggaataccctagcgtgaccctgccacctcagcctcacaccaaggagggcgttgatgcctacaacgaagtgatcgcccgggtgcgaatgtgggtgaacctgaacctgtggcagaagctgaagctaagcagagatgatgccaagcctctgctgagactgaagggattcccttcctttcctctggtcgagagacaggccaacgaagtggactggtgggacatggtgtgtaacgtgaagaagctgatcaacgagaaaaaggaggatggcaaggtgttttggcagaatctggctggctacaagagacaggaagccctgagaccatacctgagcagcgaggaagatcggaagaagggaaagaaattcgctcggtaccagctgggcgacctgctgctgcacctggaaaagaagcacggcgaggactggggaaaggtgtacgacgaggcctgggagcggattgacaagaaagtggaaggcctgagcaagcacatcaagctggaagaggaacggagaagcgaggacgcccagagcaaggccgccctgaccgactggctgcgggctaaggccagcttcgtgatcgagggcctgaaggaggccgacaaggacgagttctgcagatgcgagctgaagctgcagaagtggtacggggacctgcggggaaagcccttcgccatcgaagccgagaacagcatcctggacatcagcggcttcagcaagcagtacaactgtgccttcatctggcagaaggacggcgtgaagaagctgaacctgtacctgatcatcaactacttcaagggcggcaagctgcggttcaagaagatcaaacctgaagccttcgaagccaacagattctacaccgtgatcaacaaaaagagcggcgagatcgtgcccatggaggtgaacttcaacttcgacgaccccaacctgatcatcctgcctctggcctttggcaagagacagggcagagaattcatctggaacgacctgctgtccctggaaaccggcagcctgaagctggccaacggaagagtgatcgagaagacactgtacaacagaagaacccggcaggatgagcctgccctgttcgtggccctgaccttcgagcggcgggaggtcctggactcctccaatatcaaaccaatgaacctgatcggcgtggcaagaggcgaaaacatccccgccgtgatcgccctgaccgaccccgagggctgcccactgagccggtttaaggatagcctgggaaacccaacccacatcctgagaatcggcgagagctataaggagaagcagcggaccatccaggccaagaaggaggtggagcagcggagagccggcggctacagccggaagtacgccagcaaagccaagaatctggcagacgatatggtgagaaacaccgctagagatctgctgtactacgccgtgacccaggatgccatgctgatcttcgccaacctgagccggggcttcggccggcagggcaagcggaccttcatggccgagagacagtacacacggatggaggactggctgaccgccaagctggcctacgagggcctgagcaagacctacctgtccaagacactggcccagtacacctccaagacatgcagcaactgtgggtttaccatcaccagcgccgactacgacagggtgctggagaagctgaagaagacagcaacaggctggatgaccacaattaacggcaaggagctgaaggtggagggccagattacctactacaacagatacaagagacagaacgtagtcaaggacctgtccgtcgagctggatagactgagcgaagaatctgtgaacaacgacatctcctcctggacaaagggcagaagcggagaagctctgagcctcctgaagaaaagattctcccatagacccgtgcaggagaagttcgtgtgcctgaactgcggcttcgagacacacgcagccgagcaagccgccctgaacatcgccagatcctggctgttcctgcggagccaggagtacaagaaataccagacaaacaagacaaccggcaacaccgataagagagccttcgtcgagacctggcagtccttttaccggaagaagcttaaggaggtgtggaaacctgccgtgcggtctggcggatctggcggaggctccaccagccccaagaaaaagagaaaagtctaagctgccttctgcggggcttgccttctggccatgcccttcttctctcccttgcacctgtacctcttggtctttgaataaagcctgagtaggaaggctagcaaaaaaaaaaaaaaaaaaaaaaaaaaaaaaaaaaaaaaaaaaaaaaaaaaaaaaaaaaaaaaaaaaaaaaaaaaaaaaaa

SEQ ID NO: 13393 - RNA, 5785 nt, synthetic construct
  source 1..5785: mol_type = other RNA
aggaaataagagagaaaagaagagtaagaagaaatataagagccaccatggcccctaagaagaagcgtaaagtgagccggatggaacgcctcgtctacgaggtgcggcagaagtgcagaaacatcgaggacatctgcatctcctgcggatctctgaacgtgaccctggagcacccactgttcatcggcggcatgtgccagaactgtaaaaactgttttctggagtgtgcctatcaatacgacgatgacggctaccagagctactgcaccatctgttgcggcggaagagaggtgctgatgtgtggaaataacaactgctgccggtgcttctgcgtggaatgcgtggacctgctggtgggccccggcgccgcccaggccgctattaaggaagatccttggaactgctacatgtgcggccacaagggcacatacggcctgctgagacggagagaggactggcctagcagactgcagatgttcttcgccaataaccacgaccaggagttcgacccccctaaggtgtaccctcccgtccccgccgagaagagaaagcccatccgggtcctgagcctgttcgatggcatcgccaccggtctgctggtgctgaaggacctgggcatccaggtggataggtacattgcctccgaggtgtgcgaggactccatcaccgtgggaatggtgcgtcatcagggcaagatcatgtacgtgggcgacgtgcggagcgtgacacagaagcatatccaggagtggggccctttcgacctggtgatcggcggcagcccttgcaatgacctgagcatcgtgaacccagcccggaagggcctgtacgagggaaccggcagactgttcttcgagttttacagactgctgcacgacgcccggcctaaggaaggcgacgaccggcccttcttttggctgttcgagaatgtggtggccatgggagtcagcgacaagcgggatattagccggttcctggagagcaaccccgtgatgatcgatgccaaggaagtgagcgccgcccaccgggccagatacttctggggcaatctgcctggcatgaacagacccctggccagcaccgtgaacgacaagctggagctgcaggagtgcctggagcacggccggatcgccaagttcagcaaggtgagaaccatcaccacccgaagcaacagcatcaaacaaggcaaggaccagcactttcctgtgttcatgaacgagaaggaggacatcctgtggtgtaccgagatggagagagtgttcgggttcccagtccactacacagatgtcagcaacatgtctagactggccagacagagactgctgggaagaagctggtccgtccctgtgatcagacacctgttcgcccctctgaaggagtacttcgcctgcgtgagcagcggcaacagcaacgccaacagccggggccccagcttctctagcggcctggtgccactgtccctgagagggagccacatgggccccatggagatctacaaaaccgtgagcgcctggaagcggcagcctgtgcgcgtgctgagcctgtttcggaatatcgataaagtcctgaaaagcctgggattcctggagagcggctctggctccggcggtggcaccctgaagtacgtggaggatgtgacaaacgtggtcagacgggatgtggagaagtggggccccttcgatctggtgtacggcagcacccaacccctgggcagctcttgtgaccggtgccctggctggtacatgtttcagttccaccggatcctgcagtacgccctgccgagacaggagtcccagcggccattcttttggattttcatggacaacttgctgctgaccgaggatgaccaggaaactaccactcggttcctgcagaccgaagccgtgaccctgcaggacgtgagaggccgggactaccagaacgccatgcgggtgtggtccaacatccctggactgaaaagcaagcacgcacctctgacccctaaagaagaggagtacctgcaggcccaggtgcggagcagaagcaagctggacgcccctaaggtggatctgctggtgaagaattgcctcctgcccctgagagagtacttcaagtatttcagccagaatagtctgcccctgggaggcagcggcggcggcatgttccagaccgcctggaggcaggagcccgtgaccttcgaggacgtggccgtgtacttcacccagaacgagtgggccagcctggacagcgtgcagagggccctgtacagggaggtgatgctggagaactacgccaacgtggccagcctggccttccccttcaccacccccgtgctggtgagccagctggagcagggcgagctgccctggggcctggacccctgggagcccatgggcagggagggcggcccaagcagcggcgcccctcctcccagcggcggcagcccagccggctccccaacctctaccgaggagggcacctctgagtccgccacccccgagagcggccctggcacctccaccgagcccagcgagggcagcgcacccggcagccctgccggcagccccacctccacagaggagggaaccagcaccgagcccagcgaaggcagcgccccaggcaccagcaccgagcctagtgagcaggagattaaacggatcaacaagatcagaagaagacttgtgaaagacagcaacaccaagaaggccggcaagacaggccccatgaaaaccctgctggttagagtgatgacacccgatctgagagagcggctggaaaacctgagaaagaagcctgaaaatatcccccagcccatcagcaatacatctagagccaacctgaataagctgctgaccgattacaccgaaatgaagaaggcgatcctgcatgtgtactgggaagagttccagaaggaccctgtgggcctgatgagccgggtggcccagcctgccagcaagaagatcgatcagaacaagctgaaacctgagatggacgagaagggcaacctgaccaccgccggctttgcctgctctcagtgtggccagcccctgttcgtgtacaagctggagcaggtgtctgagaagggcaaggcttacaccaactacttcggacggtgcaatgtggccgagcacgaaaagctgatcctgctggcccagctgaagcccgagaaggatagcgacgaagccgtgacatatagcctgggaaagtttgggcagagggccctggatttctacagcattcatgtgaccaaggagtccacccaccccgtgaagcccctggcccagatcgccggaaacagatacgcctccggacctgtgggaaaggccctgagcgacgcatgtatgggcacaatcgcctccttcctgtctaagtaccaggacatcatcatcgaacaccagaaggtggtgaagggcaaccagaagagactggagagcctgcgggagctggccggcaaggaaaacctggaataccctagcgtgaccctgccacctcagcctcacaccaaggagggcgttgatgcctacaacgaagtgatcgcccgggtgcgaatgtgggtgaacctgaacctgtggcagaagctgaagctaagcagagatgatgccaagcctctgctgagactgaagggattcccttcctttcctctggtcgagagacaggccaacgaagtggactggtgggacatggtgtgtaacgtgaagaagctgatcaacgagaaaaaggaggatggcaaggtgttttggcagaatctggctggctacaagagacaggaagccctgagaccatacctgagcagcgaggaagatcggaagaagggaaagaaattcgctcggtaccagctgggcgacctgctgctgcacctggaaaagaagcacggcgaggactggggaaaggtgtacgacgaggcctgggagcggattgacaagaaagtggaaggcctgagcaagcacatcaagctggaagaggaacggagaagcgaggacgcccagagcaaggccgccctgaccgactggctgcgggctaaggccagcttcgtgatcgagggcctgaaggaggccgacaaggacgagttctgcagatgcgagctgaagctgcagaagtggtacggggacctgcggggaaagcccttcgccatcgaagccgagaacagcatcctggacatcagcggcttcagcaagcagtacaactgtgccttcatctggcagaaggacggcgtgaagaagctgaacctgtacctgatcatcaactacttcaagggcggcaagctgcggttcaagaagatcaaacctgaagccttcgaagccaacagattctacaccgtgatcaacaaaaagagcggcgagatcgtgcccatggaggtgaacttcaacttcgacgaccccaacctgatcatcctgcctctggcctttggcaagagacagggcagagaattcatctggaacgacctgctgtccctggaaaccggcagcctgaagctggccaacggaagagtgatcgagaagacactgtacaacagaagaacccggcaggatgagcctgccctgttcgtggccctgaccttcgagcggcgggaggtcctggactcctccaatatcaaaccaatgaacctgatcggcgtggcaagaggcgaaaacatccccgccgtgatcgccctgaccgaccccgagggctgcccactgagccggtttaaggatagcctgggaaacccaacccacatcctgagaatcggcgagagctataaggagaagcagcggaccatccaggccaagaaggaggtggagcagcggagagccggcggctacagccggaagtacgccagcaaagccaagaatctggcagacgatatggtgagaaacaccgctagagatctgctgtactacgccgtgacccaggatgccatgctgatcttcgccaacctgagccggggcttcggccggcagggcaagcggaccttcatggccgagagacagtacacacggatggaggactggctgaccgccaagctggcctacgagggcctgagcaagacctacctgtccaagacactggcccagtacacctccaagacatgcagcaactgtgggtttaccatcaccagcgccgactacgacagggtgctggagaagctgaagaagacagcaacaggctggatgaccacaattaacggcaaggagctgaaggtggagggccagattacctactacaacagatacaagagacagaacgtagtcaaggacctgtccgtcgagctggatagactgagcgaagaatctgtgaacaacgacatctcctcctggacaaagggcagaagcggagaagctctgagcctcctgaagaaaagattctcccatagacccgtgcaggagaagttcgtgtgcctgaactgcggcttcgagacacacgcagccgagcaagccgccctgaacatcgccagatcctggctgttcctgcggagccaggagtacaagaaataccagacaaacaagacaaccggcaacaccgataagagagccttcgtcgagacctggcagtccttttaccggaagaagcttaaggaggtgtggaaacctgccgtgcggtctggcggatctggcggaggctccaccagccccaagaaaaagagaaaagtctaagctgccttctgcggggcttgccttctggccatgcccttcttctctcccttgcacctgtacctcttggtctttgaataaagcctgagtaggaaggctagcaaaaaaaaaaaaaaaaaaaaaaaaaaaaaaaaaaaaaaaaaaaaaaaaaaaaaaaaaaaaaaaaaaaaaaaaaaaaaaaa

SEQ ID NO: 13394 - RNA, 5785 nt, synthetic construct
  source 1..5785: mol_type = other RNA
aggaaataagagagaaaagaagagtaagaagaaatataagagccaccatggcccctaagaagaagcgtaaagtgagccggatggaacgcctcgtctacgaggtgcggcagaagtgcagaaacatcgaggacatctgcatctcctgcggatctctgaacgtgaccctggagcacccactgttcatcggcggcatgtgccagaactgtaaaaactgttttctggagtgtgcctatcaatacgacgatgacggctaccagagctactgcaccatctgttgcggcggaagagaggtgctgatgtgtggaaataacaactgctgccggtgcttctgcgtggaatgcgtggacctgctggtgggccccggcgccgcccaggccgctattaaggaagatccttggaactgctacatgtgcggccacaagggcacatacggcctgctgagacggagagaggactggcctagcagactgcagatgttcttcgccaataaccacgaccaggagttcgacccccctaaggtgtaccctcccgtccccgccgagaagagaaagcccatccgggtcctgagcctgttcgatggcatcgccaccggtctgctggtgctgaaggacctgggcatccaggtggataggtacattgcctccgaggtgtgcgaggactccatcaccgtgggaatggtgcgtcatcagggcaagatcatgtacgtgggcgacgtgcggagcgtgacacagaagcatatccaggagtggggccctttcgacctggtgatcggcggcagcccttgcaatgacctgagcatcgtgaacccagcccggaagggcctgtacgagggaaccggcagactgttcttcgagttttacagactgctgcacgacgcccggcctaaggaaggcgacgaccggcccttcttttggctgttcgagaatgtggtggccatgggagtcagcgacaagcgggatattagccggttcctggagagcaaccccgtgatgatcgatgccaaggaagtgagcgccgcccaccgggccagatacttctggggcaatctgcctggcatgaacagacccctggccagcaccgtgaacgacaagctggagctgcaggagtgcctggagcacggccggatcgccaagttcagcaaggtgagaaccatcaccacccgaagcaacagcatcaaacaaggcaaggaccagcactttcctgtgttcatgaacgagaaggaggacatcctgtggtgtaccgagatggagagagtgttcgggttcccagtccactacacagatgtcagcaacatgtctagactggccagacagagactgctgggaagaagctggtccgtccctgtgatcagacacctgttcgcccctctgaaggagtacttcgcctgcgtgagcagcggcaacagcaacgccaacagccggggccccagcttctctagcggcctggtgccactgtccctgagagggagccacatgggccccatggagatctacaaaaccgtgagcgcctggaagcggcagcctgtgcgcgtgctgagcctgtttcggaatatcgataaagtcctgaaaagcctgggattcctggagagcggctctggctccggcggtggcaccctgaagtacgtggaggatgtgacaaacgtggtcagacgggatgtggagaagtggggccccttcgatctggtgtacggcagcacccaacccctgggcagctcttgtgaccggtgccctggctggtacatgtttcagttccaccggatcctgcagtacgccctgccgagacaggagtcccagcggccattcttttggattttcatggacaacttgctgctgaccgaggatgaccaggaaactaccactcggttcctgcagaccgaagccgtgaccctgcaggacgtgagaggccgggactaccagaacgccatgcgggtgtggtccaacatccctggactgaaaagcaagcacgcacctctgacccctaaagaagaggagtacctgcaggcccaggtgcggagcagaagcaagctggacgcccctaaggtggatctgctggtgaagaattgcctcctgcccctgagagagtacttcaagtatttcagccagaatagtctgcccctgggaggcagcggcggcggcatgttccaggtgaccttcagcgacgtggccatcgacttcagccacgaggagtggggctggctggacagcgcccagagggacctgtacaaggacgtgatggtgcagaactacgagaacctggtgagcctgggcctgagcatccccaagcccaacgtgatcgccctgctggaggagggcaaggacccctggatggtggagaggaagctgagcaccgactgggacagcaggtgggagaacaaggagggcggcccaagcagcggcgcccctcctcccagcggcggcagcccagccggctccccaacctctaccgaggagggcacctctgagtccgccacccccgagagcggccctggcacctccaccgagcccagcgagggcagcgcacccggcagccctgccggcagccccacctccacagaggagggaaccagcaccgagcccagcgaaggcagcgccccaggcaccagcaccgagcctagtgagcaggagattaaacggatcaacaagatcagaagaagacttgtgaaagacagcaacaccaagaaggccggcaagacaggccccatgaaaaccctgctggttagagtgatgacacccgatctgagagagcggctggaaaacctgagaaagaagcctgaaaatatcccccagcccatcagcaatacatctagagccaacctgaataagctgctgaccgattacaccgaaatgaagaaggcgatcctgcatgtgtactgggaagagttccagaaggaccctgtgggcctgatgagccgggtggcccagcctgccagcaagaagatcgatcagaacaagctgaaacctgagatggacgagaagggcaacctgaccaccgccggctttgcctgctctcagtgtggccagcccctgttcgtgtacaagctggagcaggtgtctgagaagggcaaggcttacaccaactacttcggacggtgcaatgtggccgagcacgaaaagctgatcctgctggcccagctgaagcccgagaaggatagcgacgaagccgtgacatatagcctgggaaagtttgggcagagggccctggatttctacagcattcatgtgaccaaggagtccacccaccccgtgaagcccctggcccagatcgccggaaacagatacgcctccggacctgtgggaaaggccctgagcgacgcatgtatgggcacaatcgcctccttcctgtctaagtaccaggacatcatcatcgaacaccagaaggtggtgaagggcaaccagaagagactggagagcctgcgggagctggccggcaaggaaaacctggaataccctagcgtgaccctgccacctcagcctcacaccaaggagggcgttgatgcctacaacgaagtgatcgcccgggtgcgaatgtgggtgaacctgaacctgtggcagaagctgaagctaagcagagatgatgccaagcctctgctgagactgaagggattcccttcctttcctctggtcgagagacaggccaacgaagtggactggtgggacatggtgtgtaacgtgaagaagctgatcaacgagaaaaaggaggatggcaaggtgttttggcagaatctggctggctacaagagacaggaagccctgagaccatacctgagcagcgaggaagatcggaagaagggaaagaaattcgctcggtaccagctgggcgacctgctgctgcacctggaaaagaagcacggcgaggactggggaaaggtgtacgacgaggcctgggagcggattgacaagaaagtggaaggcctgagcaagcacatcaagctggaagaggaacggagaagcgaggacgcccagagcaaggccgccctgaccgactggctgcgggctaaggccagcttcgtgatcgagggcctgaaggaggccgacaaggacgagttctgcagatgcgagctgaagctgcagaagtggtacggggacctgcggggaaagcccttcgccatcgaagccgagaacagcatcctggacatcagcggcttcagcaagcagtacaactgtgccttcatctggcagaaggacggcgtgaagaagctgaacctgtacctgatcatcaactacttcaagggcggcaagctgcggttcaagaagatcaaacctgaagccttcgaagccaacagattctacaccgtgatcaacaaaaagagcggcgagatcgtgcccatggaggtgaacttcaacttcgacgaccccaacctgatcatcctgcctctggcctttggcaagagacagggcagagaattcatctggaacgacctgctgtccctggaaaccggcagcctgaagctggccaacggaagagtgatcgagaagacactgtacaacagaagaacccggcaggatgagcctgccctgttcgtggccctgaccttcgagcggcgggaggtcctggactcctccaatatcaaaccaatgaacctgatcggcgtggcaagaggcgaaaacatccccgccgtgatcgccctgaccgaccccgagggctgcccactgagccggtttaaggatagcctgggaaacccaacccacatcctgagaatcggcgagagctataaggagaagcagcggaccatccaggccaagaaggaggtggagcagcggagagccggcggctacagccggaagtacgccagcaaagccaagaatctggcagacgatatggtgagaaacaccgctagagatctgctgtactacgccgtgacccaggatgccatgctgatcttcgccaacctgagccggggcttcggccggcagggcaagcggaccttcatggccgagagacagtacacacggatggaggactggctgaccgccaagctggcctacgagggcctgagcaagacctacctgtccaagacactggcccagtacacctccaagacatgcagcaactgtgggtttaccatcaccagcgccgactacgacagggtgctggagaagctgaagaagacagcaacaggctggatgaccacaattaacggcaaggagctgaaggtggagggccagattacctactacaacagatacaagagacagaacgtagtcaaggacctgtccgtcgagctggatagactgagcgaagaatctgtgaacaacgacatctcctcctggacaaagggcagaagcggagaagctctgagcctcctgaagaaaagattctcccatagacccgtgcaggagaagttcgtgtgcctgaactgcggcttcgagacacacgcagccgagcaagccgccctgaacatcgccagatcctggctgttcctgcggagccaggagtacaagaaataccagacaaacaagacaaccggcaacaccgataagagagccttcgtcgagacctggcagtccttttaccggaagaagcttaaggaggtgtggaaacctgccgtgcggtctggcggatctggcggaggctccaccagccccaagaaaaagagaaaagtctaagctgccttctgcggggcttgccttctggccatgcccttcttctctcccttgcacctgtacctcttggtctttgaataaagcctgagtaggaaggctagcaaaaaaaaaaaaaaaaaaaaaaaaaaaaaaaaaaaaaaaaaaaaaaaaaaaaaaaaaaaaaaaaaaaaaaaaaaaaaaaa

SEQ ID NO: 13395 - RNA, 5785 nt, synthetic construct
  source 1..5785: mol_type = other RNA
aggaaataagagagaaaagaagagtaagaagaaatataagagccaccatggcccctaagaagaagcgtaaagtgagccggatggaacgcctcgtctacgaggtgcggcagaagtgcagaaacatcgaggacatctgcatctcctgcggatctctgaacgtgaccctggagcacccactgttcatcggcggcatgtgccagaactgtaaaaactgttttctggagtgtgcctatcaatacgacgatgacggctaccagagctactgcaccatctgttgcggcggaagagaggtgctgatgtgtggaaataacaactgctgccggtgcttctgcgtggaatgcgtggacctgctggtgggccccggcgccgcccaggccgctattaaggaagatccttggaactgctacatgtgcggccacaagggcacatacggcctgctgagacggagagaggactggcctagcagactgcagatgttcttcgccaataaccacgaccaggagttcgacccccctaaggtgtaccctcccgtccccgccgagaagagaaagcccatccgggtcctgagcctgttcgatggcatcgccaccggtctgctggtgctgaaggacctgggcatccaggtggataggtacattgcctccgaggtgtgcgaggactccatcaccgtgggaatggtgcgtcatcagggcaagatcatgtacgtgggcgacgtgcggagcgtgacacagaagcatatccaggagtggggccctttcgacctggtgatcggcggcagcccttgcaatgacctgagcatcgtgaacccagcccggaagggcctgtacgagggaaccggcagactgttcttcgagttttacagactgctgcacgacgcccggcctaaggaaggcgacgaccggcccttcttttggctgttcgagaatgtggtggccatgggagtcagcgacaagcgggatattagccggttcctggagagcaaccccgtgatgatcgatgccaaggaagtgagcgccgcccaccgggccagatacttctggggcaatctgcctggcatgaacagacccctggccagcaccgtgaacgacaagctggagctgcaggagtgcctggagcacggccggatcgccaagttcagcaaggtgagaaccatcaccacccgaagcaacagcatcaaacaaggcaaggaccagcactttcctgtgttcatgaacgagaaggaggacatcctgtggtgtaccgagatggagagagtgttcgggttcccagtccactacacagatgtcagcaacatgtctagactggccagacagagactgctgggaagaagctggtccgtccctgtgatcagacacctgttcgcccctctgaaggagtacttcgcctgcgtgagcagcggcaacagcaacgccaacagccggggccccagcttctctagcggcctggtgccactgtccctgagagggagccacatgggccccatggagatctacaaaaccgtgagcgcctggaagcggcagcctgtgcgcgtgctgagcctgtttcggaatatcgataaagtcctgaaaagcctgggattcctggagagcggctctggctccggcggtggcaccctgaagtacgtggaggatgtgacaaacgtggtcagacgggatgtggagaagtggggccccttcgatctggtgtacggcagcacccaacccctgggcagctcttgtgaccggtgccctggctggtacatgtttcagttccaccggatcctgcagtacgccctgccgagacaggagtcccagcggccattcttttggattttcatggacaacttgctgctgaccgaggatgaccaggaaactaccactcggttcctgcagaccgaagccgtgaccctgcaggacgtgagaggccgggactaccagaacgccatgcgggtgtggtccaacatccctggactgaaaagcaagcacgcacctctgacccctaaagaagaggagtacctgcaggcccaggtgcggagcagaagcaagctggacgcccctaaggtggatctgctggtgaagaattgcctcctgcccctgagagagtacttcaagtatttcagccagaatagtctgcccctgggaggcagcggcggcggcatgatcaccgcccagggccccgtgagcttcagggacgtgaccgtgggcttcacccaggaggagtggcagcacctggaccccgcccagaggaccctgtacagggacgtgatgatcgagaactacagccacctggtgagcgtgggctactgcatccccaagcccgaggtgatcctgaagctggagaagggcgaggagccctggatcagcgaggagaagttccccagccagagccacctggagctgggcggcccaagcagcggcgcccctcctcccagcggcggcagcccagccggctccccaacctctaccgaggagggcacctctgagtccgccacccccgagagcggccctggcacctccaccgagcccagcgagggcagcgcacccggcagccctgccggcagccccacctccacagaggagggaaccagcaccgagcccagcgaaggcagcgccccaggcaccagcaccgagcctagtgagcaggagattaaacggatcaacaagatcagaagaagacttgtgaaagacagcaacaccaagaaggccggcaagacaggccccatgaaaaccctgctggttagagtgatgacacccgatctgagagagcggctggaaaacctgagaaagaagcctgaaaatatcccccagcccatcagcaatacatctagagccaacctgaataagctgctgaccgattacaccgaaatgaagaaggcgatcctgcatgtgtactgggaagagttccagaaggaccctgtgggcctgatgagccgggtggcccagcctgccagcaagaagatcgatcagaacaagctgaaacctgagatggacgagaagggcaacctgaccaccgccggctttgcctgctctcagtgtggccagcccctgttcgtgtacaagctggagcaggtgtctgagaagggcaaggcttacaccaactacttcggacggtgcaatgtggccgagcacgaaaagctgatcctgctggcccagctgaagcccgagaaggatagcgacgaagccgtgacatatagcctgggaaagtttgggcagagggccctggatttctacagcattcatgtgaccaaggagtccacccaccccgtgaagcccctggcccagatcgccggaaacagatacgcctccggacctgtgggaaaggccctgagcgacgcatgtatgggcacaatcgcctccttcctgtctaagtaccaggacatcatcatcgaacaccagaaggtggtgaagggcaaccagaagagactggagagcctgcgggagctggccggcaaggaaaacctggaataccctagcgtgaccctgccacctcagcctcacaccaaggagggcgttgatgcctacaacgaagtgatcgcccgggtgcgaatgtgggtgaacctgaacctgtggcagaagctgaagctaagcagagatgatgccaagcctctgctgagactgaagggattcccttcctttcctctggtcgagagacaggccaacgaagtggactggtgggacatggtgtgtaacgtgaagaagctgatcaacgagaaaaaggaggatggcaaggtgttttggcagaatctggctggctacaagagacaggaagccctgagaccatacctgagcagcgaggaagatcggaagaagggaaagaaattcgctcggtaccagctgggcgacctgctgctgcacctggaaaagaagcacggcgaggactggggaaaggtgtacgacgaggcctgggagcggattgacaagaaagtggaaggcctgagcaagcacatcaagctggaagaggaacggagaagcgaggacgcccagagcaaggccgccctgaccgactggctgcgggctaaggccagcttcgtgatcgagggcctgaaggaggccgacaaggacgagttctgcagatgcgagctgaagctgcagaagtggtacggggacctgcggggaaagcccttcgccatcgaagccgagaacagcatcctggacatcagcggcttcagcaagcagtacaactgtgccttcatctggcagaaggacggcgtgaagaagctgaacctgtacctgatcatcaactacttcaagggcggcaagctgcggttcaagaagatcaaacctgaagccttcgaagccaacagattctacaccgtgatcaacaaaaagagcggcgagatcgtgcccatggaggtgaacttcaacttcgacgaccccaacctgatcatcctgcctctggcctttggcaagagacagggcagagaattcatctggaacgacctgctgtccctggaaaccggcagcctgaagctggccaacggaagagtgatcgagaagacactgtacaacagaagaacccggcaggatgagcctgccctgttcgtggccctgaccttcgagcggcgggaggtcctggactcctccaatatcaaaccaatgaacctgatcggcgtggcaagaggcgaaaacatccccgccgtgatcgccctgaccgaccccgagggctgcccactgagccggtttaaggatagcctgggaaacccaacccacatcctgagaatcggcgagagctataaggagaagcagcggaccatccaggccaagaaggaggtggagcagcggagagccggcggctacagccggaagtacgccagcaaagccaagaatctggcagacgatatggtgagaaacaccgctagagatctgctgtactacgccgtgacccaggatgccatgctgatcttcgccaacctgagccggggcttcggccggcagggcaagcggaccttcatggccgagagacagtacacacggatggaggactggctgaccgccaagctggcctacgagggcctgagcaagacctacctgtccaagacactggcccagtacacctccaagacatgcagcaactgtgggtttaccatcaccagcgccgactacgacagggtgctggagaagctgaagaagacagcaacaggctggatgaccacaattaacggcaaggagctgaaggtggagggccagattacctactacaacagatacaagagacagaacgtagtcaaggacctgtccgtcgagctggatagactgagcgaagaatctgtgaacaacgacatctcctcctggacaaagggcagaagcggagaagctctgagcctcctgaagaaaagattctcccatagacccgtgcaggagaagttcgtgtgcctgaactgcggcttcgagacacacgcagccgagcaagccgccctgaacatcgccagatcctggctgttcctgcggagccaggagtacaagaaataccagacaaacaagacaaccggcaacaccgataagagagccttcgtcgagacctggcagtccttttaccggaagaagcttaaggaggtgtggaaacctgccgtgcggtctggcggatctggcggaggctccaccagccccaagaaaaagagaaaagtctaagctgccttctgcggggcttgccttctggccatgcccttcttctctcccttgcacctgtacctcttggtctttgaataaagcctgagtaggaaggctagcaaaaaaaaaaaaaaaaaaaaaaaaaaaaaaaaaaaaaaaaaaaaaaaaaaaaaaaaaaaaaaaaaaaaaaaaaaaaaaaa

SEQ ID NO: 13396 - RNA, 5785 nt, synthetic construct
  source 1..5785: mol_type = other RNA
aggaaataagagagaaaagaagagtaagaagaaatataagagccaccatggcccctaagaagaagcgtaaagtgagccggatggaacgcctcgtctacgaggtgcggcagaagtgcagaaacatcgaggacatctgcatctcctgcggatctctgaacgtgaccctggagcacccactgttcatcggcggcatgtgccagaactgtaaaaactgttttctggagtgtgcctatcaatacgacgatgacggctaccagagctactgcaccatctgttgcggcggaagagaggtgctgatgtgtggaaataacaactgctgccggtgcttctgcgtggaatgcgtggacctgctggtgggccccggcgccgcccaggccgctattaaggaagatccttggaactgctacatgtgcggccacaagggcacatacggcctgctgagacggagagaggactggcctagcagactgcagatgttcttcgccaataaccacgaccaggagttcgacccccctaaggtgtaccctcccgtccccgccgagaagagaaagcccatccgggtcctgagcctgttcgatggcatcgccaccggtctgctggtgctgaaggacctgggcatccaggtggataggtacattgcctccgaggtgtgcgaggactccatcaccgtgggaatggtgcgtcatcagggcaagatcatgtacgtgggcgacgtgcggagcgtgacacagaagcatatccaggagtggggccctttcgacctggtgatcggcggcagcccttgcaatgacctgagcatcgtgaacccagcccggaagggcctgtacgagggaaccggcagactgttcttcgagttttacagactgctgcacgacgcccggcctaaggaaggcgacgaccggcccttcttttggctgttcgagaatgtggtggccatgggagtcagcgacaagcgggatattagccggttcctggagagcaaccccgtgatgatcgatgccaaggaagtgagcgccgcccaccgggccagatacttctggggcaatctgcctggcatgaacagacccctggccagcaccgtgaacgacaagctggagctgcaggagtgcctggagcacggccggatcgccaagttcagcaaggtgagaaccatcaccacccgaagcaacagcatcaaacaaggcaaggaccagcactttcctgtgttcatgaacgagaaggaggacatcctgtggtgtaccgagatggagagagtgttcgggttcccagtccactacacagatgtcagcaacatgtctagactggccagacagagactgctgggaagaagctggtccgtccctgtgatcagacacctgttcgcccctctgaaggagtacttcgcctgcgtgagcagcggcaacagcaacgccaacagccggggccccagcttctctagcggcctggtgccactgtccctgagagggagccacatgggccccatggagatctacaaaaccgtgagcgcctggaagcggcagcctgtgcgcgtgctgagcctgtttcggaatatcgataaagtcctgaaaagcctgggattcctggagagcggctctggctccggcggtggcaccctgaagtacgtggaggatgtgacaaacgtggtcagacgggatgtggagaagtggggccccttcgatctggtgtacggcagcacccaacccctgggcagctcttgtgaccggtgccctggctggtacatgtttcagttccaccggatcctgcagtacgccctgccgagacaggagtcccagcggccattcttttggattttcatggacaacttgctgctgaccgaggatgaccaggaaactaccactcggttcctgcagaccgaagccgtgaccctgcaggacgtgagaggccgggactaccagaacgccatgcgggtgtggtccaacatccctggactgaaaagcaagcacgcacctctgacccctaaagaagaggagtacctgcaggcccaggtgcggagcagaagcaagctggacgcccctaaggtggatctgctggtgaagaattgcctcctgcccctgagagagtacttcaagtatttcagccagaatagtctgcccctgggaggcagcggcggcggcccccaggacctgatgaccttcgaggacgtggccgtggagttcacctggtgggagtggggccagctggaccccgcccagaaggacctgtacagggaggtgatgctggagaacttcaagaacctggccagcctgggcttccccgtgagcaagccctacatgatctgccagctggaggagggcgaggagccctgcatcctggagagggagatcagcaccggcgtgcacagcgactgggagaggaggggcggcccaagcagcggcgcccctcctcccagcggcggcagcccagccggctccccaacctctaccgaggagggcacctctgagtccgccacccccgagagcggccctggcacctccaccgagcccagcgagggcagcgcacccggcagccctgccggcagccccacctccacagaggagggaaccagcaccgagcccagcgaaggcagcgccccaggcaccagcaccgagcctagtgagcaggagattaaacggatcaacaagatcagaagaagacttgtgaaagacagcaacaccaagaaggccggcaagacaggccccatgaaaaccctgctggttagagtgatgacacccgatctgagagagcggctggaaaacctgagaaagaagcctgaaaatatcccccagcccatcagcaatacatctagagccaacctgaataagctgctgaccgattacaccgaaatgaagaaggcgatcctgcatgtgtactgggaagagttccagaaggaccctgtgggcctgatgagccgggtggcccagcctgccagcaagaagatcgatcagaacaagctgaaacctgagatggacgagaagggcaacctgaccaccgccggctttgcctgctctcagtgtggccagcccctgttcgtgtacaagctggagcaggtgtctgagaagggcaaggcttacaccaactacttcggacggtgcaatgtggccgagcacgaaaagctgatcctgctggcccagctgaagcccgagaaggatagcgacgaagccgtgacatatagcctgggaaagtttgggcagagggccctggatttctacagcattcatgtgaccaaggagtccacccaccccgtgaagcccctggcccagatcgccggaaacagatacgcctccggacctgtgggaaaggccctgagcgacgcatgtatgggcacaatcgcctccttcctgtctaagtaccaggacatcatcatcgaacaccagaaggtggtgaagggcaaccagaagagactggagagcctgcgggagctggccggcaaggaaaacctggaataccctagcgtgaccctgccacctcagcctcacaccaaggagggcgttgatgcctacaacgaagtgatcgcccgggtgcgaatgtgggtgaacctgaacctgtggcagaagctgaagctaagcagagatgatgccaagcctctgctgagactgaagggattcccttcctttcctctggtcgagagacaggccaacgaagtggactggtgggacatggtgtgtaacgtgaagaagctgatcaacgagaaaaaggaggatggcaaggtgttttggcagaatctggctggctacaagagacaggaagccctgagaccatacctgagcagcgaggaagatcggaagaagggaaagaaattcgctcggtaccagctgggcgacctgctgctgcacctggaaaagaagcacggcgaggactggggaaaggtgtacgacgaggcctgggagcggattgacaagaaagtggaaggcctgagcaagcacatcaagctggaagaggaacggagaagcgaggacgcccagagcaaggccgccctgaccgactggctgcgggctaaggccagcttcgtgatcgagggcctgaaggaggccgacaaggacgagttctgcagatgcgagctgaagctgcagaagtggtacggggacctgcggggaaagcccttcgccatcgaagccgagaacagcatcctggacatcagcggcttcagcaagcagtacaactgtgccttcatctggcagaaggacggcgtgaagaagctgaacctgtacctgatcatcaactacttcaagggcggcaagctgcggttcaagaagatcaaacctgaagccttcgaagccaacagattctacaccgtgatcaacaaaaagagcggcgagatcgtgcccatggaggtgaacttcaacttcgacgaccccaacctgatcatcctgcctctggcctttggcaagagacagggcagagaattcatctggaacgacctgctgtccctggaaaccggcagcctgaagctggccaacggaagagtgatcgagaagacactgtacaacagaagaacccggcaggatgagcctgccctgttcgtggccctgaccttcgagcggcgggaggtcctggactcctccaatatcaaaccaatgaacctgatcggcgtggcaagaggcgaaaacatccccgccgtgatcgccctgaccgaccccgagggctgcccactgagccggtttaaggatagcctgggaaacccaacccacatcctgagaatcggcgagagctataaggagaagcagcggaccatccaggccaagaaggaggtggagcagcggagagccggcggctacagccggaagtacgccagcaaagccaagaatctggcagacgatatggtgagaaacaccgctagagatctgctgtactacgccgtgacccaggatgccatgctgatcttcgccaacctgagccggggcttcggccggcagggcaagcggaccttcatggccgagagacagtacacacggatggaggactggctgaccgccaagctggcctacgagggcctgagcaagacctacctgtccaagacactggcccagtacacctccaagacatgcagcaactgtgggtttaccatcaccagcgccgactacgacagggtgctggagaagctgaagaagacagcaacaggctggatgaccacaattaacggcaaggagctgaaggtggagggccagattacctactacaacagatacaagagacagaacgtagtcaaggacctgtccgtcgagctggatagactgagcgaagaatctgtgaacaacgacatctcctcctggacaaagggcagaagcggagaagctctgagcctcctgaagaaaagattctcccatagacccgtgcaggagaagttcgtgtgcctgaactgcggcttcgagacacacgcagccgagcaagccgccctgaacatcgccagatcctggctgttcctgcggagccaggagtacaagaaataccagacaaacaagacaaccggcaacaccgataagagagccttcgtcgagacctggcagtccttttaccggaagaagcttaaggaggtgtggaaacctgccgtgcggtctggcggatctggcggaggctccaccagccccaagaaaaagagaaaagtctaagctgccttctgcggggcttgccttctggccatgcccttcttctctcccttgcacctgtacctcttggtctttgaataaagcctgagtaggaaggctagcaaaaaaaaaaaaaaaaaaaaaaaaaaaaaaaaaaaaaaaaaaaaaaaaaaaaaaaaaaaaaaaaaaaaaaaaaaaaaaaa

SEQ ID NO: 13397 - RNA, 5785 nt, synthetic construct
  source 1..5785: mol_type = other RNA
aggaaataagagagaaaagaagagtaagaagaaatataagagccaccatggcccctaagaagaagcgtaaagtgagccggatggaacgcctcgtctacgaggtgcggcagaagtgcagaaacatcgaggacatctgcatctcctgcggatctctgaacgtgaccctggagcacccactgttcatcggcggcatgtgccagaactgtaaaaactgttttctggagtgtgcctatcaatacgacgatgacggctaccagagctactgcaccatctgttgcggcggaagagaggtgctgatgtgtggaaataacaactgctgccggtgcttctgcgtggaatgcgtggacctgctggtgggccccggcgccgcccaggccgctattaaggaagatccttggaactgctacatgtgcggccacaagggcacatacggcctgctgagacggagagaggactggcctagcagactgcagatgttcttcgccaataaccacgaccaggagttcgacccccctaaggtgtaccctcccgtccccgccgagaagagaaagcccatccgggtcctgagcctgttcgatggcatcgccaccggtctgctggtgctgaaggacctgggcatccaggtggataggtacattgcctccgaggtgtgcgaggactccatcaccgtgggaatggtgcgtcatcagggcaagatcatgtacgtgggcgacgtgcggagcgtgacacagaagcatatccaggagtggggccctttcgacctggtgatcggcggcagcccttgcaatgacctgagcatcgtgaacccagcccggaagggcctgtacgagggaaccggcagactgttcttcgagttttacagactgctgcacgacgcccggcctaaggaaggcgacgaccggcccttcttttggctgttcgagaatgtggtggccatgggagtcagcgacaagcgggatattagccggttcctggagagcaaccccgtgatgatcgatgccaaggaagtgagcgccgcccaccgggccagatacttctggggcaatctgcctggcatgaacagacccctggccagcaccgtgaacgacaagctggagctgcaggagtgcctggagcacggccggatcgccaagttcagcaaggtgagaaccatcaccacccgaagcaacagcatcaaacaaggcaaggaccagcactttcctgtgttcatgaacgagaaggaggacatcctgtggtgtaccgagatggagagagtgttcgggttcccagtccactacacagatgtcagcaacatgtctagactggccagacagagactgctgggaagaagctggtccgtccctgtgatcagacacctgttcgcccctctgaaggagtacttcgcctgcgtgagcagcggcaacagcaacgccaacagccggggccccagcttctctagcggcctggtgccactgtccctgagagggagccacatgggccccatggagatctacaaaaccgtgagcgcctggaagcggcagcctgtgcgcgtgctgagcctgtttcggaatatcgataaagtcctgaaaagcctgggattcctggagagcggctctggctccggcggtggcaccctgaagtacgtggaggatgtgacaaacgtggtcagacgggatgtggagaagtggggccccttcgatctggtgtacggcagcacccaacccctgggcagctcttgtgaccggtgccctggctggtacatgtttcagttccaccggatcctgcagtacgccctgccgagacaggagtcccagcggccattcttttggattttcatggacaacttgctgctgaccgaggatgaccaggaaactaccactcggttcctgcagaccgaagccgtgaccctgcaggacgtgagaggccgggactaccagaacgccatgcgggtgtggtccaacatccctggactgaaaagcaagcacgcacctctgacccctaaagaagaggagtacctgcaggcccaggtgcggagcagaagcaagctggacgcccctaaggtggatctgctggtgaagaattgcctcctgcccctgagagagtacttcaagtatttcagccagaatagtctgcccctgggaggcagcggcggcggcatggtgaccttcgaggacgtggccgtgcacttcaccaagaccgagtggaccggcctgagccccgcccagagggccctgtacaggagcgtgatgctggagaacttcggcaacctgaccgccctgggctaccccgtgcccaagcccgccctgatcagcctgctggagggcggcgacatggcctggggcctggaggcccaggacgaccccctggccgagaggaccaagaacatctgcaagggcgtgggcggcccaagcagcggcgcccctcctcccagcggcggcagcccagccggctccccaacctctaccgaggagggcacctctgagtccgccacccccgagagcggccctggcacctccaccgagcccagcgagggcagcgcacccggcagccctgccggcagccccacctccacagaggagggaaccagcaccgagcccagcgaaggcagcgccccaggcaccagcaccgagcctagtgagcaggagattaaacggatcaacaagatcagaagaagacttgtgaaagacagcaacaccaagaaggccggcaagacaggccccatgaaaaccctgctggttagagtgatgacacccgatctgagagagcggctggaaaacctgagaaagaagcctgaaaatatcccccagcccatcagcaatacatctagagccaacctgaataagctgctgaccgattacaccgaaatgaagaaggcgatcctgcatgtgtactgggaagagttccagaaggaccctgtgggcctgatgagccgggtggcccagcctgccagcaagaagatcgatcagaacaagctgaaacctgagatggacgagaagggcaacctgaccaccgccggctttgcctgctctcagtgtggccagcccctgttcgtgtacaagctggagcaggtgtctgagaagggcaaggcttacaccaactacttcggacggtgcaatgtggccgagcacgaaaagctgatcctgctggcccagctgaagcccgagaaggatagcgacgaagccgtgacatatagcctgggaaagtttgggcagagggccctggatttctacagcattcatgtgaccaaggagtccacccaccccgtgaagcccctggcccagatcgccggaaacagatacgcctccggacctgtgggaaaggccctgagcgacgcatgtatgggcacaatcgcctccttcctgtctaagtaccaggacatcatcatcgaacaccagaaggtggtgaagggcaaccagaagagactggagagcctgcgggagctggccggcaaggaaaacctggaataccctagcgtgaccctgccacctcagcctcacaccaaggagggcgttgatgcctacaacgaagtgatcgcccgggtgcgaatgtgggtgaacctgaacctgtggcagaagctgaagctaagcagagatgatgccaagcctctgctgagactgaagggattcccttcctttcctctggtcgagagacaggccaacgaagtggactggtgggacatggtgtgtaacgtgaagaagctgatcaacgagaaaaaggaggatggcaaggtgttttggcagaatctggctggctacaagagacaggaagccctgagaccatacctgagcagcgaggaagatcggaagaagggaaagaaattcgctcggtaccagctgggcgacctgctgctgcacctggaaaagaagcacggcgaggactggggaaaggtgtacgacgaggcctgggagcggattgacaagaaagtggaaggcctgagcaagcacatcaagctggaagaggaacggagaagcgaggacgcccagagcaaggccgccctgaccgactggctgcgggctaaggccagcttcgtgatcgagggcctgaaggaggccgacaaggacgagttctgcagatgcgagctgaagctgcagaagtggtacggggacctgcggggaaagcccttcgccatcgaagccgagaacagcatcctggacatcagcggcttcagcaagcagtacaactgtgccttcatctggcagaaggacggcgtgaagaagctgaacctgtacctgatcatcaactacttcaagggcggcaagctgcggttcaagaagatcaaacctgaagccttcgaagccaacagattctacaccgtgatcaacaaaaagagcggcgagatcgtgcccatggaggtgaacttcaacttcgacgaccccaacctgatcatcctgcctctggcctttggcaagagacagggcagagaattcatctggaacgacctgctgtccctggaaaccggcagcctgaagctggccaacggaagagtgatcgagaagacactgtacaacagaagaacccggcaggatgagcctgccctgttcgtggccctgaccttcgagcggcgggaggtcctggactcctccaatatcaaaccaatgaacctgatcggcgtggcaagaggcgaaaacatccccgccgtgatcgccctgaccgaccccgagggctgcccactgagccggtttaaggatagcctgggaaacccaacccacatcctgagaatcggcgagagctataaggagaagcagcggaccatccaggccaagaaggaggtggagcagcggagagccggcggctacagccggaagtacgccagcaaagccaagaatctggcagacgatatggtgagaaacaccgctagagatctgctgtactacgccgtgacccaggatgccatgctgatcttcgccaacctgagccggggcttcggccggcagggcaagcggaccttcatggccgagagacagtacacacggatggaggactggctgaccgccaagctggcctacgagggcctgagcaagacctacctgtccaagacactggcccagtacacctccaagacatgcagcaactgtgggtttaccatcaccagcgccgactacgacagggtgctggagaagctgaagaagacagcaacaggctggatgaccacaattaacggcaaggagctgaaggtggagggccagattacctactacaacagatacaagagacagaacgtagtcaaggacctgtccgtcgagctggatagactgagcgaagaatctgtgaacaacgacatctcctcctggacaaagggcagaagcggagaagctctgagcctcctgaagaaaagattctcccatagacccgtgcaggagaagttcgtgtgcctgaactgcggcttcgagacacacgcagccgagcaagccgccctgaacatcgccagatcctggctgttcctgcggagccaggagtacaagaaataccagacaaacaagacaaccggcaacaccgataagagagccttcgtcgagacctggcagtccttttaccggaagaagcttaaggaggtgtggaaacctgccgtgcggtctggcggatctggcggaggctccaccagccccaagaaaaagagaaaagtctaagctgccttctgcggggcttgccttctggccatgcccttcttctctcccttgcacctgtacctcttggtctttgaataaagcctgagtaggaaggctagcaaaaaaaaaaaaaaaaaaaaaaaaaaaaaaaaaaaaaaaaaaaaaaaaaaaaaaaaaaaaaaaaaaaaaaaaaaaaaaaa

SEQ ID NO: 13398 - RNA, 5785 nt, synthetic construct
  source 1..5785: mol_type = other RNA
aggaaataagagagaaaagaagagtaagaagaaatataagagccaccatggcccctaagaagaagcgtaaagtgagccggatggaacgcctcgtctacgaggtgcggcagaagtgcagaaacatcgaggacatctgcatctcctgcggatctctgaacgtgaccctggagcacccactgttcatcggcggcatgtgccagaactgtaaaaactgttttctggagtgtgcctatcaatacgacgatgacggctaccagagctactgcaccatctgttgcggcggaagagaggtgctgatgtgtggaaataacaactgctgccggtgcttctgcgtggaatgcgtggacctgctggtgggccccggcgccgcccaggccgctattaaggaagatccttggaactgctacatgtgcggccacaagggcacatacggcctgctgagacggagagaggactggcctagcagactgcagatgttcttcgccaataaccacgaccaggagttcgacccccctaaggtgtaccctcccgtccccgccgagaagagaaagcccatccgggtcctgagcctgttcgatggcatcgccaccggtctgctggtgctgaaggacctgggcatccaggtggataggtacattgcctccgaggtgtgcgaggactccatcaccgtgggaatggtgcgtcatcagggcaagatcatgtacgtgggcgacgtgcggagcgtgacacagaagcatatccaggagtggggccctttcgacctggtgatcggcggcagcccttgcaatgacctgagcatcgtgaacccagcccggaagggcctgtacgagggaaccggcagactgttcttcgagttttacagactgctgcacgacgcccggcctaaggaaggcgacgaccggcccttcttttggctgttcgagaatgtggtggccatgggagtcagcgacaagcgggatattagccggttcctggagagcaaccccgtgatgatcgatgccaaggaagtgagcgccgcccaccgggccagatacttctggggcaatctgcctggcatgaacagacccctggccagcaccgtgaacgacaagctggagctgcaggagtgcctggagcacggccggatcgccaagttcagcaaggtgagaaccatcaccacccgaagcaacagcatcaaacaaggcaaggaccagcactttcctgtgttcatgaacgagaaggaggacatcctgtggtgtaccgagatggagagagtgttcgggttcccagtccactacacagatgtcagcaacatgtctagactggccagacagagactgctgggaagaagctggtccgtccctgtgatcagacacctgttcgcccctctgaaggagtacttcgcctgcgtgagcagcggcaacagcaacgccaacagccggggccccagcttctctagcggcctggtgccactgtccctgagagggagccacatgggccccatggagatctacaaaaccgtgagcgcctggaagcggcagcctgtgcgcgtgctgagcctgtttcggaatatcgataaagtcctgaaaagcctgggattcctggagagcggctctggctccggcggtggcaccctgaagtacgtggaggatgtgacaaacgtggtcagacgggatgtggagaagtggggccccttcgatctggtgtacggcagcacccaacccctgggcagctcttgtgaccggtgccctggctggtacatgtttcagttccaccggatcctgcagtacgccctgccgagacaggagtcccagcggccattcttttggattttcatggacaacttgctgctgaccgaggatgaccaggaaactaccactcggttcctgcagaccgaagccgtgaccctgcaggacgtgagaggccgggactaccagaacgccatgcgggtgtggtccaacatccctggactgaaaagcaagcacgcacctctgacccctaaagaagaggagtacctgcaggcccaggtgcggagcagaagcaagctggacgcccctaaggtggatctgctggtgaagaattgcctcctgcccctgagagagtacttcaagtatttcagccagaatagtctgcccctgggaggcagcggcggcggccccgcccagggccccggcaaggccaggcccagcaggaagaggggcaggaggcccagggccctgaagttcgtggacgtggccgtgtacttcagccccgaggagtggggctgcctgaggcccgcccagagggccctgtacagggacgtgatgagggagacctacggccacctgggcgccctgggctgcgccggccccaagcccgccctgatcagctggctggagaggaacaccgacgactgggagggcggcccaagcagcggcgcccctcctcccagcggcggcagcccagccggctccccaacctctaccgaggagggcacctctgagtccgccacccccgagagcggccctggcacctccaccgagcccagcgagggcagcgcacccggcagccctgccggcagccccacctccacagaggagggaaccagcaccgagcccagcgaaggcagcgccccaggcaccagcaccgagcctagtgagcaggagattaaacggatcaacaagatcagaagaagacttgtgaaagacagcaacaccaagaaggccggcaagacaggccccatgaaaaccctgctggttagagtgatgacacccgatctgagagagcggctggaaaacctgagaaagaagcctgaaaatatcccccagcccatcagcaatacatctagagccaacctgaataagctgctgaccgattacaccgaaatgaagaaggcgatcctgcatgtgtactgggaagagttccagaaggaccctgtgggcctgatgagccgggtggcccagcctgccagcaagaagatcgatcagaacaagctgaaacctgagatggacgagaagggcaacctgaccaccgccggctttgcctgctctcagtgtggccagcccctgttcgtgtacaagctggagcaggtgtctgagaagggcaaggcttacaccaactacttcggacggtgcaatgtggccgagcacgaaaagctgatcctgctggcccagctgaagcccgagaaggatagcgacgaagccgtgacatatagcctgggaaagtttgggcagagggccctggatttctacagcattcatgtgaccaaggagtccacccaccccgtgaagcccctggcccagatcgccggaaacagatacgcctccggacctgtgggaaaggccctgagcgacgcatgtatgggcacaatcgcctccttcctgtctaagtaccaggacatcatcatcgaacaccagaaggtggtgaagggcaaccagaagagactggagagcctgcgggagctggccggcaaggaaaacctggaataccctagcgtgaccctgccacctcagcctcacaccaaggagggcgttgatgcctacaacgaagtgatcgcccgggtgcgaatgtgggtgaacctgaacctgtggcagaagctgaagctaagcagagatgatgccaagcctctgctgagactgaagggattcccttcctttcctctggtcgagagacaggccaacgaagtggactggtgggacatggtgtgtaacgtgaagaagctgatcaacgagaaaaaggaggatggcaaggtgttttggcagaatctggctggctacaagagacaggaagccctgagaccatacctgagcagcgaggaagatcggaagaagggaaagaaattcgctcggtaccagctgggcgacctgctgctgcacctggaaaagaagcacggcgaggactggggaaaggtgtacgacgaggcctgggagcggattgacaagaaagtggaaggcctgagcaagcacatcaagctggaagaggaacggagaagcgaggacgcccagagcaaggccgccctgaccgactggctgcgggctaaggccagcttcgtgatcgagggcctgaaggaggccgacaaggacgagttctgcagatgcgagctgaagctgcagaagtggtacggggacctgcggggaaagcccttcgccatcgaagccgagaacagcatcctggacatcagcggcttcagcaagcagtacaactgtgccttcatctggcagaaggacggcgtgaagaagctgaacctgtacctgatcatcaactacttcaagggcggcaagctgcggttcaagaagatcaaacctgaagccttcgaagccaacagattctacaccgtgatcaacaaaaagagcggcgagatcgtgcccatggaggtgaacttcaacttcgacgaccccaacctgatcatcctgcctctggcctttggcaagagacagggcagagaattcatctggaacgacctgctgtccctggaaaccggcagcctgaagctggccaacggaagagtgatcgagaagacactgtacaacagaagaacccggcaggatgagcctgccctgttcgtggccctgaccttcgagcggcgggaggtcctggactcctccaatatcaaaccaatgaacctgatcggcgtggcaagaggcgaaaacatccccgccgtgatcgccctgaccgaccccgagggctgcccactgagccggtttaaggatagcctgggaaacccaacccacatcctgagaatcggcgagagctataaggagaagcagcggaccatccaggccaagaaggaggtggagcagcggagagccggcggctacagccggaagtacgccagcaaagccaagaatctggcagacgatatggtgagaaacaccgctagagatctgctgtactacgccgtgacccaggatgccatgctgatcttcgccaacctgagccggggcttcggccggcagggcaagcggaccttcatggccgagagacagtacacacggatggaggactggctgaccgccaagctggcctacgagggcctgagcaagacctacctgtccaagacactggcccagtacacctccaagacatgcagcaactgtgggtttaccatcaccagcgccgactacgacagggtgctggagaagctgaagaagacagcaacaggctggatgaccacaattaacggcaaggagctgaaggtggagggccagattacctactacaacagatacaagagacagaacgtagtcaaggacctgtccgtcgagctggatagactgagcgaagaatctgtgaacaacgacatctcctcctggacaaagggcagaagcggagaagctctgagcctcctgaagaaaagattctcccatagacccgtgcaggagaagttcgtgtgcctgaactgcggcttcgagacacacgcagccgagcaagccgccctgaacatcgccagatcctggctgttcctgcggagccaggagtacaagaaataccagacaaacaagacaaccggcaacaccgataagagagccttcgtcgagacctggcagtccttttaccggaagaagcttaaggaggtgtggaaacctgccgtgcggtctggcggatctggcggaggctccaccagccccaagaaaaagagaaaagtctaagctgccttctgcggggcttgccttctggccatgcccttcttctctcccttgcacctgtacctcttggtctttgaataaagcctgagtaggaaggctagcaaaaaaaaaaaaaaaaaaaaaaaaaaaaaaaaaaaaaaaaaaaaaaaaaaaaaaaaaaaaaaaaaaaaaaaaaaaaaaaa

SEQ ID NO: 13399 - RNA, 5785 nt, synthetic construct
  source 1..5785: mol_type = other RNA
aggaaataagagagaaaagaagagtaagaagaaatataagagccaccatggcccctaagaagaagcgtaaagtgagccggatggaacgcctcgtctacgaggtgcggcagaagtgcagaaacatcgaggacatctgcatctcctgcggatctctgaacgtgaccctggagcacccactgttcatcggcggcatgtgccagaactgtaaaaactgttttctggagtgtgcctatcaatacgacgatgacggctaccagagctactgcaccatctgttgcggcggaagagaggtgctgatgtgtggaaataacaactgctgccggtgcttctgcgtggaatgcgtggacctgctggtgggccccggcgccgcccaggccgctattaaggaagatccttggaactgctacatgtgcggccacaagggcacatacggcctgctgagacggagagaggactggcctagcagactgcagatgttcttcgccaataaccacgaccaggagttcgacccccctaaggtgtaccctcccgtccccgccgagaagagaaagcccatccgggtcctgagcctgttcgatggcatcgccaccggtctgctggtgctgaaggacctgggcatccaggtggataggtacattgcctccgaggtgtgcgaggactccatcaccgtgggaatggtgcgtcatcagggcaagatcatgtacgtgggcgacgtgcggagcgtgacacagaagcatatccaggagtggggccctttcgacctggtgatcggcggcagcccttgcaatgacctgagcatcgtgaacccagcccggaagggcctgtacgagggaaccggcagactgttcttcgagttttacagactgctgcacgacgcccggcctaaggaaggcgacgaccggcccttcttttggctgttcgagaatgtggtggccatgggagtcagcgacaagcgggatattagccggttcctggagagcaaccccgtgatgatcgatgccaaggaagtgagcgccgcccaccgggccagatacttctggggcaatctgcctggcatgaacagacccctggccagcaccgtgaacgacaagctggagctgcaggagtgcctggagcacggccggatcgccaagttcagcaaggtgagaaccatcaccacccgaagcaacagcatcaaacaaggcaaggaccagcactttcctgtgttcatgaacgagaaggaggacatcctgtggtgtaccgagatggagagagtgttcgggttcccagtccactacacagatgtcagcaacatgtctagactggccagacagagactgctgggaagaagctggtccgtccctgtgatcagacacctgttcgcccctctgaaggagtacttcgcctgcgtgagcagcggcaacagcaacgccaacagccggggccccagcttctctagcggcctggtgccactgtccctgagagggagccacatgggccccatggagatctacaaaaccgtgagcgcctggaagcggcagcctgtgcgcgtgctgagcctgtttcggaatatcgataaagtcctgaaaagcctgggattcctggagagcggctctggctccggcggtggcaccctgaagtacgtggaggatgtgacaaacgtggtcagacgggatgtggagaagtggggccccttcgatctggtgtacggcagcacccaacccctgggcagctcttgtgaccggtgccctggctggtacatgtttcagttccaccggatcctgcagtacgccctgccgagacaggagtcccagcggccattcttttggattttcatggacaacttgctgctgaccgaggatgaccaggaaactaccactcggttcctgcagaccgaagccgtgaccctgcaggacgtgagaggccgggactaccagaacgccatgcgggtgtggtccaacatccctggactgaaaagcaagcacgcacctctgacccctaaagaagaggagtacctgcaggcccaggtgcggagcagaagcaagctggacgcccctaaggtggatctgctggtgaagaattgcctcctgcccctgagagagtacttcaagtatttcagccagaatagtctgcccctgggaggcagcggcggcggcttccaggtgctggtgagcttcgaggaggtggccgtgctgctgagccaggaggagtggggccacctgggccccgcccagaagaggctgtacagggacgtgatgctggagacctacggcaacctggtgagcctgggcctgcagggcagcaagcccgacgtgatcagcaagctggagcagggcgaggagccctggaccccccacagccccaggatcgagggcagctggatcaggaggaggaggcccggcggcccaagcagcggcgcccctcctcccagcggcggcagcccagccggctccccaacctctaccgaggagggcacctctgagtccgccacccccgagagcggccctggcacctccaccgagcccagcgagggcagcgcacccggcagccctgccggcagccccacctccacagaggagggaaccagcaccgagcccagcgaaggcagcgccccaggcaccagcaccgagcctagtgagcaggagattaaacggatcaacaagatcagaagaagacttgtgaaagacagcaacaccaagaaggccggcaagacaggccccatgaaaaccctgctggttagagtgatgacacccgatctgagagagcggctggaaaacctgagaaagaagcctgaaaatatcccccagcccatcagcaatacatctagagccaacctgaataagctgctgaccgattacaccgaaatgaagaaggcgatcctgcatgtgtactgggaagagttccagaaggaccctgtgggcctgatgagccgggtggcccagcctgccagcaagaagatcgatcagaacaagctgaaacctgagatggacgagaagggcaacctgaccaccgccggctttgcctgctctcagtgtggccagcccctgttcgtgtacaagctggagcaggtgtctgagaagggcaaggcttacaccaactacttcggacggtgcaatgtggccgagcacgaaaagctgatcctgctggcccagctgaagcccgagaaggatagcgacgaagccgtgacatatagcctgggaaagtttgggcagagggccctggatttctacagcattcatgtgaccaaggagtccacccaccccgtgaagcccctggcccagatcgccggaaacagatacgcctccggacctgtgggaaaggccctgagcgacgcatgtatgggcacaatcgcctccttcctgtctaagtaccaggacatcatcatcgaacaccagaaggtggtgaagggcaaccagaagagactggagagcctgcgggagctggccggcaaggaaaacctggaataccctagcgtgaccctgccacctcagcctcacaccaaggagggcgttgatgcctacaacgaagtgatcgcccgggtgcgaatgtgggtgaacctgaacctgtggcagaagctgaagctaagcagagatgatgccaagcctctgctgagactgaagggattcccttcctttcctctggtcgagagacaggccaacgaagtggactggtgggacatggtgtgtaacgtgaagaagctgatcaacgagaaaaaggaggatggcaaggtgttttggcagaatctggctggctacaagagacaggaagccctgagaccatacctgagcagcgaggaagatcggaagaagggaaagaaattcgctcggtaccagctgggcgacctgctgctgcacctggaaaagaagcacggcgaggactggggaaaggtgtacgacgaggcctgggagcggattgacaagaaagtggaaggcctgagcaagcacatcaagctggaagaggaacggagaagcgaggacgcccagagcaaggccgccctgaccgactggctgcgggctaaggccagcttcgtgatcgagggcctgaaggaggccgacaaggacgagttctgcagatgcgagctgaagctgcagaagtggtacggggacctgcggggaaagcccttcgccatcgaagccgagaacagcatcctggacatcagcggcttcagcaagcagtacaactgtgccttcatctggcagaaggacggcgtgaagaagctgaacctgtacctgatcatcaactacttcaagggcggcaagctgcggttcaagaagatcaaacctgaagccttcgaagccaacagattctacaccgtgatcaacaaaaagagcggcgagatcgtgcccatggaggtgaacttcaacttcgacgaccccaacctgatcatcctgcctctggcctttggcaagagacagggcagagaattcatctggaacgacctgctgtccctggaaaccggcagcctgaagctggccaacggaagagtgatcgagaagacactgtacaacagaagaacccggcaggatgagcctgccctgttcgtggccctgaccttcgagcggcgggaggtcctggactcctccaatatcaaaccaatgaacctgatcggcgtggcaagaggcgaaaacatccccgccgtgatcgccctgaccgaccccgagggctgcccactgagccggtttaaggatagcctgggaaacccaacccacatcctgagaatcggcgagagctataaggagaagcagcggaccatccaggccaagaaggaggtggagcagcggagagccggcggctacagccggaagtacgccagcaaagccaagaatctggcagacgatatggtgagaaacaccgctagagatctgctgtactacgccgtgacccaggatgccatgctgatcttcgccaacctgagccggggcttcggccggcagggcaagcggaccttcatggccgagagacagtacacacggatggaggactggctgaccgccaagctggcctacgagggcctgagcaagacctacctgtccaagacactggcccagtacacctccaagacatgcagcaactgtgggtttaccatcaccagcgccgactacgacagggtgctggagaagctgaagaagacagcaacaggctggatgaccacaattaacggcaaggagctgaaggtggagggccagattacctactacaacagatacaagagacagaacgtagtcaaggacctgtccgtcgagctggatagactgagcgaagaatctgtgaacaacgacatctcctcctggacaaagggcagaagcggagaagctctgagcctcctgaagaaaagattctcccatagacccgtgcaggagaagttcgtgtgcctgaactgcggcttcgagacacacgcagccgagcaagccgccctgaacatcgccagatcctggctgttcctgcggagccaggagtacaagaaataccagacaaacaagacaaccggcaacaccgataagagagccttcgtcgagacctggcagtccttttaccggaagaagcttaaggaggtgtggaaacctgccgtgcggtctggcggatctggcggaggctccaccagccccaagaaaaagagaaaagtctaagctgccttctgcggggcttgccttctggccatgcccttcttctctcccttgcacctgtacctcttggtctttgaataaagcctgagtaggaaggctagcaaaaaaaaaaaaaaaaaaaaaaaaaaaaaaaaaaaaaaaaaaaaaaaaaaaaaaaaaaaaaaaaaaaaaaaaaaaaaaaa

SEQ ID NO: 13400 - RNA, 5785 nt, synthetic construct
  source 1..5785: mol_type = other RNA
aggaaataagagagaaaagaagagtaagaagaaatataagagccaccatggcccctaagaagaagcgtaaagtgagccggatggaacgcctcgtctacgaggtgcggcagaagtgcagaaacatcgaggacatctgcatctcctgcggatctctgaacgtgaccctggagcacccactgttcatcggcggcatgtgccagaactgtaaaaactgttttctggagtgtgcctatcaatacgacgatgacggctaccagagctactgcaccatctgttgcggcggaagagaggtgctgatgtgtggaaataacaactgctgccggtgcttctgcgtggaatgcgtggacctgctggtgggccccggcgccgcccaggccgctattaaggaagatccttggaactgctacatgtgcggccacaagggcacatacggcctgctgagacggagagaggactggcctagcagactgcagatgttcttcgccaataaccacgaccaggagttcgacccccctaaggtgtaccctcccgtccccgccgagaagagaaagcccatccgggtcctgagcctgttcgatggcatcgccaccggtctgctggtgctgaaggacctgggcatccaggtggataggtacattgcctccgaggtgtgcgaggactccatcaccgtgggaatggtgcgtcatcagggcaagatcatgtacgtgggcgacgtgcggagcgtgacacagaagcatatccaggagtggggccctttcgacctggtgatcggcggcagcccttgcaatgacctgagcatcgtgaacccagcccggaagggcctgtacgagggaaccggcagactgttcttcgagttttacagactgctgcacgacgcccggcctaaggaaggcgacgaccggcccttcttttggctgttcgagaatgtggtggccatgggagtcagcgacaagcgggatattagccggttcctggagagcaaccccgtgatgatcgatgccaaggaagtgagcgccgcccaccgggccagatacttctggggcaatctgcctggcatgaacagacccctggccagcaccgtgaacgacaagctggagctgcaggagtgcctggagcacggccggatcgccaagttcagcaaggtgagaaccatcaccacccgaagcaacagcatcaaacaaggcaaggaccagcactttcctgtgttcatgaacgagaaggaggacatcctgtggtgtaccgagatggagagagtgttcgggttcccagtccactacacagatgtcagcaacatgtctagactggccagacagagactgctgggaagaagctggtccgtccctgtgatcagacacctgttcgcccctctgaaggagtacttcgcctgcgtgagcagcggcaacagcaacgccaacagccggggccccagcttctctagcggcctggtgccactgtccctgagagggagccacatgggccccatggagatctacaaaaccgtgagcgcctggaagcggcagcctgtgcgcgtgctgagcctgtttcggaatatcgataaagtcctgaaaagcctgggattcctggagagcggctctggctccggcggtggcaccctgaagtacgtggaggatgtgacaaacgtggtcagacgggatgtggagaagtggggccccttcgatctggtgtacggcagcacccaacccctgggcagctcttgtgaccggtgccctggctggtacatgtttcagttccaccggatcctgcagtacgccctgccgagacaggagtcccagcggccattcttttggattttcatggacaacttgctgctgaccgaggatgaccaggaaactaccactcggttcctgcagaccgaagccgtgaccctgcaggacgtgagaggccgggactaccagaacgccatgcgggtgtggtccaacatccctggactgaaaagcaagcacgcacctctgacccctaaagaagaggagtacctgcaggcccaggtgcggagcagaagcaagctggacgcccctaaggtggatctgctggtgaagaattgcctcctgcccctgagagagtacttcaagtatttcagccagaatagtctgcccctgggaggcagcggcggcggcatccaggagcccgtgaccttcaaggacgtggccgtggacttcacccaggaggagtggggccagctggacagcgtgcagaggaccctgtacagggacgtgatgctggagacctacggccacctgctgagcgtgggcaaccacatcgccaagcccgaggtgatcagcctgctggagcagggcgaggagccctggagcgtggagcaggcctacccccagagcacctgccccgagtggatgaggaacggcggcccaagcagcggcgcccctcctcccagcggcggcagcccagccggctccccaacctctaccgaggagggcacctctgagtccgccacccccgagagcggccctggcacctccaccgagcccagcgagggcagcgcacccggcagccctgccggcagccccacctccacagaggagggaaccagcaccgagcccagcgaaggcagcgccccaggcaccagcaccgagcctagtgagcaggagattaaacggatcaacaagatcagaagaagacttgtgaaagacagcaacaccaagaaggccggcaagacaggccccatgaaaaccctgctggttagagtgatgacacccgatctgagagagcggctggaaaacctgagaaagaagcctgaaaatatcccccagcccatcagcaatacatctagagccaacctgaataagctgctgaccgattacaccgaaatgaagaaggcgatcctgcatgtgtactgggaagagttccagaaggaccctgtgggcctgatgagccgggtggcccagcctgccagcaagaagatcgatcagaacaagctgaaacctgagatggacgagaagggcaacctgaccaccgccggctttgcctgctctcagtgtggccagcccctgttcgtgtacaagctggagcaggtgtctgagaagggcaaggcttacaccaactacttcggacggtgcaatgtggccgagcacgaaaagctgatcctgctggcccagctgaagcccgagaaggatagcgacgaagccgtgacatatagcctgggaaagtttgggcagagggccctggatttctacagcattcatgtgaccaaggagtccacccaccccgtgaagcccctggcccagatcgccggaaacagatacgcctccggacctgtgggaaaggccctgagcgacgcatgtatgggcacaatcgcctccttcctgtctaagtaccaggacatcatcatcgaacaccagaaggtggtgaagggcaaccagaagagactggagagcctgcgggagctggccggcaaggaaaacctggaataccctagcgtgaccctgccacctcagcctcacaccaaggagggcgttgatgcctacaacgaagtgatcgcccgggtgcgaatgtgggtgaacctgaacctgtggcagaagctgaagctaagcagagatgatgccaagcctctgctgagactgaagggattcccttcctttcctctggtcgagagacaggccaacgaagtggactggtgggacatggtgtgtaacgtgaagaagctgatcaacgagaaaaaggaggatggcaaggtgttttggcagaatctggctggctacaagagacaggaagccctgagaccatacctgagcagcgaggaagatcggaagaagggaaagaaattcgctcggtaccagctgggcgacctgctgctgcacctggaaaagaagcacggcgaggactggggaaaggtgtacgacgaggcctgggagcggattgacaagaaagtggaaggcctgagcaagcacatcaagctggaagaggaacggagaagcgaggacgcccagagcaaggccgccctgaccgactggctgcgggctaaggccagcttcgtgatcgagggcctgaaggaggccgacaaggacgagttctgcagatgcgagctgaagctgcagaagtggtacggggacctgcggggaaagcccttcgccatcgaagccgagaacagcatcctggacatcagcggcttcagcaagcagtacaactgtgccttcatctggcagaaggacggcgtgaagaagctgaacctgtacctgatcatcaactacttcaagggcggcaagctgcggttcaagaagatcaaacctgaagccttcgaagccaacagattctacaccgtgatcaacaaaaagagcggcgagatcgtgcccatggaggtgaacttcaacttcgacgaccccaacctgatcatcctgcctctggcctttggcaagagacagggcagagaattcatctggaacgacctgctgtccctggaaaccggcagcctgaagctggccaacggaagagtgatcgagaagacactgtacaacagaagaacccggcaggatgagcctgccctgttcgtggccctgaccttcgagcggcgggaggtcctggactcctccaatatcaaaccaatgaacctgatcggcgtggcaagaggcgaaaacatccccgccgtgatcgccctgaccgaccccgagggctgcccactgagccggtttaaggatagcctgggaaacccaacccacatcctgagaatcggcgagagctataaggagaagcagcggaccatccaggccaagaaggaggtggagcagcggagagccggcggctacagccggaagtacgccagcaaagccaagaatctggcagacgatatggtgagaaacaccgctagagatctgctgtactacgccgtgacccaggatgccatgctgatcttcgccaacctgagccggggcttcggccggcagggcaagcggaccttcatggccgagagacagtacacacggatggaggactggctgaccgccaagctggcctacgagggcctgagcaagacctacctgtccaagacactggcccagtacacctccaagacatgcagcaactgtgggtttaccatcaccagcgccgactacgacagggtgctggagaagctgaagaagacagcaacaggctggatgaccacaattaacggcaaggagctgaaggtggagggccagattacctactacaacagatacaagagacagaacgtagtcaaggacctgtccgtcgagctggatagactgagcgaagaatctgtgaacaacgacatctcctcctggacaaagggcagaagcggagaagctctgagcctcctgaagaaaagattctcccatagacccgtgcaggagaagttcgtgtgcctgaactgcggcttcgagacacacgcagccgagcaagccgccctgaacatcgccagatcctggctgttcctgcggagccaggagtacaagaaataccagacaaacaagacaaccggcaacaccgataagagagccttcgtcgagacctggcagtccttttaccggaagaagcttaaggaggtgtggaaacctgccgtgcggtctggcggatctggcggaggctccaccagccccaagaaaaagagaaaagtctaagctgccttctgcggggcttgccttctggccatgcccttcttctctcccttgcacctgtacctcttggtctttgaataaagcctgagtaggaaggctagcaaaaaaaaaaaaaaaaaaaaaaaaaaaaaaaaaaaaaaaaaaaaaaaaaaaaaaaaaaaaaaaaaaaaaaaaaaaaaaaa

SEQ ID NO: 13401 - RNA, 5785 nt, synthetic construct
  source 1..5785: mol_type = other RNA
aggaaataagagagaaaagaagagtaagaagaaatataagagccaccatggcccctaagaagaagcgtaaagtgagccggatggaacgcctcgtctacgaggtgcggcagaagtgcagaaacatcgaggacatctgcatctcctgcggatctctgaacgtgaccctggagcacccactgttcatcggcggcatgtgccagaactgtaaaaactgttttctggagtgtgcctatcaatacgacgatgacggctaccagagctactgcaccatctgttgcggcggaagagaggtgctgatgtgtggaaataacaactgctgccggtgcttctgcgtggaatgcgtggacctgctggtgggccccggcgccgcccaggccgctattaaggaagatccttggaactgctacatgtgcggccacaagggcacatacggcctgctgagacggagagaggactggcctagcagactgcagatgttcttcgccaataaccacgaccaggagttcgacccccctaaggtgtaccctcccgtccccgccgagaagagaaagcccatccgggtcctgagcctgttcgatggcatcgccaccggtctgctggtgctgaaggacctgggcatccaggtggataggtacattgcctccgaggtgtgcgaggactccatcaccgtgggaatggtgcgtcatcagggcaagatcatgtacgtgggcgacgtgcggagcgtgacacagaagcatatccaggagtggggccctttcgacctggtgatcggcggcagcccttgcaatgacctgagcatcgtgaacccagcccggaagggcctgtacgagggaaccggcagactgttcttcgagttttacagactgctgcacgacgcccggcctaaggaaggcgacgaccggcccttcttttggctgttcgagaatgtggtggccatgggagtcagcgacaagcgggatattagccggttcctggagagcaaccccgtgatgatcgatgccaaggaagtgagcgccgcccaccgggccagatacttctggggcaatctgcctggcatgaacagacccctggccagcaccgtgaacgacaagctggagctgcaggagtgcctggagcacggccggatcgccaagttcagcaaggtgagaaccatcaccacccgaagcaacagcatcaaacaaggcaaggaccagcactttcctgtgttcatgaacgagaaggaggacatcctgtggtgtaccgagatggagagagtgttcgggttcccagtccactacacagatgtcagcaacatgtctagactggccagacagagactgctgggaagaagctggtccgtccctgtgatcagacacctgttcgcccctctgaaggagtacttcgcctgcgtgagcagcggcaacagcaacgccaacagccggggccccagcttctctagcggcctggtgccactgtccctgagagggagccacatgggccccatggagatctacaaaaccgtgagcgcctggaagcggcagcctgtgcgcgtgctgagcctgtttcggaatatcgataaagtcctgaaaagcctgggattcctggagagcggctctggctccggcggtggcaccctgaagtacgtggaggatgtgacaaacgtggtcagacgggatgtggagaagtggggccccttcgatctggtgtacggcagcacccaacccctgggcagctcttgtgaccggtgccctggctggtacatgtttcagttccaccggatcctgcagtacgccctgccgagacaggagtcccagcggccattcttttggattttcatggacaacttgctgctgaccgaggatgaccaggaaactaccactcggttcctgcagaccgaagccgtgaccctgcaggacgtgagaggccgggactaccagaacgccatgcgggtgtggtccaacatccctggactgaaaagcaagcacgcacctctgacccctaaagaagaggagtacctgcaggcccaggtgcggagcagaagcaagctggacgcccctaaggtggatctgctggtgaagaattgcctcctgcccctgagagagtacttcaagtatttcagccagaatagtctgcccctgggaggcagcggcggcggccacaagaagagcatggtgttcagcgacgtgagcctggacttcagccaggaggagtgggagtgcctgggccccgcccagaaggacctgtacagggacgtgatgctggagaactacagccacctgctgagcgtggccggcctgcacatccccaagccccaggtgatcagcctgctggagcagggcaaggagccctggatgatcggcaaggagctgaccaggggcctgtgcagcgccctggagagcggcggcccaagcagcggcgcccctcctcccagcggcggcagcccagccggctccccaacctctaccgaggagggcacctctgagtccgccacccccgagagcggccctggcacctccaccgagcccagcgagggcagcgcacccggcagccctgccggcagccccacctccacagaggagggaaccagcaccgagcccagcgaaggcagcgccccaggcaccagcaccgagcctagtgagcaggagattaaacggatcaacaagatcagaagaagacttgtgaaagacagcaacaccaagaaggccggcaagacaggccccatgaaaaccctgctggttagagtgatgacacccgatctgagagagcggctggaaaacctgagaaagaagcctgaaaatatcccccagcccatcagcaatacatctagagccaacctgaataagctgctgaccgattacaccgaaatgaagaaggcgatcctgcatgtgtactgggaagagttccagaaggaccctgtgggcctgatgagccgggtggcccagcctgccagcaagaagatcgatcagaacaagctgaaacctgagatggacgagaagggcaacctgaccaccgccggctttgcctgctctcagtgtggccagcccctgttcgtgtacaagctggagcaggtgtctgagaagggcaaggcttacaccaactacttcggacggtgcaatgtggccgagcacgaaaagctgatcctgctggcccagctgaagcccgagaaggatagcgacgaagccgtgacatatagcctgggaaagtttgggcagagggccctggatttctacagcattcatgtgaccaaggagtccacccaccccgtgaagcccctggcccagatcgccggaaacagatacgcctccggacctgtgggaaaggccctgagcgacgcatgtatgggcacaatcgcctccttcctgtctaagtaccaggacatcatcatcgaacaccagaaggtggtgaagggcaaccagaagagactggagagcctgcgggagctggccggcaaggaaaacctggaataccctagcgtgaccctgccacctcagcctcacaccaaggagggcgttgatgcctacaacgaagtgatcgcccgggtgcgaatgtgggtgaacctgaacctgtggcagaagctgaagctaagcagagatgatgccaagcctctgctgagactgaagggattcccttcctttcctctggtcgagagacaggccaacgaagtggactggtgggacatggtgtgtaacgtgaagaagctgatcaacgagaaaaaggaggatggcaaggtgttttggcagaatctggctggctacaagagacaggaagccctgagaccatacctgagcagcgaggaagatcggaagaagggaaagaaattcgctcggtaccagctgggcgacctgctgctgcacctggaaaagaagcacggcgaggactggggaaaggtgtacgacgaggcctgggagcggattgacaagaaagtggaaggcctgagcaagcacatcaagctggaagaggaacggagaagcgaggacgcccagagcaaggccgccctgaccgactggctgcgggctaaggccagcttcgtgatcgagggcctgaaggaggccgacaaggacgagttctgcagatgcgagctgaagctgcagaagtggtacggggacctgcggggaaagcccttcgccatcgaagccgagaacagcatcctggacatcagcggcttcagcaagcagtacaactgtgccttcatctggcagaaggacggcgtgaagaagctgaacctgtacctgatcatcaactacttcaagggcggcaagctgcggttcaagaagatcaaacctgaagccttcgaagccaacagattctacaccgtgatcaacaaaaagagcggcgagatcgtgcccatggaggtgaacttcaacttcgacgaccccaacctgatcatcctgcctctggcctttggcaagagacagggcagagaattcatctggaacgacctgctgtccctggaaaccggcagcctgaagctggccaacggaagagtgatcgagaagacactgtacaacagaagaacccggcaggatgagcctgccctgttcgtggccctgaccttcgagcggcgggaggtcctggactcctccaatatcaaaccaatgaacctgatcggcgtggcaagaggcgaaaacatccccgccgtgatcgccctgaccgaccccgagggctgcccactgagccggtttaaggatagcctgggaaacccaacccacatcctgagaatcggcgagagctataaggagaagcagcggaccatccaggccaagaaggaggtggagcagcggagagccggcggctacagccggaagtacgccagcaaagccaagaatctggcagacgatatggtgagaaacaccgctagagatctgctgtactacgccgtgacccaggatgccatgctgatcttcgccaacctgagccggggcttcggccggcagggcaagcggaccttcatggccgagagacagtacacacggatggaggactggctgaccgccaagctggcctacgagggcctgagcaagacctacctgtccaagacactggcccagtacacctccaagacatgcagcaactgtgggtttaccatcaccagcgccgactacgacagggtgctggagaagctgaagaagacagcaacaggctggatgaccacaattaacggcaaggagctgaaggtggagggccagattacctactacaacagatacaagagacagaacgtagtcaaggacctgtccgtcgagctggatagactgagcgaagaatctgtgaacaacgacatctcctcctggacaaagggcagaagcggagaagctctgagcctcctgaagaaaagattctcccatagacccgtgcaggagaagttcgtgtgcctgaactgcggcttcgagacacacgcagccgagcaagccgccctgaacatcgccagatcctggctgttcctgcggagccaggagtacaagaaataccagacaaacaagacaaccggcaacaccgataagagagccttcgtcgagacctggcagtccttttaccggaagaagcttaaggaggtgtggaaacctgccgtgcggtctggcggatctggcggaggctccaccagccccaagaaaaagagaaaagtctaagctgccttctgcggggcttgccttctggccatgcccttcttctctcccttgcacctgtacctcttggtctttgaataaagcctgagtaggaaggctagcaaaaaaaaaaaaaaaaaaaaaaaaaaaaaaaaaaaaaaaaaaaaaaaaaaaaaaaaaaaaaaaaaaaaaaaaaaaaaaaa

SEQ ID NO: 13402 - RNA, 5785 nt, synthetic construct
  source 1..5785: mol_type = other RNA
aggaaataagagagaaaagaagagtaagaagaaatataagagccaccatggcccctaagaagaagcgtaaagtgagccggatggaacgcctcgtctacgaggtgcggcagaagtgcagaaacatcgaggacatctgcatctcctgcggatctctgaacgtgaccctggagcacccactgttcatcggcggcatgtgccagaactgtaaaaactgttttctggagtgtgcctatcaatacgacgatgacggctaccagagctactgcaccatctgttgcggcggaagagaggtgctgatgtgtggaaataacaactgctgccggtgcttctgcgtggaatgcgtggacctgctggtgggccccggcgccgcccaggccgctattaaggaagatccttggaactgctacatgtgcggccacaagggcacatacggcctgctgagacggagagaggactggcctagcagactgcagatgttcttcgccaataaccacgaccaggagttcgacccccctaaggtgtaccctcccgtccccgccgagaagagaaagcccatccgggtcctgagcctgttcgatggcatcgccaccggtctgctggtgctgaaggacctgggcatccaggtggataggtacattgcctccgaggtgtgcgaggactccatcaccgtgggaatggtgcgtcatcagggcaagatcatgtacgtgggcgacgtgcggagcgtgacacagaagcatatccaggagtggggccctttcgacctggtgatcggcggcagcccttgcaatgacctgagcatcgtgaacccagcccggaagggcctgtacgagggaaccggcagactgttcttcgagttttacagactgctgcacgacgcccggcctaaggaaggcgacgaccggcccttcttttggctgttcgagaatgtggtggccatgggagtcagcgacaagcgggatattagccggttcctggagagcaaccccgtgatgatcgatgccaaggaagtgagcgccgcccaccgggccagatacttctggggcaatctgcctggcatgaacagacccctggccagcaccgtgaacgacaagctggagctgcaggagtgcctggagcacggccggatcgccaagttcagcaaggtgagaaccatcaccacccgaagcaacagcatcaaacaaggcaaggaccagcactttcctgtgttcatgaacgagaaggaggacatcctgtggtgtaccgagatggagagagtgttcgggttcccagtccactacacagatgtcagcaacatgtctagactggccagacagagactgctgggaagaagctggtccgtccctgtgatcagacacctgttcgcccctctgaaggagtacttcgcctgcgtgagcagcggcaacagcaacgccaacagccggggccccagcttctctagcggcctggtgccactgtccctgagagggagccacatgggccccatggagatctacaaaaccgtgagcgcctggaagcggcagcctgtgcgcgtgctgagcctgtttcggaatatcgataaagtcctgaaaagcctgggattcctggagagcggctctggctccggcggtggcaccctgaagtacgtggaggatgtgacaaacgtggtcagacgggatgtggagaagtggggccccttcgatctggtgtacggcagcacccaacccctgggcagctcttgtgaccggtgccctggctggtacatgtttcagttccaccggatcctgcagtacgccctgccgagacaggagtcccagcggccattcttttggattttcatggacaacttgctgctgaccgaggatgaccaggaaactaccactcggttcctgcagaccgaagccgtgaccctgcaggacgtgagaggccgggactaccagaacgccatgcgggtgtggtccaacatccctggactgaaaagcaagcacgcacctctgacccctaaagaagaggagtacctgcaggcccaggtgcggagcagaagcaagctggacgcccctaaggtggatctgctggtgaagaattgcctcctgcccctgagagagtacttcaagtatttcagccagaatagtctgcccctgggaggcagcggcggcggcttccagatccccgtgaccttcgaggaggtggccgtgtacttcacccagggccagggcgccctgctggaccccgcccagagggccctgtacagggacgtgatgcaggagaactacgagaccgtgaccagcctgggcttccccatccccaagcccgacctgatcgccaggctggagaggggcgaggagccctgggtgctggacctgcaggccagcgacgagagcgtgagcctgaggggcacctgcggcggcccaagcagcggcgcccctcctcccagcggcggcagcccagccggctccccaacctctaccgaggagggcacctctgagtccgccacccccgagagcggccctggcacctccaccgagcccagcgagggcagcgcacccggcagccctgccggcagccccacctccacagaggagggaaccagcaccgagcccagcgaaggcagcgccccaggcaccagcaccgagcctagtgagcaggagattaaacggatcaacaagatcagaagaagacttgtgaaagacagcaacaccaagaaggccggcaagacaggccccatgaaaaccctgctggttagagtgatgacacccgatctgagagagcggctggaaaacctgagaaagaagcctgaaaatatcccccagcccatcagcaatacatctagagccaacctgaataagctgctgaccgattacaccgaaatgaagaaggcgatcctgcatgtgtactgggaagagttccagaaggaccctgtgggcctgatgagccgggtggcccagcctgccagcaagaagatcgatcagaacaagctgaaacctgagatggacgagaagggcaacctgaccaccgccggctttgcctgctctcagtgtggccagcccctgttcgtgtacaagctggagcaggtgtctgagaagggcaaggcttacaccaactacttcggacggtgcaatgtggccgagcacgaaaagctgatcctgctggcccagctgaagcccgagaaggatagcgacgaagccgtgacatatagcctgggaaagtttgggcagagggccctggatttctacagcattcatgtgaccaaggagtccacccaccccgtgaagcccctggcccagatcgccggaaacagatacgcctccggacctgtgggaaaggccctgagcgacgcatgtatgggcacaatcgcctccttcctgtctaagtaccaggacatcatcatcgaacaccagaaggtggtgaagggcaaccagaagagactggagagcctgcgggagctggccggcaaggaaaacctggaataccctagcgtgaccctgccacctcagcctcacaccaaggagggcgttgatgcctacaacgaagtgatcgcccgggtgcgaatgtgggtgaacctgaacctgtggcagaagctgaagctaagcagagatgatgccaagcctctgctgagactgaagggattcccttcctttcctctggtcgagagacaggccaacgaagtggactggtgggacatggtgtgtaacgtgaagaagctgatcaacgagaaaaaggaggatggcaaggtgttttggcagaatctggctggctacaagagacaggaagccctgagaccatacctgagcagcgaggaagatcggaagaagggaaagaaattcgctcggtaccagctgggcgacctgctgctgcacctggaaaagaagcacggcgaggactggggaaaggtgtacgacgaggcctgggagcggattgacaagaaagtggaaggcctgagcaagcacatcaagctggaagaggaacggagaagcgaggacgcccagagcaaggccgccctgaccgactggctgcgggctaaggccagcttcgtgatcgagggcctgaaggaggccgacaaggacgagttctgcagatgcgagctgaagctgcagaagtggtacggggacctgcggggaaagcccttcgccatcgaagccgagaacagcatcctggacatcagcggcttcagcaagcagtacaactgtgccttcatctggcagaaggacggcgtgaagaagctgaacctgtacctgatcatcaactacttcaagggcggcaagctgcggttcaagaagatcaaacctgaagccttcgaagccaacagattctacaccgtgatcaacaaaaagagcggcgagatcgtgcccatggaggtgaacttcaacttcgacgaccccaacctgatcatcctgcctctggcctttggcaagagacagggcagagaattcatctggaacgacctgctgtccctggaaaccggcagcctgaagctggccaacggaagagtgatcgagaagacactgtacaacagaagaacccggcaggatgagcctgccctgttcgtggccctgaccttcgagcggcgggaggtcctggactcctccaatatcaaaccaatgaacctgatcggcgtggcaagaggcgaaaacatccccgccgtgatcgccctgaccgaccccgagggctgcccactgagccggtttaaggatagcctgggaaacccaacccacatcctgagaatcggcgagagctataaggagaagcagcggaccatccaggccaagaaggaggtggagcagcggagagccggcggctacagccggaagtacgccagcaaagccaagaatctggcagacgatatggtgagaaacaccgctagagatctgctgtactacgccgtgacccaggatgccatgctgatcttcgccaacctgagccggggcttcggccggcagggcaagcggaccttcatggccgagagacagtacacacggatggaggactggctgaccgccaagctggcctacgagggcctgagcaagacctacctgtccaagacactggcccagtacacctccaagacatgcagcaactgtgggtttaccatcaccagcgccgactacgacagggtgctggagaagctgaagaagacagcaacaggctggatgaccacaattaacggcaaggagctgaaggtggagggccagattacctactacaacagatacaagagacagaacgtagtcaaggacctgtccgtcgagctggatagactgagcgaagaatctgtgaacaacgacatctcctcctggacaaagggcagaagcggagaagctctgagcctcctgaagaaaagattctcccatagacccgtgcaggagaagttcgtgtgcctgaactgcggcttcgagacacacgcagccgagcaagccgccctgaacatcgccagatcctggctgttcctgcggagccaggagtacaagaaataccagacaaacaagacaaccggcaacaccgataagagagccttcgtcgagacctggcagtccttttaccggaagaagcttaaggaggtgtggaaacctgccgtgcggtctggcggatctggcggaggctccaccagccccaagaaaaagagaaaagtctaagctgccttctgcggggcttgccttctggccatgcccttcttctctcccttgcacctgtacctcttggtctttgaataaagcctgagtaggaaggctagcaaaaaaaaaaaaaaaaaaaaaaaaaaaaaaaaaaaaaaaaaaaaaaaaaaaaaaaaaaaaaaaaaaaaaaaaaaaaaaaa

SEQ ID NO: 13403 - RNA, 5785 nt, synthetic construct
  source 1..5785: mol_type = other RNA
aggaaataagagagaaaagaagagtaagaagaaatataagagccaccatggcccctaagaagaagcgtaaagtgagccggatggaacgcctcgtctacgaggtgcggcagaagtgcagaaacatcgaggacatctgcatctcctgcggatctctgaacgtgaccctggagcacccactgttcatcggcggcatgtgccagaactgtaaaaactgttttctggagtgtgcctatcaatacgacgatgacggctaccagagctactgcaccatctgttgcggcggaagagaggtgctgatgtgtggaaataacaactgctgccggtgcttctgcgtggaatgcgtggacctgctggtgggccccggcgccgcccaggccgctattaaggaagatccttggaactgctacatgtgcggccacaagggcacatacggcctgctgagacggagagaggactggcctagcagactgcagatgttcttcgccaataaccacgaccaggagttcgacccccctaaggtgtaccctcccgtccccgccgagaagagaaagcccatccgggtcctgagcctgttcgatggcatcgccaccggtctgctggtgctgaaggacctgggcatccaggtggataggtacattgcctccgaggtgtgcgaggactccatcaccgtgggaatggtgcgtcatcagggcaagatcatgtacgtgggcgacgtgcggagcgtgacacagaagcatatccaggagtggggccctttcgacctggtgatcggcggcagcccttgcaatgacctgagcatcgtgaacccagcccggaagggcctgtacgagggaaccggcagactgttcttcgagttttacagactgctgcacgacgcccggcctaaggaaggcgacgaccggcccttcttttggctgttcgagaatgtggtggccatgggagtcagcgacaagcgggatattagccggttcctggagagcaaccccgtgatgatcgatgccaaggaagtgagcgccgcccaccgggccagatacttctggggcaatctgcctggcatgaacagacccctggccagcaccgtgaacgacaagctggagctgcaggagtgcctggagcacggccggatcgccaagttcagcaaggtgagaaccatcaccacccgaagcaacagcatcaaacaaggcaaggaccagcactttcctgtgttcatgaacgagaaggaggacatcctgtggtgtaccgagatggagagagtgttcgggttcccagtccactacacagatgtcagcaacatgtctagactggccagacagagactgctgggaagaagctggtccgtccctgtgatcagacacctgttcgcccctctgaaggagtacttcgcctgcgtgagcagcggcaacagcaacgccaacagccggggccccagcttctctagcggcctggtgccactgtccctgagagggagccacatgggccccatggagatctacaaaaccgtgagcgcctggaagcggcagcctgtgcgcgtgctgagcctgtttcggaatatcgataaagtcctgaaaagcctgggattcctggagagcggctctggctccggcggtggcaccctgaagtacgtggaggatgtgacaaacgtggtcagacgggatgtggagaagtggggccccttcgatctggtgtacggcagcacccaacccctgggcagctcttgtgaccggtgccctggctggtacatgtttcagttccaccggatcctgcagtacgccctgccgagacaggagtcccagcggccattcttttggattttcatggacaacttgctgctgaccgaggatgaccaggaaactaccactcggttcctgcagaccgaagccgtgaccctgcaggacgtgagaggccgggactaccagaacgccatgcgggtgtggtccaacatccctggactgaaaagcaagcacgcacctctgacccctaaagaagaggagtacctgcaggcccaggtgcggagcagaagcaagctggacgcccctaaggtggatctgctggtgaagaattgcctcctgcccctgagagagtacttcaagtatttcagccagaatagtctgcccctgggaggcagcggcggcggcatggccgtggacctgctgcccgcccaggagagcatgaccttcagggacgtggccgtgttcttcagccaggacgagtggctgcacctggacagcgcccagagggccctgtacagggaggtgatgctggagaactacagcaccctggtgagcctgggcatccccttcagcatgcccaaggtgatccaccagctgcagcagggccaggacccctgcatggtggagggcgaggtgcccagcgacatcggcggcccaagcagcggcgcccctcctcccagcggcggcagcccagccggctccccaacctctaccgaggagggcacctctgagtccgccacccccgagagcggccctggcacctccaccgagcccagcgagggcagcgcacccggcagccctgccggcagccccacctccacagaggagggaaccagcaccgagcccagcgaaggcagcgccccaggcaccagcaccgagcctagtgagcaggagattaaacggatcaacaagatcagaagaagacttgtgaaagacagcaacaccaagaaggccggcaagacaggccccatgaaaaccctgctggttagagtgatgacacccgatctgagagagcggctggaaaacctgagaaagaagcctgaaaatatcccccagcccatcagcaatacatctagagccaacctgaataagctgctgaccgattacaccgaaatgaagaaggcgatcctgcatgtgtactgggaagagttccagaaggaccctgtgggcctgatgagccgggtggcccagcctgccagcaagaagatcgatcagaacaagctgaaacctgagatggacgagaagggcaacctgaccaccgccggctttgcctgctctcagtgtggccagcccctgttcgtgtacaagctggagcaggtgtctgagaagggcaaggcttacaccaactacttcggacggtgcaatgtggccgagcacgaaaagctgatcctgctggcccagctgaagcccgagaaggatagcgacgaagccgtgacatatagcctgggaaagtttgggcagagggccctggatttctacagcattcatgtgaccaaggagtccacccaccccgtgaagcccctggcccagatcgccggaaacagatacgcctccggacctgtgggaaaggccctgagcgacgcatgtatgggcacaatcgcctccttcctgtctaagtaccaggacatcatcatcgaacaccagaaggtggtgaagggcaaccagaagagactggagagcctgcgggagctggccggcaaggaaaacctggaataccctagcgtgaccctgccacctcagcctcacaccaaggagggcgttgatgcctacaacgaagtgatcgcccgggtgcgaatgtgggtgaacctgaacctgtggcagaagctgaagctaagcagagatgatgccaagcctctgctgagactgaagggattcccttcctttcctctggtcgagagacaggccaacgaagtggactggtgggacatggtgtgtaacgtgaagaagctgatcaacgagaaaaaggaggatggcaaggtgttttggcagaatctggctggctacaagagacaggaagccctgagaccatacctgagcagcgaggaagatcggaagaagggaaagaaattcgctcggtaccagctgggcgacctgctgctgcacctggaaaagaagcacggcgaggactggggaaaggtgtacgacgaggcctgggagcggattgacaagaaagtggaaggcctgagcaagcacatcaagctggaagaggaacggagaagcgaggacgcccagagcaaggccgccctgaccgactggctgcgggctaaggccagcttcgtgatcgagggcctgaaggaggccgacaaggacgagttctgcagatgcgagctgaagctgcagaagtggtacggggacctgcggggaaagcccttcgccatcgaagccgagaacagcatcctggacatcagcggcttcagcaagcagtacaactgtgccttcatctggcagaaggacggcgtgaagaagctgaacctgtacctgatcatcaactacttcaagggcggcaagctgcggttcaagaagatcaaacctgaagccttcgaagccaacagattctacaccgtgatcaacaaaaagagcggcgagatcgtgcccatggaggtgaacttcaacttcgacgaccccaacctgatcatcctgcctctggcctttggcaagagacagggcagagaattcatctggaacgacctgctgtccctggaaaccggcagcctgaagctggccaacggaagagtgatcgagaagacactgtacaacagaagaacccggcaggatgagcctgccctgttcgtggccctgaccttcgagcggcgggaggtcctggactcctccaatatcaaaccaatgaacctgatcggcgtggcaagaggcgaaaacatccccgccgtgatcgccctgaccgaccccgagggctgcccactgagccggtttaaggatagcctgggaaacccaacccacatcctgagaatcggcgagagctataaggagaagcagcggaccatccaggccaagaaggaggtggagcagcggagagccggcggctacagccggaagtacgccagcaaagccaagaatctggcagacgatatggtgagaaacaccgctagagatctgctgtactacgccgtgacccaggatgccatgctgatcttcgccaacctgagccggggcttcggccggcagggcaagcggaccttcatggccgagagacagtacacacggatggaggactggctgaccgccaagctggcctacgagggcctgagcaagacctacctgtccaagacactggcccagtacacctccaagacatgcagcaactgtgggtttaccatcaccagcgccgactacgacagggtgctggagaagctgaagaagacagcaacaggctggatgaccacaattaacggcaaggagctgaaggtggagggccagattacctactacaacagatacaagagacagaacgtagtcaaggacctgtccgtcgagctggatagactgagcgaagaatctgtgaacaacgacatctcctcctggacaaagggcagaagcggagaagctctgagcctcctgaagaaaagattctcccatagacccgtgcaggagaagttcgtgtgcctgaactgcggcttcgagacacacgcagccgagcaagccgccctgaacatcgccagatcctggctgttcctgcggagccaggagtacaagaaataccagacaaacaagacaaccggcaacaccgataagagagccttcgtcgagacctggcagtccttttaccggaagaagcttaaggaggtgtggaaacctgccgtgcggtctggcggatctggcggaggctccaccagccccaagaaaaagagaaaagtctaagctgccttctgcggggcttgccttctggccatgcccttcttctctcccttgcacctgtacctcttggtctttgaataaagcctgagtaggaaggctagcaaaaaaaaaaaaaaaaaaaaaaaaaaaaaaaaaaaaaaaaaaaaaaaaaaaaaaaaaaaaaaaaaaaaaaaaaaaaaaaa

SEQ ID NO: 13404 - RNA, 5785 nt, synthetic construct
  source 1..5785: mol_type = other RNA
aggaaataagagagaaaagaagagtaagaagaaatataagagccaccatggcccctaagaagaagcgtaaagtgagccggatggaacgcctcgtctacgaggtgcggcagaagtgcagaaacatcgaggacatctgcatctcctgcggatctctgaacgtgaccctggagcacccactgttcatcggcggcatgtgccagaactgtaaaaactgttttctggagtgtgcctatcaatacgacgatgacggctaccagagctactgcaccatctgttgcggcggaagagaggtgctgatgtgtggaaataacaactgctgccggtgcttctgcgtggaatgcgtggacctgctggtgggccccggcgccgcccaggccgctattaaggaagatccttggaactgctacatgtgcggccacaagggcacatacggcctgctgagacggagagaggactggcctagcagactgcagatgttcttcgccaataaccacgaccaggagttcgacccccctaaggtgtaccctcccgtccccgccgagaagagaaagcccatccgggtcctgagcctgttcgatggcatcgccaccggtctgctggtgctgaaggacctgggcatccaggtggataggtacattgcctccgaggtgtgcgaggactccatcaccgtgggaatggtgcgtcatcagggcaagatcatgtacgtgggcgacgtgcggagcgtgacacagaagcatatccaggagtggggccctttcgacctggtgatcggcggcagcccttgcaatgacctgagcatcgtgaacccagcccggaagggcctgtacgagggaaccggcagactgttcttcgagttttacagactgctgcacgacgcccggcctaaggaaggcgacgaccggcccttcttttggctgttcgagaatgtggtggccatgggagtcagcgacaagcgggatattagccggttcctggagagcaaccccgtgatgatcgatgccaaggaagtgagcgccgcccaccgggccagatacttctggggcaatctgcctggcatgaacagacccctggccagcaccgtgaacgacaagctggagctgcaggagtgcctggagcacggccggatcgccaagttcagcaaggtgagaaccatcaccacccgaagcaacagcatcaaacaaggcaaggaccagcactttcctgtgttcatgaacgagaaggaggacatcctgtggtgtaccgagatggagagagtgttcgggttcccagtccactacacagatgtcagcaacatgtctagactggccagacagagactgctgggaagaagctggtccgtccctgtgatcagacacctgttcgcccctctgaaggagtacttcgcctgcgtgagcagcggcaacagcaacgccaacagccggggccccagcttctctagcggcctggtgccactgtccctgagagggagccacatgggccccatggagatctacaaaaccgtgagcgcctggaagcggcagcctgtgcgcgtgctgagcctgtttcggaatatcgataaagtcctgaaaagcctgggattcctggagagcggctctggctccggcggtggcaccctgaagtacgtggaggatgtgacaaacgtggtcagacgggatgtggagaagtggggccccttcgatctggtgtacggcagcacccaacccctgggcagctcttgtgaccggtgccctggctggtacatgtttcagttccaccggatcctgcagtacgccctgccgagacaggagtcccagcggccattcttttggattttcatggacaacttgctgctgaccgaggatgaccaggaaactaccactcggttcctgcagaccgaagccgtgaccctgcaggacgtgagaggccgggactaccagaacgccatgcgggtgtggtccaacatccctggactgaaaagcaagcacgcacctctgacccctaaagaagaggagtacctgcaggcccaggtgcggagcagaagcaagctggacgcccctaaggtggatctgctggtgaagaattgcctcctgcccctgagagagtacttcaagtatttcagccagaatagtctgcccctgggaggcagcggcggcggcaagcccctggccgtgaggttcgccgacgtggccgtgtacttcagccccgaggagtggggctgcctgaggcccgcccagagggccctgtacagggacgtgatgcaggagacctacggccacctgggcgccctgggcttccccggccccaagcccgccctgatcagctggatggagcaggagagcgaggcctggagccccgccgcccaggaccccgaggagggcgagagcctgggcggcgccctgggcggcccaagcagcggcgcccctcctcccagcggcggcagcccagccggctccccaacctctaccgaggagggcacctctgagtccgccacccccgagagcggccctggcacctccaccgagcccagcgagggcagcgcacccggcagccctgccggcagccccacctccacagaggagggaaccagcaccgagcccagcgaaggcagcgccccaggcaccagcaccgagcctagtgagcaggagattaaacggatcaacaagatcagaagaagacttgtgaaagacagcaacaccaagaaggccggcaagacaggccccatgaaaaccctgctggttagagtgatgacacccgatctgagagagcggctggaaaacctgagaaagaagcctgaaaatatcccccagcccatcagcaatacatctagagccaacctgaataagctgctgaccgattacaccgaaatgaagaaggcgatcctgcatgtgtactgggaagagttccagaaggaccctgtgggcctgatgagccgggtggcccagcctgccagcaagaagatcgatcagaacaagctgaaacctgagatggacgagaagggcaacctgaccaccgccggctttgcctgctctcagtgtggccagcccctgttcgtgtacaagctggagcaggtgtctgagaagggcaaggcttacaccaactacttcggacggtgcaatgtggccgagcacgaaaagctgatcctgctggcccagctgaagcccgagaaggatagcgacgaagccgtgacatatagcctgggaaagtttgggcagagggccctggatttctacagcattcatgtgaccaaggagtccacccaccccgtgaagcccctggcccagatcgccggaaacagatacgcctccggacctgtgggaaaggccctgagcgacgcatgtatgggcacaatcgcctccttcctgtctaagtaccaggacatcatcatcgaacaccagaaggtggtgaagggcaaccagaagagactggagagcctgcgggagctggccggcaaggaaaacctggaataccctagcgtgaccctgccacctcagcctcacaccaaggagggcgttgatgcctacaacgaagtgatcgcccgggtgcgaatgtgggtgaacctgaacctgtggcagaagctgaagctaagcagagatgatgccaagcctctgctgagactgaagggattcccttcctttcctctggtcgagagacaggccaacgaagtggactggtgggacatggtgtgtaacgtgaagaagctgatcaacgagaaaaaggaggatggcaaggtgttttggcagaatctggctggctacaagagacaggaagccctgagaccatacctgagcagcgaggaagatcggaagaagggaaagaaattcgctcggtaccagctgggcgacctgctgctgcacctggaaaagaagcacggcgaggactggggaaaggtgtacgacgaggcctgggagcggattgacaagaaagtggaaggcctgagcaagcacatcaagctggaagaggaacggagaagcgaggacgcccagagcaaggccgccctgaccgactggctgcgggctaaggccagcttcgtgatcgagggcctgaaggaggccgacaaggacgagttctgcagatgcgagctgaagctgcagaagtggtacggggacctgcggggaaagcccttcgccatcgaagccgagaacagcatcctggacatcagcggcttcagcaagcagtacaactgtgccttcatctggcagaaggacggcgtgaagaagctgaacctgtacctgatcatcaactacttcaagggcggcaagctgcggttcaagaagatcaaacctgaagccttcgaagccaacagattctacaccgtgatcaacaaaaagagcggcgagatcgtgcccatggaggtgaacttcaacttcgacgaccccaacctgatcatcctgcctctggcctttggcaagagacagggcagagaattcatctggaacgacctgctgtccctggaaaccggcagcctgaagctggccaacggaagagtgatcgagaagacactgtacaacagaagaacccggcaggatgagcctgccctgttcgtggccctgaccttcgagcggcgggaggtcctggactcctccaatatcaaaccaatgaacctgatcggcgtggcaagaggcgaaaacatccccgccgtgatcgccctgaccgaccccgagggctgcccactgagccggtttaaggatagcctgggaaacccaacccacatcctgagaatcggcgagagctataaggagaagcagcggaccatccaggccaagaaggaggtggagcagcggagagccggcggctacagccggaagtacgccagcaaagccaagaatctggcagacgatatggtgagaaacaccgctagagatctgctgtactacgccgtgacccaggatgccatgctgatcttcgccaacctgagccggggcttcggccggcagggcaagcggaccttcatggccgagagacagtacacacggatggaggactggctgaccgccaagctggcctacgagggcctgagcaagacctacctgtccaagacactggcccagtacacctccaagacatgcagcaactgtgggtttaccatcaccagcgccgactacgacagggtgctggagaagctgaagaagacagcaacaggctggatgaccacaattaacggcaaggagctgaaggtggagggccagattacctactacaacagatacaagagacagaacgtagtcaaggacctgtccgtcgagctggatagactgagcgaagaatctgtgaacaacgacatctcctcctggacaaagggcagaagcggagaagctctgagcctcctgaagaaaagattctcccatagacccgtgcaggagaagttcgtgtgcctgaactgcggcttcgagacacacgcagccgagcaagccgccctgaacatcgccagatcctggctgttcctgcggagccaggagtacaagaaataccagacaaacaagacaaccggcaacaccgataagagagccttcgtcgagacctggcagtccttttaccggaagaagcttaaggaggtgtggaaacctgccgtgcggtctggcggatctggcggaggctccaccagccccaagaaaaagagaaaagtctaagctgccttctgcggggcttgccttctggccatgcccttcttctctcccttgcacctgtacctcttggtctttgaataaagcctgagtaggaaggctagcaaaaaaaaaaaaaaaaaaaaaaaaaaaaaaaaaaaaaaaaaaaaaaaaaaaaaaaaaaaaaaaaaaaaaaaaaaaaaaaa

SEQ ID NO: 13405 - RNA, 5785 nt, synthetic construct
  source 1..5785: mol_type = other RNA
aggaaataagagagaaaagaagagtaagaagaaatataagagccaccatggcccctaagaagaagcgtaaagtgagccggatggaacgcctcgtctacgaggtgcggcagaagtgcagaaacatcgaggacatctgcatctcctgcggatctctgaacgtgaccctggagcacccactgttcatcggcggcatgtgccagaactgtaaaaactgttttctggagtgtgcctatcaatacgacgatgacggctaccagagctactgcaccatctgttgcggcggaagagaggtgctgatgtgtggaaataacaactgctgccggtgcttctgcgtggaatgcgtggacctgctggtgggccccggcgccgcccaggccgctattaaggaagatccttggaactgctacatgtgcggccacaagggcacatacggcctgctgagacggagagaggactggcctagcagactgcagatgttcttcgccaataaccacgaccaggagttcgacccccctaaggtgtaccctcccgtccccgccgagaagagaaagcccatccgggtcctgagcctgttcgatggcatcgccaccggtctgctggtgctgaaggacctgggcatccaggtggataggtacattgcctccgaggtgtgcgaggactccatcaccgtgggaatggtgcgtcatcagggcaagatcatgtacgtgggcgacgtgcggagcgtgacacagaagcatatccaggagtggggccctttcgacctggtgatcggcggcagcccttgcaatgacctgagcatcgtgaacccagcccggaagggcctgtacgagggaaccggcagactgttcttcgagttttacagactgctgcacgacgcccggcctaaggaaggcgacgaccggcccttcttttggctgttcgagaatgtggtggccatgggagtcagcgacaagcgggatattagccggttcctggagagcaaccccgtgatgatcgatgccaaggaagtgagcgccgcccaccgggccagatacttctggggcaatctgcctggcatgaacagacccctggccagcaccgtgaacgacaagctggagctgcaggagtgcctggagcacggccggatcgccaagttcagcaaggtgagaaccatcaccacccgaagcaacagcatcaaacaaggcaaggaccagcactttcctgtgttcatgaacgagaaggaggacatcctgtggtgtaccgagatggagagagtgttcgggttcccagtccactacacagatgtcagcaacatgtctagactggccagacagagactgctgggaagaagctggtccgtccctgtgatcagacacctgttcgcccctctgaaggagtacttcgcctgcgtgagcagcggcaacagcaacgccaacagccggggccccagcttctctagcggcctggtgccactgtccctgagagggagccacatgggccccatggagatctacaaaaccgtgagcgcctggaagcggcagcctgtgcgcgtgctgagcctgtttcggaatatcgataaagtcctgaaaagcctgggattcctggagagcggctctggctccggcggtggcaccctgaagtacgtggaggatgtgacaaacgtggtcagacgggatgtggagaagtggggccccttcgatctggtgtacggcagcacccaacccctgggcagctcttgtgaccggtgccctggctggtacatgtttcagttccaccggatcctgcagtacgccctgccgagacaggagtcccagcggccattcttttggattttcatggacaacttgctgctgaccgaggatgaccaggaaactaccactcggttcctgcagaccgaagccgtgaccctgcaggacgtgagaggccgggactaccagaacgccatgcgggtgtggtccaacatccctggactgaaaagcaagcacgcacctctgacccctaaagaagaggagtacctgcaggcccaggtgcggagcagaagcaagctggacgcccctaaggtggatctgctggtgaagaattgcctcctgcccctgagagagtacttcaagtatttcagccagaatagtctgcccctgggaggcagcggcggcggcatggcccacttccagggcagcgtgaccttcgaggacgtggccatcgccttcagccagcaggagtgggagagcctggacagcagccagaggggcctgtacagggacgtgatgctggagaactacaggaacctggtgagcatggccggccacagcctgagcaagccccacgtgatcgccctgctggagaggtggaaggagcccaaggtgaccgagaggaaggacggcaggaggtggtgcaccgacggcggcccaagcagcggcgcccctcctcccagcggcggcagcccagccggctccccaacctctaccgaggagggcacctctgagtccgccacccccgagagcggccctggcacctccaccgagcccagcgagggcagcgcacccggcagccctgccggcagccccacctccacagaggagggaaccagcaccgagcccagcgaaggcagcgccccaggcaccagcaccgagcctagtgagcaggagattaaacggatcaacaagatcagaagaagacttgtgaaagacagcaacaccaagaaggccggcaagacaggccccatgaaaaccctgctggttagagtgatgacacccgatctgagagagcggctggaaaacctgagaaagaagcctgaaaatatcccccagcccatcagcaatacatctagagccaacctgaataagctgctgaccgattacaccgaaatgaagaaggcgatcctgcatgtgtactgggaagagttccagaaggaccctgtgggcctgatgagccgggtggcccagcctgccagcaagaagatcgatcagaacaagctgaaacctgagatggacgagaagggcaacctgaccaccgccggctttgcctgctctcagtgtggccagcccctgttcgtgtacaagctggagcaggtgtctgagaagggcaaggcttacaccaactacttcggacggtgcaatgtggccgagcacgaaaagctgatcctgctggcccagctgaagcccgagaaggatagcgacgaagccgtgacatatagcctgggaaagtttgggcagagggccctggatttctacagcattcatgtgaccaaggagtccacccaccccgtgaagcccctggcccagatcgccggaaacagatacgcctccggacctgtgggaaaggccctgagcgacgcatgtatgggcacaatcgcctccttcctgtctaagtaccaggacatcatcatcgaacaccagaaggtggtgaagggcaaccagaagagactggagagcctgcgggagctggccggcaaggaaaacctggaataccctagcgtgaccctgccacctcagcctcacaccaaggagggcgttgatgcctacaacgaagtgatcgcccgggtgcgaatgtgggtgaacctgaacctgtggcagaagctgaagctaagcagagatgatgccaagcctctgctgagactgaagggattcccttcctttcctctggtcgagagacaggccaacgaagtggactggtgggacatggtgtgtaacgtgaagaagctgatcaacgagaaaaaggaggatggcaaggtgttttggcagaatctggctggctacaagagacaggaagccctgagaccatacctgagcagcgaggaagatcggaagaagggaaagaaattcgctcggtaccagctgggcgacctgctgctgcacctggaaaagaagcacggcgaggactggggaaaggtgtacgacgaggcctgggagcggattgacaagaaagtggaaggcctgagcaagcacatcaagctggaagaggaacggagaagcgaggacgcccagagcaaggccgccctgaccgactggctgcgggctaaggccagcttcgtgatcgagggcctgaaggaggccgacaaggacgagttctgcagatgcgagctgaagctgcagaagtggtacggggacctgcggggaaagcccttcgccatcgaagccgagaacagcatcctggacatcagcggcttcagcaagcagtacaactgtgccttcatctggcagaaggacggcgtgaagaagctgaacctgtacctgatcatcaactacttcaagggcggcaagctgcggttcaagaagatcaaacctgaagccttcgaagccaacagattctacaccgtgatcaacaaaaagagcggcgagatcgtgcccatggaggtgaacttcaacttcgacgaccccaacctgatcatcctgcctctggcctttggcaagagacagggcagagaattcatctggaacgacctgctgtccctggaaaccggcagcctgaagctggccaacggaagagtgatcgagaagacactgtacaacagaagaacccggcaggatgagcctgccctgttcgtggccctgaccttcgagcggcgggaggtcctggactcctccaatatcaaaccaatgaacctgatcggcgtggcaagaggcgaaaacatccccgccgtgatcgccctgaccgaccccgagggctgcccactgagccggtttaaggatagcctgggaaacccaacccacatcctgagaatcggcgagagctataaggagaagcagcggaccatccaggccaagaaggaggtggagcagcggagagccggcggctacagccggaagtacgccagcaaagccaagaatctggcagacgatatggtgagaaacaccgctagagatctgctgtactacgccgtgacccaggatgccatgctgatcttcgccaacctgagccggggcttcggccggcagggcaagcggaccttcatggccgagagacagtacacacggatggaggactggctgaccgccaagctggcctacgagggcctgagcaagacctacctgtccaagacactggcccagtacacctccaagacatgcagcaactgtgggtttaccatcaccagcgccgactacgacagggtgctggagaagctgaagaagacagcaacaggctggatgaccacaattaacggcaaggagctgaaggtggagggccagattacctactacaacagatacaagagacagaacgtagtcaaggacctgtccgtcgagctggatagactgagcgaagaatctgtgaacaacgacatctcctcctggacaaagggcagaagcggagaagctctgagcctcctgaagaaaagattctcccatagacccgtgcaggagaagttcgtgtgcctgaactgcggcttcgagacacacgcagccgagcaagccgccctgaacatcgccagatcctggctgttcctgcggagccaggagtacaagaaataccagacaaacaagacaaccggcaacaccgataagagagccttcgtcgagacctggcagtccttttaccggaagaagcttaaggaggtgtggaaacctgccgtgcggtctggcggatctggcggaggctccaccagccccaagaaaaagagaaaagtctaagctgccttctgcggggcttgccttctggccatgcccttcttctctcccttgcacctgtacctcttggtctttgaataaagcctgagtaggaaggctagcaaaaaaaaaaaaaaaaaaaaaaaaaaaaaaaaaaaaaaaaaaaaaaaaaaaaaaaaaaaaaaaaaaaaaaaaaaaaaaaa

SEQ ID NO: 13406 - RNA, 5785 nt, synthetic construct
  source 1..5785: mol_type = other RNA
aggaaataagagagaaaagaagagtaagaagaaatataagagccaccatggcccctaagaagaagcgtaaagtgagccggatggaacgcctcgtctacgaggtgcggcagaagtgcagaaacatcgaggacatctgcatctcctgcggatctctgaacgtgaccctggagcacccactgttcatcggcggcatgtgccagaactgtaaaaactgttttctggagtgtgcctatcaatacgacgatgacggctaccagagctactgcaccatctgttgcggcggaagagaggtgctgatgtgtggaaataacaactgctgccggtgcttctgcgtggaatgcgtggacctgctggtgggccccggcgccgcccaggccgctattaaggaagatccttggaactgctacatgtgcggccacaagggcacatacggcctgctgagacggagagaggactggcctagcagactgcagatgttcttcgccaataaccacgaccaggagttcgacccccctaaggtgtaccctcccgtccccgccgagaagagaaagcccatccgggtcctgagcctgttcgatggcatcgccaccggtctgctggtgctgaaggacctgggcatccaggtggataggtacattgcctccgaggtgtgcgaggactccatcaccgtgggaatggtgcgtcatcagggcaagatcatgtacgtgggcgacgtgcggagcgtgacacagaagcatatccaggagtggggccctttcgacctggtgatcggcggcagcccttgcaatgacctgagcatcgtgaacccagcccggaagggcctgtacgagggaaccggcagactgttcttcgagttttacagactgctgcacgacgcccggcctaaggaaggcgacgaccggcccttcttttggctgttcgagaatgtggtggccatgggagtcagcgacaagcgggatattagccggttcctggagagcaaccccgtgatgatcgatgccaaggaagtgagcgccgcccaccgggccagatacttctggggcaatctgcctggcatgaacagacccctggccagcaccgtgaacgacaagctggagctgcaggagtgcctggagcacggccggatcgccaagttcagcaaggtgagaaccatcaccacccgaagcaacagcatcaaacaaggcaaggaccagcactttcctgtgttcatgaacgagaaggaggacatcctgtggtgtaccgagatggagagagtgttcgggttcccagtccactacacagatgtcagcaacatgtctagactggccagacagagactgctgggaagaagctggtccgtccctgtgatcagacacctgttcgcccctctgaaggagtacttcgcctgcgtgagcagcggcaacagcaacgccaacagccggggccccagcttctctagcggcctggtgccactgtccctgagagggagccacatgggccccatggagatctacaaaaccgtgagcgcctggaagcggcagcctgtgcgcgtgctgagcctgtttcggaatatcgataaagtcctgaaaagcctgggattcctggagagcggctctggctccggcggtggcaccctgaagtacgtggaggatgtgacaaacgtggtcagacgggatgtggagaagtggggccccttcgatctggtgtacggcagcacccaacccctgggcagctcttgtgaccggtgccctggctggtacatgtttcagttccaccggatcctgcagtacgccctgccgagacaggagtcccagcggccattcttttggattttcatggacaacttgctgctgaccgaggatgaccaggaaactaccactcggttcctgcagaccgaagccgtgaccctgcaggacgtgagaggccgggactaccagaacgccatgcgggtgtggtccaacatccctggactgaaaagcaagcacgcacctctgacccctaaagaagaggagtacctgcaggcccaggtgcggagcagaagcaagctggacgcccctaaggtggatctgctggtgaagaattgcctcctgcccctgagagagtacttcaagtatttcagccagaatagtctgcccctgggaggcagcggcggcggcagccagggcctggtgaccttcggcgacgtggccatcgacttcagccaggaggagtgggagtggctgagccccatccagaggaacctgtacaggaaggtgatgctggagaactacaggaacctggccagcctgggcctgtgcgtgagcaagcccgacgtgatcagcctgctggagcagggcaaggagccctggaccgtgaagaggaggatgaccagggccaggtgccccgacacccagcacctgggcggcccaagcagcggcgcccctcctcccagcggcggcagcccagccggctccccaacctctaccgaggagggcacctctgagtccgccacccccgagagcggccctggcacctccaccgagcccagcgagggcagcgcacccggcagccctgccggcagccccacctccacagaggagggaaccagcaccgagcccagcgaaggcagcgccccaggcaccagcaccgagcctagtgagcaggagattaaacggatcaacaagatcagaagaagacttgtgaaagacagcaacaccaagaaggccggcaagacaggccccatgaaaaccctgctggttagagtgatgacacccgatctgagagagcggctggaaaacctgagaaagaagcctgaaaatatcccccagcccatcagcaatacatctagagccaacctgaataagctgctgaccgattacaccgaaatgaagaaggcgatcctgcatgtgtactgggaagagttccagaaggaccctgtgggcctgatgagccgggtggcccagcctgccagcaagaagatcgatcagaacaagctgaaacctgagatggacgagaagggcaacctgaccaccgccggctttgcctgctctcagtgtggccagcccctgttcgtgtacaagctggagcaggtgtctgagaagggcaaggcttacaccaactacttcggacggtgcaatgtggccgagcacgaaaagctgatcctgctggcccagctgaagcccgagaaggatagcgacgaagccgtgacatatagcctgggaaagtttgggcagagggccctggatttctacagcattcatgtgaccaaggagtccacccaccccgtgaagcccctggcccagatcgccggaaacagatacgcctccggacctgtgggaaaggccctgagcgacgcatgtatgggcacaatcgcctccttcctgtctaagtaccaggacatcatcatcgaacaccagaaggtggtgaagggcaaccagaagagactggagagcctgcgggagctggccggcaaggaaaacctggaataccctagcgtgaccctgccacctcagcctcacaccaaggagggcgttgatgcctacaacgaagtgatcgcccgggtgcgaatgtgggtgaacctgaacctgtggcagaagctgaagctaagcagagatgatgccaagcctctgctgagactgaagggattcccttcctttcctctggtcgagagacaggccaacgaagtggactggtgggacatggtgtgtaacgtgaagaagctgatcaacgagaaaaaggaggatggcaaggtgttttggcagaatctggctggctacaagagacaggaagccctgagaccatacctgagcagcgaggaagatcggaagaagggaaagaaattcgctcggtaccagctgggcgacctgctgctgcacctggaaaagaagcacggcgaggactggggaaaggtgtacgacgaggcctgggagcggattgacaagaaagtggaaggcctgagcaagcacatcaagctggaagaggaacggagaagcgaggacgcccagagcaaggccgccctgaccgactggctgcgggctaaggccagcttcgtgatcgagggcctgaaggaggccgacaaggacgagttctgcagatgcgagctgaagctgcagaagtggtacggggacctgcggggaaagcccttcgccatcgaagccgagaacagcatcctggacatcagcggcttcagcaagcagtacaactgtgccttcatctggcagaaggacggcgtgaagaagctgaacctgtacctgatcatcaactacttcaagggcggcaagctgcggttcaagaagatcaaacctgaagccttcgaagccaacagattctacaccgtgatcaacaaaaagagcggcgagatcgtgcccatggaggtgaacttcaacttcgacgaccccaacctgatcatcctgcctctggcctttggcaagagacagggcagagaattcatctggaacgacctgctgtccctggaaaccggcagcctgaagctggccaacggaagagtgatcgagaagacactgtacaacagaagaacccggcaggatgagcctgccctgttcgtggccctgaccttcgagcggcgggaggtcctggactcctccaatatcaaaccaatgaacctgatcggcgtggcaagaggcgaaaacatccccgccgtgatcgccctgaccgaccccgagggctgcccactgagccggtttaaggatagcctgggaaacccaacccacatcctgagaatcggcgagagctataaggagaagcagcggaccatccaggccaagaaggaggtggagcagcggagagccggcggctacagccggaagtacgccagcaaagccaagaatctggcagacgatatggtgagaaacaccgctagagatctgctgtactacgccgtgacccaggatgccatgctgatcttcgccaacctgagccggggcttcggccggcagggcaagcggaccttcatggccgagagacagtacacacggatggaggactggctgaccgccaagctggcctacgagggcctgagcaagacctacctgtccaagacactggcccagtacacctccaagacatgcagcaactgtgggtttaccatcaccagcgccgactacgacagggtgctggagaagctgaagaagacagcaacaggctggatgaccacaattaacggcaaggagctgaaggtggagggccagattacctactacaacagatacaagagacagaacgtagtcaaggacctgtccgtcgagctggatagactgagcgaagaatctgtgaacaacgacatctcctcctggacaaagggcagaagcggagaagctctgagcctcctgaagaaaagattctcccatagacccgtgcaggagaagttcgtgtgcctgaactgcggcttcgagacacacgcagccgagcaagccgccctgaacatcgccagatcctggctgttcctgcggagccaggagtacaagaaataccagacaaacaagacaaccggcaacaccgataagagagccttcgtcgagacctggcagtccttttaccggaagaagcttaaggaggtgtggaaacctgccgtgcggtctggcggatctggcggaggctccaccagccccaagaaaaagagaaaagtctaagctgccttctgcggggcttgccttctggccatgcccttcttctctcccttgcacctgtacctcttggtctttgaataaagcctgagtaggaaggctagcaaaaaaaaaaaaaaaaaaaaaaaaaaaaaaaaaaaaaaaaaaaaaaaaaaaaaaaaaaaaaaaaaaaaaaaaaaaaaaaa

SEQ ID NO: 13407 - RNA, 5785 nt, synthetic construct
  source 1..5785: mol_type = other RNA
aggaaataagagagaaaagaagagtaagaagaaatataagagccaccatggcccctaagaagaagcgtaaagtgagccggatggaacgcctcgtctacgaggtgcggcagaagtgcagaaacatcgaggacatctgcatctcctgcggatctctgaacgtgaccctggagcacccactgttcatcggcggcatgtgccagaactgtaaaaactgttttctggagtgtgcctatcaatacgacgatgacggctaccagagctactgcaccatctgttgcggcggaagagaggtgctgatgtgtggaaataacaactgctgccggtgcttctgcgtggaatgcgtggacctgctggtgggccccggcgccgcccaggccgctattaaggaagatccttggaactgctacatgtgcggccacaagggcacatacggcctgctgagacggagagaggactggcctagcagactgcagatgttcttcgccaataaccacgaccaggagttcgacccccctaaggtgtaccctcccgtccccgccgagaagagaaagcccatccgggtcctgagcctgttcgatggcatcgccaccggtctgctggtgctgaaggacctgggcatccaggtggataggtacattgcctccgaggtgtgcgaggactccatcaccgtgggaatggtgcgtcatcagggcaagatcatgtacgtgggcgacgtgcggagcgtgacacagaagcatatccaggagtggggccctttcgacctggtgatcggcggcagcccttgcaatgacctgagcatcgtgaacccagcccggaagggcctgtacgagggaaccggcagactgttcttcgagttttacagactgctgcacgacgcccggcctaaggaaggcgacgaccggcccttcttttggctgttcgagaatgtggtggccatgggagtcagcgacaagcgggatattagccggttcctggagagcaaccccgtgatgatcgatgccaaggaagtgagcgccgcccaccgggccagatacttctggggcaatctgcctggcatgaacagacccctggccagcaccgtgaacgacaagctggagctgcaggagtgcctggagcacggccggatcgccaagttcagcaaggtgagaaccatcaccacccgaagcaacagcatcaaacaaggcaaggaccagcactttcctgtgttcatgaacgagaaggaggacatcctgtggtgtaccgagatggagagagtgttcgggttcccagtccactacacagatgtcagcaacatgtctagactggccagacagagactgctgggaagaagctggtccgtccctgtgatcagacacctgttcgcccctctgaaggagtacttcgcctgcgtgagcagcggcaacagcaacgccaacagccggggccccagcttctctagcggcctggtgccactgtccctgagagggagccacatgggccccatggagatctacaaaaccgtgagcgcctggaagcggcagcctgtgcgcgtgctgagcctgtttcggaatatcgataaagtcctgaaaagcctgggattcctggagagcggctctggctccggcggtggcaccctgaagtacgtggaggatgtgacaaacgtggtcagacgggatgtggagaagtggggccccttcgatctggtgtacggcagcacccaacccctgggcagctcttgtgaccggtgccctggctggtacatgtttcagttccaccggatcctgcagtacgccctgccgagacaggagtcccagcggccattcttttggattttcatggacaacttgctgctgaccgaggatgaccaggaaactaccactcggttcctgcagaccgaagccgtgaccctgcaggacgtgagaggccgggactaccagaacgccatgcgggtgtggtccaacatccctggactgaaaagcaagcacgcacctctgacccctaaagaagaggagtacctgcaggcccaggtgcggagcagaagcaagctggacgcccctaaggtggatctgctggtgaagaattgcctcctgcccctgagagagtacttcaagtatttcagccagaatagtctgcccctgggaggcagcggcggcggccccagcgtgcccgtgaccttcagggacgtgttcgtgcagttcagcagggacgagtgggccctgctggacgacgagcagaaggagctgcaccagagcgtgatgcagagcaactacgagatgctgatgagcctgtactgcgacctggccaagcccgaggtgagcctgcagatggagaggggcgagccctgcctgcccgccgagcccgacctgcagggcaccgccgtgagcctgaaccccgccgccggcggcccaagcagcggcgcccctcctcccagcggcggcagcccagccggctccccaacctctaccgaggagggcacctctgagtccgccacccccgagagcggccctggcacctccaccgagcccagcgagggcagcgcacccggcagccctgccggcagccccacctccacagaggagggaaccagcaccgagcccagcgaaggcagcgccccaggcaccagcaccgagcctagtgagcaggagattaaacggatcaacaagatcagaagaagacttgtgaaagacagcaacaccaagaaggccggcaagacaggccccatgaaaaccctgctggttagagtgatgacacccgatctgagagagcggctggaaaacctgagaaagaagcctgaaaatatcccccagcccatcagcaatacatctagagccaacctgaataagctgctgaccgattacaccgaaatgaagaaggcgatcctgcatgtgtactgggaagagttccagaaggaccctgtgggcctgatgagccgggtggcccagcctgccagcaagaagatcgatcagaacaagctgaaacctgagatggacgagaagggcaacctgaccaccgccggctttgcctgctctcagtgtggccagcccctgttcgtgtacaagctggagcaggtgtctgagaagggcaaggcttacaccaactacttcggacggtgcaatgtggccgagcacgaaaagctgatcctgctggcccagctgaagcccgagaaggatagcgacgaagccgtgacatatagcctgggaaagtttgggcagagggccctggatttctacagcattcatgtgaccaaggagtccacccaccccgtgaagcccctggcccagatcgccggaaacagatacgcctccggacctgtgggaaaggccctgagcgacgcatgtatgggcacaatcgcctccttcctgtctaagtaccaggacatcatcatcgaacaccagaaggtggtgaagggcaaccagaagagactggagagcctgcgggagctggccggcaaggaaaacctggaataccctagcgtgaccctgccacctcagcctcacaccaaggagggcgttgatgcctacaacgaagtgatcgcccgggtgcgaatgtgggtgaacctgaacctgtggcagaagctgaagctaagcagagatgatgccaagcctctgctgagactgaagggattcccttcctttcctctggtcgagagacaggccaacgaagtggactggtgggacatggtgtgtaacgtgaagaagctgatcaacgagaaaaaggaggatggcaaggtgttttggcagaatctggctggctacaagagacaggaagccctgagaccatacctgagcagcgaggaagatcggaagaagggaaagaaattcgctcggtaccagctgggcgacctgctgctgcacctggaaaagaagcacggcgaggactggggaaaggtgtacgacgaggcctgggagcggattgacaagaaagtggaaggcctgagcaagcacatcaagctggaagaggaacggagaagcgaggacgcccagagcaaggccgccctgaccgactggctgcgggctaaggccagcttcgtgatcgagggcctgaaggaggccgacaaggacgagttctgcagatgcgagctgaagctgcagaagtggtacggggacctgcggggaaagcccttcgccatcgaagccgagaacagcatcctggacatcagcggcttcagcaagcagtacaactgtgccttcatctggcagaaggacggcgtgaagaagctgaacctgtacctgatcatcaactacttcaagggcggcaagctgcggttcaagaagatcaaacctgaagccttcgaagccaacagattctacaccgtgatcaacaaaaagagcggcgagatcgtgcccatggaggtgaacttcaacttcgacgaccccaacctgatcatcctgcctctggcctttggcaagagacagggcagagaattcatctggaacgacctgctgtccctggaaaccggcagcctgaagctggccaacggaagagtgatcgagaagacactgtacaacagaagaacccggcaggatgagcctgccctgttcgtggccctgaccttcgagcggcgggaggtcctggactcctccaatatcaaaccaatgaacctgatcggcgtggcaagaggcgaaaacatccccgccgtgatcgccctgaccgaccccgagggctgcccactgagccggtttaaggatagcctgggaaacccaacccacatcctgagaatcggcgagagctataaggagaagcagcggaccatccaggccaagaaggaggtggagcagcggagagccggcggctacagccggaagtacgccagcaaagccaagaatctggcagacgatatggtgagaaacaccgctagagatctgctgtactacgccgtgacccaggatgccatgctgatcttcgccaacctgagccggggcttcggccggcagggcaagcggaccttcatggccgagagacagtacacacggatggaggactggctgaccgccaagctggcctacgagggcctgagcaagacctacctgtccaagacactggcccagtacacctccaagacatgcagcaactgtgggtttaccatcaccagcgccgactacgacagggtgctggagaagctgaagaagacagcaacaggctggatgaccacaattaacggcaaggagctgaaggtggagggccagattacctactacaacagatacaagagacagaacgtagtcaaggacctgtccgtcgagctggatagactgagcgaagaatctgtgaacaacgacatctcctcctggacaaagggcagaagcggagaagctctgagcctcctgaagaaaagattctcccatagacccgtgcaggagaagttcgtgtgcctgaactgcggcttcgagacacacgcagccgagcaagccgccctgaacatcgccagatcctggctgttcctgcggagccaggagtacaagaaataccagacaaacaagacaaccggcaacaccgataagagagccttcgtcgagacctggcagtccttttaccggaagaagcttaaggaggtgtggaaacctgccgtgcggtctggcggatctggcggaggctccaccagccccaagaaaaagagaaaagtctaagctgccttctgcggggcttgccttctggccatgcccttcttctctcccttgcacctgtacctcttggtctttgaataaagcctgagtaggaaggctagcaaaaaaaaaaaaaaaaaaaaaaaaaaaaaaaaaaaaaaaaaaaaaaaaaaaaaaaaaaaaaaaaaaaaaaaaaaaaaaaa

SEQ ID NO: 13408 - RNA, 5785 nt, synthetic construct
  source 1..5785: mol_type = other RNA
aggaaataagagagaaaagaagagtaagaagaaatataagagccaccatggcccctaagaagaagcgtaaagtgagccggatggaacgcctcgtctacgaggtgcggcagaagtgcagaaacatcgaggacatctgcatctcctgcggatctctgaacgtgaccctggagcacccactgttcatcggcggcatgtgccagaactgtaaaaactgttttctggagtgtgcctatcaatacgacgatgacggctaccagagctactgcaccatctgttgcggcggaagagaggtgctgatgtgtggaaataacaactgctgccggtgcttctgcgtggaatgcgtggacctgctggtgggccccggcgccgcccaggccgctattaaggaagatccttggaactgctacatgtgcggccacaagggcacatacggcctgctgagacggagagaggactggcctagcagactgcagatgttcttcgccaataaccacgaccaggagttcgacccccctaaggtgtaccctcccgtccccgccgagaagagaaagcccatccgggtcctgagcctgttcgatggcatcgccaccggtctgctggtgctgaaggacctgggcatccaggtggataggtacattgcctccgaggtgtgcgaggactccatcaccgtgggaatggtgcgtcatcagggcaagatcatgtacgtgggcgacgtgcggagcgtgacacagaagcatatccaggagtggggccctttcgacctggtgatcggcggcagcccttgcaatgacctgagcatcgtgaacccagcccggaagggcctgtacgagggaaccggcagactgttcttcgagttttacagactgctgcacgacgcccggcctaaggaaggcgacgaccggcccttcttttggctgttcgagaatgtggtggccatgggagtcagcgacaagcgggatattagccggttcctggagagcaaccccgtgatgatcgatgccaaggaagtgagcgccgcccaccgggccagatacttctggggcaatctgcctggcatgaacagacccctggccagcaccgtgaacgacaagctggagctgcaggagtgcctggagcacggccggatcgccaagttcagcaaggtgagaaccatcaccacccgaagcaacagcatcaaacaaggcaaggaccagcactttcctgtgttcatgaacgagaaggaggacatcctgtggtgtaccgagatggagagagtgttcgggttcccagtccactacacagatgtcagcaacatgtctagactggccagacagagactgctgggaagaagctggtccgtccctgtgatcagacacctgttcgcccctctgaaggagtacttcgcctgcgtgagcagcggcaacagcaacgccaacagccggggccccagcttctctagcggcctggtgccactgtccctgagagggagccacatgggccccatggagatctacaaaaccgtgagcgcctggaagcggcagcctgtgcgcgtgctgagcctgtttcggaatatcgataaagtcctgaaaagcctgggattcctggagagcggctctggctccggcggtggcaccctgaagtacgtggaggatgtgacaaacgtggtcagacgggatgtggagaagtggggccccttcgatctggtgtacggcagcacccaacccctgggcagctcttgtgaccggtgccctggctggtacatgtttcagttccaccggatcctgcagtacgccctgccgagacaggagtcccagcggccattcttttggattttcatggacaacttgctgctgaccgaggatgaccaggaaactaccactcggttcctgcagaccgaagccgtgaccctgcaggacgtgagaggccgggactaccagaacgccatgcgggtgtggtccaacatccctggactgaaaagcaagcacgcacctctgacccctaaagaagaggagtacctgcaggcccaggtgcggagcagaagcaagctggacgcccctaaggtggatctgctggtgaagaattgcctcctgcccctgagagagtacttcaagtatttcagccagaatagtctgcccctgggaggcagcggcggcggcttccaggagagcgtgaccttcgaggacgtggccatctacttcagcgagaacgagtggaccggcctggcccccgcccagagggccctgtacagggacgtgatgctggagaactacggcgccgtggccagcctggccgccttccccttccccaagcccgccctgatcttccagctggagcagggcgaggccccctggagcagcgccccccagggcgccctggacggcgagggccccaggggcatcggcggcccaagcagcggcgcccctcctcccagcggcggcagcccagccggctccccaacctctaccgaggagggcacctctgagtccgccacccccgagagcggccctggcacctccaccgagcccagcgagggcagcgcacccggcagccctgccggcagccccacctccacagaggagggaaccagcaccgagcccagcgaaggcagcgccccaggcaccagcaccgagcctagtgagcaggagattaaacggatcaacaagatcagaagaagacttgtgaaagacagcaacaccaagaaggccggcaagacaggccccatgaaaaccctgctggttagagtgatgacacccgatctgagagagcggctggaaaacctgagaaagaagcctgaaaatatcccccagcccatcagcaatacatctagagccaacctgaataagctgctgaccgattacaccgaaatgaagaaggcgatcctgcatgtgtactgggaagagttccagaaggaccctgtgggcctgatgagccgggtggcccagcctgccagcaagaagatcgatcagaacaagctgaaacctgagatggacgagaagggcaacctgaccaccgccggctttgcctgctctcagtgtggccagcccctgttcgtgtacaagctggagcaggtgtctgagaagggcaaggcttacaccaactacttcggacggtgcaatgtggccgagcacgaaaagctgatcctgctggcccagctgaagcccgagaaggatagcgacgaagccgtgacatatagcctgggaaagtttgggcagagggccctggatttctacagcattcatgtgaccaaggagtccacccaccccgtgaagcccctggcccagatcgccggaaacagatacgcctccggacctgtgggaaaggccctgagcgacgcatgtatgggcacaatcgcctccttcctgtctaagtaccaggacatcatcatcgaacaccagaaggtggtgaagggcaaccagaagagactggagagcctgcgggagctggccggcaaggaaaacctggaataccctagcgtgaccctgccacctcagcctcacaccaaggagggcgttgatgcctacaacgaagtgatcgcccgggtgcgaatgtgggtgaacctgaacctgtggcagaagctgaagctaagcagagatgatgccaagcctctgctgagactgaagggattcccttcctttcctctggtcgagagacaggccaacgaagtggactggtgggacatggtgtgtaacgtgaagaagctgatcaacgagaaaaaggaggatggcaaggtgttttggcagaatctggctggctacaagagacaggaagccctgagaccatacctgagcagcgaggaagatcggaagaagggaaagaaattcgctcggtaccagctgggcgacctgctgctgcacctggaaaagaagcacggcgaggactggggaaaggtgtacgacgaggcctgggagcggattgacaagaaagtggaaggcctgagcaagcacatcaagctggaagaggaacggagaagcgaggacgcccagagcaaggccgccctgaccgactggctgcgggctaaggccagcttcgtgatcgagggcctgaaggaggccgacaaggacgagttctgcagatgcgagctgaagctgcagaagtggtacggggacctgcggggaaagcccttcgccatcgaagccgagaacagcatcctggacatcagcggcttcagcaagcagtacaactgtgccttcatctggcagaaggacggcgtgaagaagctgaacctgtacctgatcatcaactacttcaagggcggcaagctgcggttcaagaagatcaaacctgaagccttcgaagccaacagattctacaccgtgatcaacaaaaagagcggcgagatcgtgcccatggaggtgaacttcaacttcgacgaccccaacctgatcatcctgcctctggcctttggcaagagacagggcagagaattcatctggaacgacctgctgtccctggaaaccggcagcctgaagctggccaacggaagagtgatcgagaagacactgtacaacagaagaacccggcaggatgagcctgccctgttcgtggccctgaccttcgagcggcgggaggtcctggactcctccaatatcaaaccaatgaacctgatcggcgtggcaagaggcgaaaacatccccgccgtgatcgccctgaccgaccccgagggctgcccactgagccggtttaaggatagcctgggaaacccaacccacatcctgagaatcggcgagagctataaggagaagcagcggaccatccaggccaagaaggaggtggagcagcggagagccggcggctacagccggaagtacgccagcaaagccaagaatctggcagacgatatggtgagaaacaccgctagagatctgctgtactacgccgtgacccaggatgccatgctgatcttcgccaacctgagccggggcttcggccggcagggcaagcggaccttcatggccgagagacagtacacacggatggaggactggctgaccgccaagctggcctacgagggcctgagcaagacctacctgtccaagacactggcccagtacacctccaagacatgcagcaactgtgggtttaccatcaccagcgccgactacgacagggtgctggagaagctgaagaagacagcaacaggctggatgaccacaattaacggcaaggagctgaaggtggagggccagattacctactacaacagatacaagagacagaacgtagtcaaggacctgtccgtcgagctggatagactgagcgaagaatctgtgaacaacgacatctcctcctggacaaagggcagaagcggagaagctctgagcctcctgaagaaaagattctcccatagacccgtgcaggagaagttcgtgtgcctgaactgcggcttcgagacacacgcagccgagcaagccgccctgaacatcgccagatcctggctgttcctgcggagccaggagtacaagaaataccagacaaacaagacaaccggcaacaccgataagagagccttcgtcgagacctggcagtccttttaccggaagaagcttaaggaggtgtggaaacctgccgtgcggtctggcggatctggcggaggctccaccagccccaagaaaaagagaaaagtctaagctgccttctgcggggcttgccttctggccatgcccttcttctctcccttgcacctgtacctcttggtctttgaataaagcctgagtaggaaggctagcaaaaaaaaaaaaaaaaaaaaaaaaaaaaaaaaaaaaaaaaaaaaaaaaaaaaaaaaaaaaaaaaaaaaaaaaaaaaaaaa

SEQ ID NO: 13409 - RNA, 5785 nt, synthetic construct
  source 1..5785: mol_type = other RNA
aggaaataagagagaaaagaagagtaagaagaaatataagagccaccatggcccctaagaagaagcgtaaagtgagccggatggaacgcctcgtctacgaggtgcggcagaagtgcagaaacatcgaggacatctgcatctcctgcggatctctgaacgtgaccctggagcacccactgttcatcggcggcatgtgccagaactgtaaaaactgttttctggagtgtgcctatcaatacgacgatgacggctaccagagctactgcaccatctgttgcggcggaagagaggtgctgatgtgtggaaataacaactgctgccggtgcttctgcgtggaatgcgtggacctgctggtgggccccggcgccgcccaggccgctattaaggaagatccttggaactgctacatgtgcggccacaagggcacatacggcctgctgagacggagagaggactggcctagcagactgcagatgttcttcgccaataaccacgaccaggagttcgacccccctaaggtgtaccctcccgtccccgccgagaagagaaagcccatccgggtcctgagcctgttcgatggcatcgccaccggtctgctggtgctgaaggacctgggcatccaggtggataggtacattgcctccgaggtgtgcgaggactccatcaccgtgggaatggtgcgtcatcagggcaagatcatgtacgtgggcgacgtgcggagcgtgacacagaagcatatccaggagtggggccctttcgacctggtgatcggcggcagcccttgcaatgacctgagcatcgtgaacccagcccggaagggcctgtacgagggaaccggcagactgttcttcgagttttacagactgctgcacgacgcccggcctaaggaaggcgacgaccggcccttcttttggctgttcgagaatgtggtggccatgggagtcagcgacaagcgggatattagccggttcctggagagcaaccccgtgatgatcgatgccaaggaagtgagcgccgcccaccgggccagatacttctggggcaatctgcctggcatgaacagacccctggccagcaccgtgaacgacaagctggagctgcaggagtgcctggagcacggccggatcgccaagttcagcaaggtgagaaccatcaccacccgaagcaacagcatcaaacaaggcaaggaccagcactttcctgtgttcatgaacgagaaggaggacatcctgtggtgtaccgagatggagagagtgttcgggttcccagtccactacacagatgtcagcaacatgtctagactggccagacagagactgctgggaagaagctggtccgtccctgtgatcagacacctgttcgcccctctgaaggagtacttcgcctgcgtgagcagcggcaacagcaacgccaacagccggggccccagcttctctagcggcctggtgccactgtccctgagagggagccacatgggccccatggagatctacaaaaccgtgagcgcctggaagcggcagcctgtgcgcgtgctgagcctgtttcggaatatcgataaagtcctgaaaagcctgggattcctggagagcggctctggctccggcggtggcaccctgaagtacgtggaggatgtgacaaacgtggtcagacgggatgtggagaagtggggccccttcgatctggtgtacggcagcacccaacccctgggcagctcttgtgaccggtgccctggctggtacatgtttcagttccaccggatcctgcagtacgccctgccgagacaggagtcccagcggccattcttttggattttcatggacaacttgctgctgaccgaggatgaccaggaaactaccactcggttcctgcagaccgaagccgtgaccctgcaggacgtgagaggccgggactaccagaacgccatgcgggtgtggtccaacatccctggactgaaaagcaagcacgcacctctgacccctaaagaagaggagtacctgcaggcccaggtgcggagcagaagcaagctggacgcccctaaggtggatctgctggtgaagaattgcctcctgcccctgagagagtacttcaagtatttcagccagaatagtctgcccctgggaggcagcggcggcggcatgggccccctgaccatcagggacgtgaccgtggagttcagcctggaggagtggcactgcctggacaccgcccagcagaacctgtacagggacgtgatgctggagaactacaggaacctggtgttcctgggcatcgccgtgagcaagcccgacctgatcacctgcctggagcagggcaaggagccctgcaacatgaagaggcacgagatggtggccaagccccccgtgatgtgcagccacatcggcggcccaagcagcggcgcccctcctcccagcggcggcagcccagccggctccccaacctctaccgaggagggcacctctgagtccgccacccccgagagcggccctggcacctccaccgagcccagcgagggcagcgcacccggcagccctgccggcagccccacctccacagaggagggaaccagcaccgagcccagcgaaggcagcgccccaggcaccagcaccgagcctagtgagcaggagattaaacggatcaacaagatcagaagaagacttgtgaaagacagcaacaccaagaaggccggcaagacaggccccatgaaaaccctgctggttagagtgatgacacccgatctgagagagcggctggaaaacctgagaaagaagcctgaaaatatcccccagcccatcagcaatacatctagagccaacctgaataagctgctgaccgattacaccgaaatgaagaaggcgatcctgcatgtgtactgggaagagttccagaaggaccctgtgggcctgatgagccgggtggcccagcctgccagcaagaagatcgatcagaacaagctgaaacctgagatggacgagaagggcaacctgaccaccgccggctttgcctgctctcagtgtggccagcccctgttcgtgtacaagctggagcaggtgtctgagaagggcaaggcttacaccaactacttcggacggtgcaatgtggccgagcacgaaaagctgatcctgctggcccagctgaagcccgagaaggatagcgacgaagccgtgacatatagcctgggaaagtttgggcagagggccctggatttctacagcattcatgtgaccaaggagtccacccaccccgtgaagcccctggcccagatcgccggaaacagatacgcctccggacctgtgggaaaggccctgagcgacgcatgtatgggcacaatcgcctccttcctgtctaagtaccaggacatcatcatcgaacaccagaaggtggtgaagggcaaccagaagagactggagagcctgcgggagctggccggcaaggaaaacctggaataccctagcgtgaccctgccacctcagcctcacaccaaggagggcgttgatgcctacaacgaagtgatcgcccgggtgcgaatgtgggtgaacctgaacctgtggcagaagctgaagctaagcagagatgatgccaagcctctgctgagactgaagggattcccttcctttcctctggtcgagagacaggccaacgaagtggactggtgggacatggtgtgtaacgtgaagaagctgatcaacgagaaaaaggaggatggcaaggtgttttggcagaatctggctggctacaagagacaggaagccctgagaccatacctgagcagcgaggaagatcggaagaagggaaagaaattcgctcggtaccagctgggcgacctgctgctgcacctggaaaagaagcacggcgaggactggggaaaggtgtacgacgaggcctgggagcggattgacaagaaagtggaaggcctgagcaagcacatcaagctggaagaggaacggagaagcgaggacgcccagagcaaggccgccctgaccgactggctgcgggctaaggccagcttcgtgatcgagggcctgaaggaggccgacaaggacgagttctgcagatgcgagctgaagctgcagaagtggtacggggacctgcggggaaagcccttcgccatcgaagccgagaacagcatcctggacatcagcggcttcagcaagcagtacaactgtgccttcatctggcagaaggacggcgtgaagaagctgaacctgtacctgatcatcaactacttcaagggcggcaagctgcggttcaagaagatcaaacctgaagccttcgaagccaacagattctacaccgtgatcaacaaaaagagcggcgagatcgtgcccatggaggtgaacttcaacttcgacgaccccaacctgatcatcctgcctctggcctttggcaagagacagggcagagaattcatctggaacgacctgctgtccctggaaaccggcagcctgaagctggccaacggaagagtgatcgagaagacactgtacaacagaagaacccggcaggatgagcctgccctgttcgtggccctgaccttcgagcggcgggaggtcctggactcctccaatatcaaaccaatgaacctgatcggcgtggcaagaggcgaaaacatccccgccgtgatcgccctgaccgaccccgagggctgcccactgagccggtttaaggatagcctgggaaacccaacccacatcctgagaatcggcgagagctataaggagaagcagcggaccatccaggccaagaaggaggtggagcagcggagagccggcggctacagccggaagtacgccagcaaagccaagaatctggcagacgatatggtgagaaacaccgctagagatctgctgtactacgccgtgacccaggatgccatgctgatcttcgccaacctgagccggggcttcggccggcagggcaagcggaccttcatggccgagagacagtacacacggatggaggactggctgaccgccaagctggcctacgagggcctgagcaagacctacctgtccaagacactggcccagtacacctccaagacatgcagcaactgtgggtttaccatcaccagcgccgactacgacagggtgctggagaagctgaagaagacagcaacaggctggatgaccacaattaacggcaaggagctgaaggtggagggccagattacctactacaacagatacaagagacagaacgtagtcaaggacctgtccgtcgagctggatagactgagcgaagaatctgtgaacaacgacatctcctcctggacaaagggcagaagcggagaagctctgagcctcctgaagaaaagattctcccatagacccgtgcaggagaagttcgtgtgcctgaactgcggcttcgagacacacgcagccgagcaagccgccctgaacatcgccagatcctggctgttcctgcggagccaggagtacaagaaataccagacaaacaagacaaccggcaacaccgataagagagccttcgtcgagacctggcagtccttttaccggaagaagcttaaggaggtgtggaaacctgccgtgcggtctggcggatctggcggaggctccaccagccccaagaaaaagagaaaagtctaagctgccttctgcggggcttgccttctggccatgcccttcttctctcccttgcacctgtacctcttggtctttgaataaagcctgagtaggaaggctagcaaaaaaaaaaaaaaaaaaaaaaaaaaaaaaaaaaaaaaaaaaaaaaaaaaaaaaaaaaaaaaaaaaaaaaaaaaaaaaaa

SEQ ID NO: 13410 - RNA, 5785 nt, synthetic construct
  source 1..5785: mol_type = other RNA
aggaaataagagagaaaagaagagtaagaagaaatataagagccaccatggcccctaagaagaagcgtaaagtgagccggatggaacgcctcgtctacgaggtgcggcagaagtgcagaaacatcgaggacatctgcatctcctgcggatctctgaacgtgaccctggagcacccactgttcatcggcggcatgtgccagaactgtaaaaactgttttctggagtgtgcctatcaatacgacgatgacggctaccagagctactgcaccatctgttgcggcggaagagaggtgctgatgtgtggaaataacaactgctgccggtgcttctgcgtggaatgcgtggacctgctggtgggccccggcgccgcccaggccgctattaaggaagatccttggaactgctacatgtgcggccacaagggcacatacggcctgctgagacggagagaggactggcctagcagactgcagatgttcttcgccaataaccacgaccaggagttcgacccccctaaggtgtaccctcccgtccccgccgagaagagaaagcccatccgggtcctgagcctgttcgatggcatcgccaccggtctgctggtgctgaaggacctgggcatccaggtggataggtacattgcctccgaggtgtgcgaggactccatcaccgtgggaatggtgcgtcatcagggcaagatcatgtacgtgggcgacgtgcggagcgtgacacagaagcatatccaggagtggggccctttcgacctggtgatcggcggcagcccttgcaatgacctgagcatcgtgaacccagcccggaagggcctgtacgagggaaccggcagactgttcttcgagttttacagactgctgcacgacgcccggcctaaggaaggcgacgaccggcccttcttttggctgttcgagaatgtggtggccatgggagtcagcgacaagcgggatattagccggttcctggagagcaaccccgtgatgatcgatgccaaggaagtgagcgccgcccaccgggccagatacttctggggcaatctgcctggcatgaacagacccctggccagcaccgtgaacgacaagctggagctgcaggagtgcctggagcacggccggatcgccaagttcagcaaggtgagaaccatcaccacccgaagcaacagcatcaaacaaggcaaggaccagcactttcctgtgttcatgaacgagaaggaggacatcctgtggtgtaccgagatggagagagtgttcgggttcccagtccactacacagatgtcagcaacatgtctagactggccagacagagactgctgggaagaagctggtccgtccctgtgatcagacacctgttcgcccctctgaaggagtacttcgcctgcgtgagcagcggcaacagcaacgccaacagccggggccccagcttctctagcggcctggtgccactgtccctgagagggagccacatgggccccatggagatctacaaaaccgtgagcgcctggaagcggcagcctgtgcgcgtgctgagcctgtttcggaatatcgataaagtcctgaaaagcctgggattcctggagagcggctctggctccggcggtggcaccctgaagtacgtggaggatgtgacaaacgtggtcagacgggatgtggagaagtggggccccttcgatctggtgtacggcagcacccaacccctgggcagctcttgtgaccggtgccctggctggtacatgtttcagttccaccggatcctgcagtacgccctgccgagacaggagtcccagcggccattcttttggattttcatggacaacttgctgctgaccgaggatgaccaggaaactaccactcggttcctgcagaccgaagccgtgaccctgcaggacgtgagaggccgggactaccagaacgccatgcgggtgtggtccaacatccctggactgaaaagcaagcacgcacctctgacccctaaagaagaggagtacctgcaggcccaggtgcggagcagaagcaagctggacgcccctaaggtggatctgctggtgaagaattgcctcctgcccctgagagagtacttcaagtatttcagccagaatagtctgcccctgggaggcagcggcggcggccagccccaggaggccatgaccttcaaggacgtggaggtgaccttcagccaggacgagtggggcagcctggacagcgcccagaggaacctgtacagggacgtgatgctggagaactacaggaacatggtgagcctggtgggccccttcaccaagcccgccctgatcagctggctggaggccagggagccctggggcctgaacgtgcaggccgcccagcccaagggcaaccccggcgccgcccccggcggcccaagcagcggcgcccctcctcccagcggcggcagcccagccggctccccaacctctaccgaggagggcacctctgagtccgccacccccgagagcggccctggcacctccaccgagcccagcgagggcagcgcacccggcagccctgccggcagccccacctccacagaggagggaaccagcaccgagcccagcgaaggcagcgccccaggcaccagcaccgagcctagtgagcaggagattaaacggatcaacaagatcagaagaagacttgtgaaagacagcaacaccaagaaggccggcaagacaggccccatgaaaaccctgctggttagagtgatgacacccgatctgagagagcggctggaaaacctgagaaagaagcctgaaaatatcccccagcccatcagcaatacatctagagccaacctgaataagctgctgaccgattacaccgaaatgaagaaggcgatcctgcatgtgtactgggaagagttccagaaggaccctgtgggcctgatgagccgggtggcccagcctgccagcaagaagatcgatcagaacaagctgaaacctgagatggacgagaagggcaacctgaccaccgccggctttgcctgctctcagtgtggccagcccctgttcgtgtacaagctggagcaggtgtctgagaagggcaaggcttacaccaactacttcggacggtgcaatgtggccgagcacgaaaagctgatcctgctggcccagctgaagcccgagaaggatagcgacgaagccgtgacatatagcctgggaaagtttgggcagagggccctggatttctacagcattcatgtgaccaaggagtccacccaccccgtgaagcccctggcccagatcgccggaaacagatacgcctccggacctgtgggaaaggccctgagcgacgcatgtatgggcacaatcgcctccttcctgtctaagtaccaggacatcatcatcgaacaccagaaggtggtgaagggcaaccagaagagactggagagcctgcgggagctggccggcaaggaaaacctggaataccctagcgtgaccctgccacctcagcctcacaccaaggagggcgttgatgcctacaacgaagtgatcgcccgggtgcgaatgtgggtgaacctgaacctgtggcagaagctgaagctaagcagagatgatgccaagcctctgctgagactgaagggattcccttcctttcctctggtcgagagacaggccaacgaagtggactggtgggacatggtgtgtaacgtgaagaagctgatcaacgagaaaaaggaggatggcaaggtgttttggcagaatctggctggctacaagagacaggaagccctgagaccatacctgagcagcgaggaagatcggaagaagggaaagaaattcgctcggtaccagctgggcgacctgctgctgcacctggaaaagaagcacggcgaggactggggaaaggtgtacgacgaggcctgggagcggattgacaagaaagtggaaggcctgagcaagcacatcaagctggaagaggaacggagaagcgaggacgcccagagcaaggccgccctgaccgactggctgcgggctaaggccagcttcgtgatcgagggcctgaaggaggccgacaaggacgagttctgcagatgcgagctgaagctgcagaagtggtacggggacctgcggggaaagcccttcgccatcgaagccgagaacagcatcctggacatcagcggcttcagcaagcagtacaactgtgccttcatctggcagaaggacggcgtgaagaagctgaacctgtacctgatcatcaactacttcaagggcggcaagctgcggttcaagaagatcaaacctgaagccttcgaagccaacagattctacaccgtgatcaacaaaaagagcggcgagatcgtgcccatggaggtgaacttcaacttcgacgaccccaacctgatcatcctgcctctggcctttggcaagagacagggcagagaattcatctggaacgacctgctgtccctggaaaccggcagcctgaagctggccaacggaagagtgatcgagaagacactgtacaacagaagaacccggcaggatgagcctgccctgttcgtggccctgaccttcgagcggcgggaggtcctggactcctccaatatcaaaccaatgaacctgatcggcgtggcaagaggcgaaaacatccccgccgtgatcgccctgaccgaccccgagggctgcccactgagccggtttaaggatagcctgggaaacccaacccacatcctgagaatcggcgagagctataaggagaagcagcggaccatccaggccaagaaggaggtggagcagcggagagccggcggctacagccggaagtacgccagcaaagccaagaatctggcagacgatatggtgagaaacaccgctagagatctgctgtactacgccgtgacccaggatgccatgctgatcttcgccaacctgagccggggcttcggccggcagggcaagcggaccttcatggccgagagacagtacacacggatggaggactggctgaccgccaagctggcctacgagggcctgagcaagacctacctgtccaagacactggcccagtacacctccaagacatgcagcaactgtgggtttaccatcaccagcgccgactacgacagggtgctggagaagctgaagaagacagcaacaggctggatgaccacaattaacggcaaggagctgaaggtggagggccagattacctactacaacagatacaagagacagaacgtagtcaaggacctgtccgtcgagctggatagactgagcgaagaatctgtgaacaacgacatctcctcctggacaaagggcagaagcggagaagctctgagcctcctgaagaaaagattctcccatagacccgtgcaggagaagttcgtgtgcctgaactgcggcttcgagacacacgcagccgagcaagccgccctgaacatcgccagatcctggctgttcctgcggagccaggagtacaagaaataccagacaaacaagacaaccggcaacaccgataagagagccttcgtcgagacctggcagtccttttaccggaagaagcttaaggaggtgtggaaacctgccgtgcggtctggcggatctggcggaggctccaccagccccaagaaaaagagaaaagtctaagctgccttctgcggggcttgccttctggccatgcccttcttctctcccttgcacctgtacctcttggtctttgaataaagcctgagtaggaaggctagcaaaaaaaaaaaaaaaaaaaaaaaaaaaaaaaaaaaaaaaaaaaaaaaaaaaaaaaaaaaaaaaaaaaaaaaaaaaaaaaa

SEQ ID NO: 13411 - RNA, 5785 nt, synthetic construct
  source 1..5785: mol_type = other RNA
aggaaataagagagaaaagaagagtaagaagaaatataagagccaccatggcccctaagaagaagcgtaaagtgagccggatggaacgcctcgtctacgaggtgcggcagaagtgcagaaacatcgaggacatctgcatctcctgcggatctctgaacgtgaccctggagcacccactgttcatcggcggcatgtgccagaactgtaaaaactgttttctggagtgtgcctatcaatacgacgatgacggctaccagagctactgcaccatctgttgcggcggaagagaggtgctgatgtgtggaaataacaactgctgccggtgcttctgcgtggaatgcgtggacctgctggtgggccccggcgccgcccaggccgctattaaggaagatccttggaactgctacatgtgcggccacaagggcacatacggcctgctgagacggagagaggactggcctagcagactgcagatgttcttcgccaataaccacgaccaggagttcgacccccctaaggtgtaccctcccgtccccgccgagaagagaaagcccatccgggtcctgagcctgttcgatggcatcgccaccggtctgctggtgctgaaggacctgggcatccaggtggataggtacattgcctccgaggtgtgcgaggactccatcaccgtgggaatggtgcgtcatcagggcaagatcatgtacgtgggcgacgtgcggagcgtgacacagaagcatatccaggagtggggccctttcgacctggtgatcggcggcagcccttgcaatgacctgagcatcgtgaacccagcccggaagggcctgtacgagggaaccggcagactgttcttcgagttttacagactgctgcacgacgcccggcctaaggaaggcgacgaccggcccttcttttggctgttcgagaatgtggtggccatgggagtcagcgacaagcgggatattagccggttcctggagagcaaccccgtgatgatcgatgccaaggaagtgagcgccgcccaccgggccagatacttctggggcaatctgcctggcatgaacagacccctggccagcaccgtgaacgacaagctggagctgcaggagtgcctggagcacggccggatcgccaagttcagcaaggtgagaaccatcaccacccgaagcaacagcatcaaacaaggcaaggaccagcactttcctgtgttcatgaacgagaaggaggacatcctgtggtgtaccgagatggagagagtgttcgggttcccagtccactacacagatgtcagcaacatgtctagactggccagacagagactgctgggaagaagctggtccgtccctgtgatcagacacctgttcgcccctctgaaggagtacttcgcctgcgtgagcagcggcaacagcaacgccaacagccggggccccagcttctctagcggcctggtgccactgtccctgagagggagccacatgggccccatggagatctacaaaaccgtgagcgcctggaagcggcagcctgtgcgcgtgctgagcctgtttcggaatatcgataaagtcctgaaaagcctgggattcctggagagcggctctggctccggcggtggcaccctgaagtacgtggaggatgtgacaaacgtggtcagacgggatgtggagaagtggggccccttcgatctggtgtacggcagcacccaacccctgggcagctcttgtgaccggtgccctggctggtacatgtttcagttccaccggatcctgcagtacgccctgccgagacaggagtcccagcggccattcttttggattttcatggacaacttgctgctgaccgaggatgaccaggaaactaccactcggttcctgcagaccgaagccgtgaccctgcaggacgtgagaggccgggactaccagaacgccatgcgggtgtggtccaacatccctggactgaaaagcaagcacgcacctctgacccctaaagaagaggagtacctgcaggcccaggtgcggagcagaagcaagctggacgcccctaaggtggatctgctggtgaagaattgcctcctgcccctgagagagtacttcaagtatttcagccagaatagtctgcccctgggaggcagcggcggcggcatgaacagcgaggtgatcgtggaccccatccagggccaggtgaacttcgaggacgtgttcgtgtacttcagccaggaggagtgggtgctgctggacgaggcccagaggctgctgtacagggacgtgatgctggagaacttcgccctgatggccagcctgggccacaccagcttcatgagccacatcggcgccagcctggtgatgggcagcgagccctgggtgcccgactgggtggacatgatcggcggcccaagcagcggcgcccctcctcccagcggcggcagcccagccggctccccaacctctaccgaggagggcacctctgagtccgccacccccgagagcggccctggcacctccaccgagcccagcgagggcagcgcacccggcagccctgccggcagccccacctccacagaggagggaaccagcaccgagcccagcgaaggcagcgccccaggcaccagcaccgagcctagtgagcaggagattaaacggatcaacaagatcagaagaagacttgtgaaagacagcaacaccaagaaggccggcaagacaggccccatgaaaaccctgctggttagagtgatgacacccgatctgagagagcggctggaaaacctgagaaagaagcctgaaaatatcccccagcccatcagcaatacatctagagccaacctgaataagctgctgaccgattacaccgaaatgaagaaggcgatcctgcatgtgtactgggaagagttccagaaggaccctgtgggcctgatgagccgggtggcccagcctgccagcaagaagatcgatcagaacaagctgaaacctgagatggacgagaagggcaacctgaccaccgccggctttgcctgctctcagtgtggccagcccctgttcgtgtacaagctggagcaggtgtctgagaagggcaaggcttacaccaactacttcggacggtgcaatgtggccgagcacgaaaagctgatcctgctggcccagctgaagcccgagaaggatagcgacgaagccgtgacatatagcctgggaaagtttgggcagagggccctggatttctacagcattcatgtgaccaaggagtccacccaccccgtgaagcccctggcccagatcgccggaaacagatacgcctccggacctgtgggaaaggccctgagcgacgcatgtatgggcacaatcgcctccttcctgtctaagtaccaggacatcatcatcgaacaccagaaggtggtgaagggcaaccagaagagactggagagcctgcgggagctggccggcaaggaaaacctggaataccctagcgtgaccctgccacctcagcctcacaccaaggagggcgttgatgcctacaacgaagtgatcgcccgggtgcgaatgtgggtgaacctgaacctgtggcagaagctgaagctaagcagagatgatgccaagcctctgctgagactgaagggattcccttcctttcctctggtcgagagacaggccaacgaagtggactggtgggacatggtgtgtaacgtgaagaagctgatcaacgagaaaaaggaggatggcaaggtgttttggcagaatctggctggctacaagagacaggaagccctgagaccatacctgagcagcgaggaagatcggaagaagggaaagaaattcgctcggtaccagctgggcgacctgctgctgcacctggaaaagaagcacggcgaggactggggaaaggtgtacgacgaggcctgggagcggattgacaagaaagtggaaggcctgagcaagcacatcaagctggaagaggaacggagaagcgaggacgcccagagcaaggccgccctgaccgactggctgcgggctaaggccagcttcgtgatcgagggcctgaaggaggccgacaaggacgagttctgcagatgcgagctgaagctgcagaagtggtacggggacctgcggggaaagcccttcgccatcgaagccgagaacagcatcctggacatcagcggcttcagcaagcagtacaactgtgccttcatctggcagaaggacggcgtgaagaagctgaacctgtacctgatcatcaactacttcaagggcggcaagctgcggttcaagaagatcaaacctgaagccttcgaagccaacagattctacaccgtgatcaacaaaaagagcggcgagatcgtgcccatggaggtgaacttcaacttcgacgaccccaacctgatcatcctgcctctggcctttggcaagagacagggcagagaattcatctggaacgacctgctgtccctggaaaccggcagcctgaagctggccaacggaagagtgatcgagaagacactgtacaacagaagaacccggcaggatgagcctgccctgttcgtggccctgaccttcgagcggcgggaggtcctggactcctccaatatcaaaccaatgaacctgatcggcgtggcaagaggcgaaaacatccccgccgtgatcgccctgaccgaccccgagggctgcccactgagccggtttaaggatagcctgggaaacccaacccacatcctgagaatcggcgagagctataaggagaagcagcggaccatccaggccaagaaggaggtggagcagcggagagccggcggctacagccggaagtacgccagcaaagccaagaatctggcagacgatatggtgagaaacaccgctagagatctgctgtactacgccgtgacccaggatgccatgctgatcttcgccaacctgagccggggcttcggccggcagggcaagcggaccttcatggccgagagacagtacacacggatggaggactggctgaccgccaagctggcctacgagggcctgagcaagacctacctgtccaagacactggcccagtacacctccaagacatgcagcaactgtgggtttaccatcaccagcgccgactacgacagggtgctggagaagctgaagaagacagcaacaggctggatgaccacaattaacggcaaggagctgaaggtggagggccagattacctactacaacagatacaagagacagaacgtagtcaaggacctgtccgtcgagctggatagactgagcgaagaatctgtgaacaacgacatctcctcctggacaaagggcagaagcggagaagctctgagcctcctgaagaaaagattctcccatagacccgtgcaggagaagttcgtgtgcctgaactgcggcttcgagacacacgcagccgagcaagccgccctgaacatcgccagatcctggctgttcctgcggagccaggagtacaagaaataccagacaaacaagacaaccggcaacaccgataagagagccttcgtcgagacctggcagtccttttaccggaagaagcttaaggaggtgtggaaacctgccgtgcggtctggcggatctggcggaggctccaccagccccaagaaaaagagaaaagtctaagctgccttctgcggggcttgccttctggccatgcccttcttctctcccttgcacctgtacctcttggtctttgaataaagcctgagtaggaaggctagcaaaaaaaaaaaaaaaaaaaaaaaaaaaaaaaaaaaaaaaaaaaaaaaaaaaaaaaaaaaaaaaaaaaaaaaaaaaaaaaa

SEQ ID NO: 13412 - RNA, 5785 nt, synthetic construct
  source 1..5785: mol_type = other RNA
aggaaataagagagaaaagaagagtaagaagaaatataagagccaccatggcccctaagaagaagcgtaaagtgagccggatggaacgcctcgtctacgaggtgcggcagaagtgcagaaacatcgaggacatctgcatctcctgcggatctctgaacgtgaccctggagcacccactgttcatcggcggcatgtgccagaactgtaaaaactgttttctggagtgtgcctatcaatacgacgatgacggctaccagagctactgcaccatctgttgcggcggaagagaggtgctgatgtgtggaaataacaactgctgccggtgcttctgcgtggaatgcgtggacctgctggtgggccccggcgccgcccaggccgctattaaggaagatccttggaactgctacatgtgcggccacaagggcacatacggcctgctgagacggagagaggactggcctagcagactgcagatgttcttcgccaataaccacgaccaggagttcgacccccctaaggtgtaccctcccgtccccgccgagaagagaaagcccatccgggtcctgagcctgttcgatggcatcgccaccggtctgctggtgctgaaggacctgggcatccaggtggataggtacattgcctccgaggtgtgcgaggactccatcaccgtgggaatggtgcgtcatcagggcaagatcatgtacgtgggcgacgtgcggagcgtgacacagaagcatatccaggagtggggccctttcgacctggtgatcggcggcagcccttgcaatgacctgagcatcgtgaacccagcccggaagggcctgtacgagggaaccggcagactgttcttcgagttttacagactgctgcacgacgcccggcctaaggaaggcgacgaccggcccttcttttggctgttcgagaatgtggtggccatgggagtcagcgacaagcgggatattagccggttcctggagagcaaccccgtgatgatcgatgccaaggaagtgagcgccgcccaccgggccagatacttctggggcaatctgcctggcatgaacagacccctggccagcaccgtgaacgacaagctggagctgcaggagtgcctggagcacggccggatcgccaagttcagcaaggtgagaaccatcaccacccgaagcaacagcatcaaacaaggcaaggaccagcactttcctgtgttcatgaacgagaaggaggacatcctgtggtgtaccgagatggagagagtgttcgggttcccagtccactacacagatgtcagcaacatgtctagactggccagacagagactgctgggaagaagctggtccgtccctgtgatcagacacctgttcgcccctctgaaggagtacttcgcctgcgtgagcagcggcaacagcaacgccaacagccggggccccagcttctctagcggcctggtgccactgtccctgagagggagccacatgggccccatggagatctacaaaaccgtgagcgcctggaagcggcagcctgtgcgcgtgctgagcctgtttcggaatatcgataaagtcctgaaaagcctgggattcctggagagcggctctggctccggcggtggcaccctgaagtacgtggaggatgtgacaaacgtggtcagacgggatgtggagaagtggggccccttcgatctggtgtacggcagcacccaacccctgggcagctcttgtgaccggtgccctggctggtacatgtttcagttccaccggatcctgcagtacgccctgccgagacaggagtcccagcggccattcttttggattttcatggacaacttgctgctgaccgaggatgaccaggaaactaccactcggttcctgcagaccgaagccgtgaccctgcaggacgtgagaggccgggactaccagaacgccatgcgggtgtggtccaacatccctggactgaaaagcaagcacgcacctctgacccctaaagaagaggagtacctgcaggcccaggtgcggagcagaagcaagctggacgcccctaaggtggatctgctggtgaagaattgcctcctgcccctgagagagtacttcaagtatttcagccagaatagtctgcccctgggaggcagcggcggcggcctgcaggagagcgtgaccttcagggacgtggccgtgttcttcagccaggacgagtggctgaggctggacagcgcccagaggaccctgtacagggaggtgatgctggagaactacggcaccctggtgagcctgggcatccccttcagcacccccaaggtgatctgccagctgcagcagggcgaggacccctgcgtggtggacagggagctgccccaggacgcctggcccggcctgaagacccagggcggcccaagcagcggcgcccctcctcccagcggcggcagcccagccggctccccaacctctaccgaggagggcacctctgagtccgccacccccgagagcggccctggcacctccaccgagcccagcgagggcagcgcacccggcagccctgccggcagccccacctccacagaggagggaaccagcaccgagcccagcgaaggcagcgccccaggcaccagcaccgagcctagtgagcaggagattaaacggatcaacaagatcagaagaagacttgtgaaagacagcaacaccaagaaggccggcaagacaggccccatgaaaaccctgctggttagagtgatgacacccgatctgagagagcggctggaaaacctgagaaagaagcctgaaaatatcccccagcccatcagcaatacatctagagccaacctgaataagctgctgaccgattacaccgaaatgaagaaggcgatcctgcatgtgtactgggaagagttccagaaggaccctgtgggcctgatgagccgggtggcccagcctgccagcaagaagatcgatcagaacaagctgaaacctgagatggacgagaagggcaacctgaccaccgccggctttgcctgctctcagtgtggccagcccctgttcgtgtacaagctggagcaggtgtctgagaagggcaaggcttacaccaactacttcggacggtgcaatgtggccgagcacgaaaagctgatcctgctggcccagctgaagcccgagaaggatagcgacgaagccgtgacatatagcctgggaaagtttgggcagagggccctggatttctacagcattcatgtgaccaaggagtccacccaccccgtgaagcccctggcccagatcgccggaaacagatacgcctccggacctgtgggaaaggccctgagcgacgcatgtatgggcacaatcgcctccttcctgtctaagtaccaggacatcatcatcgaacaccagaaggtggtgaagggcaaccagaagagactggagagcctgcgggagctggccggcaaggaaaacctggaataccctagcgtgaccctgccacctcagcctcacaccaaggagggcgttgatgcctacaacgaagtgatcgcccgggtgcgaatgtgggtgaacctgaacctgtggcagaagctgaagctaagcagagatgatgccaagcctctgctgagactgaagggattcccttcctttcctctggtcgagagacaggccaacgaagtggactggtgggacatggtgtgtaacgtgaagaagctgatcaacgagaaaaaggaggatggcaaggtgttttggcagaatctggctggctacaagagacaggaagccctgagaccatacctgagcagcgaggaagatcggaagaagggaaagaaattcgctcggtaccagctgggcgacctgctgctgcacctggaaaagaagcacggcgaggactggggaaaggtgtacgacgaggcctgggagcggattgacaagaaagtggaaggcctgagcaagcacatcaagctggaagaggaacggagaagcgaggacgcccagagcaaggccgccctgaccgactggctgcgggctaaggccagcttcgtgatcgagggcctgaaggaggccgacaaggacgagttctgcagatgcgagctgaagctgcagaagtggtacggggacctgcggggaaagcccttcgccatcgaagccgagaacagcatcctggacatcagcggcttcagcaagcagtacaactgtgccttcatctggcagaaggacggcgtgaagaagctgaacctgtacctgatcatcaactacttcaagggcggcaagctgcggttcaagaagatcaaacctgaagccttcgaagccaacagattctacaccgtgatcaacaaaaagagcggcgagatcgtgcccatggaggtgaacttcaacttcgacgaccccaacctgatcatcctgcctctggcctttggcaagagacagggcagagaattcatctggaacgacctgctgtccctggaaaccggcagcctgaagctggccaacggaagagtgatcgagaagacactgtacaacagaagaacccggcaggatgagcctgccctgttcgtggccctgaccttcgagcggcgggaggtcctggactcctccaatatcaaaccaatgaacctgatcggcgtggcaagaggcgaaaacatccccgccgtgatcgccctgaccgaccccgagggctgcccactgagccggtttaaggatagcctgggaaacccaacccacatcctgagaatcggcgagagctataaggagaagcagcggaccatccaggccaagaaggaggtggagcagcggagagccggcggctacagccggaagtacgccagcaaagccaagaatctggcagacgatatggtgagaaacaccgctagagatctgctgtactacgccgtgacccaggatgccatgctgatcttcgccaacctgagccggggcttcggccggcagggcaagcggaccttcatggccgagagacagtacacacggatggaggactggctgaccgccaagctggcctacgagggcctgagcaagacctacctgtccaagacactggcccagtacacctccaagacatgcagcaactgtgggtttaccatcaccagcgccgactacgacagggtgctggagaagctgaagaagacagcaacaggctggatgaccacaattaacggcaaggagctgaaggtggagggccagattacctactacaacagatacaagagacagaacgtagtcaaggacctgtccgtcgagctggatagactgagcgaagaatctgtgaacaacgacatctcctcctggacaaagggcagaagcggagaagctctgagcctcctgaagaaaagattctcccatagacccgtgcaggagaagttcgtgtgcctgaactgcggcttcgagacacacgcagccgagcaagccgccctgaacatcgccagatcctggctgttcctgcggagccaggagtacaagaaataccagacaaacaagacaaccggcaacaccgataagagagccttcgtcgagacctggcagtccttttaccggaagaagcttaaggaggtgtggaaacctgccgtgcggtctggcggatctggcggaggctccaccagccccaagaaaaagagaaaagtctaagctgccttctgcggggcttgccttctggccatgcccttcttctctcccttgcacctgtacctcttggtctttgaataaagcctgagtaggaaggctagcaaaaaaaaaaaaaaaaaaaaaaaaaaaaaaaaaaaaaaaaaaaaaaaaaaaaaaaaaaaaaaaaaaaaaaaaaaaaaaaa

SEQ ID NO: 13413 - RNA, 5785 nt, synthetic construct
  source 1..5785: mol_type = other RNA
aggaaataagagagaaaagaagagtaagaagaaatataagagccaccatggcccctaagaagaagcgtaaagtgagccggatggaacgcctcgtctacgaggtgcggcagaagtgcagaaacatcgaggacatctgcatctcctgcggatctctgaacgtgaccctggagcacccactgttcatcggcggcatgtgccagaactgtaaaaactgttttctggagtgtgcctatcaatacgacgatgacggctaccagagctactgcaccatctgttgcggcggaagagaggtgctgatgtgtggaaataacaactgctgccggtgcttctgcgtggaatgcgtggacctgctggtgggccccggcgccgcccaggccgctattaaggaagatccttggaactgctacatgtgcggccacaagggcacatacggcctgctgagacggagagaggactggcctagcagactgcagatgttcttcgccaataaccacgaccaggagttcgacccccctaaggtgtaccctcccgtccccgccgagaagagaaagcccatccgggtcctgagcctgttcgatggcatcgccaccggtctgctggtgctgaaggacctgggcatccaggtggataggtacattgcctccgaggtgtgcgaggactccatcaccgtgggaatggtgcgtcatcagggcaagatcatgtacgtgggcgacgtgcggagcgtgacacagaagcatatccaggagtggggccctttcgacctggtgatcggcggcagcccttgcaatgacctgagcatcgtgaacccagcccggaagggcctgtacgagggaaccggcagactgttcttcgagttttacagactgctgcacgacgcccggcctaaggaaggcgacgaccggcccttcttttggctgttcgagaatgtggtggccatgggagtcagcgacaagcgggatattagccggttcctggagagcaaccccgtgatgatcgatgccaaggaagtgagcgccgcccaccgggccagatacttctggggcaatctgcctggcatgaacagacccctggccagcaccgtgaacgacaagctggagctgcaggagtgcctggagcacggccggatcgccaagttcagcaaggtgagaaccatcaccacccgaagcaacagcatcaaacaaggcaaggaccagcactttcctgtgttcatgaacgagaaggaggacatcctgtggtgtaccgagatggagagagtgttcgggttcccagtccactacacagatgtcagcaacatgtctagactggccagacagagactgctgggaagaagctggtccgtccctgtgatcagacacctgttcgcccctctgaaggagtacttcgcctgcgtgagcagcggcaacagcaacgccaacagccggggccccagcttctctagcggcctggtgccactgtccctgagagggagccacatgggccccatggagatctacaaaaccgtgagcgcctggaagcggcagcctgtgcgcgtgctgagcctgtttcggaatatcgataaagtcctgaaaagcctgggattcctggagagcggctctggctccggcggtggcaccctgaagtacgtggaggatgtgacaaacgtggtcagacgggatgtggagaagtggggccccttcgatctggtgtacggcagcacccaacccctgggcagctcttgtgaccggtgccctggctggtacatgtttcagttccaccggatcctgcagtacgccctgccgagacaggagtcccagcggccattcttttggattttcatggacaacttgctgctgaccgaggatgaccaggaaactaccactcggttcctgcagaccgaagccgtgaccctgcaggacgtgagaggccgggactaccagaacgccatgcgggtgtggtccaacatccctggactgaaaagcaagcacgcacctctgacccctaaagaagaggagtacctgcaggcccaggtgcggagcagaagcaagctggacgcccctaaggtggatctgctggtgaagaattgcctcctgcccctgagagagtacttcaagtatttcagccagaatagtctgcccctgggaggcagcggcggcggcttccagggcagcatcagcttcaaggacgtgaccgtgggcttcacccaggaggagtggcagcacctggaccccagccagagggccctgtacagggacgtgaccctggagaactacagcaacctggtgagcgtgggctactgcgtgcacaagcccgaggtgatcttcaggctggagcagggcgaggagccctggaggctggaggaggagttccccagccagagcttccccgaggtgtggaccgccggcggcccaagcagcggcgcccctcctcccagcggcggcagcccagccggctccccaacctctaccgaggagggcacctctgagtccgccacccccgagagcggccctggcacctccaccgagcccagcgagggcagcgcacccggcagccctgccggcagccccacctccacagaggagggaaccagcaccgagcccagcgaaggcagcgccccaggcaccagcaccgagcctagtgagcaggagattaaacggatcaacaagatcagaagaagacttgtgaaagacagcaacaccaagaaggccggcaagacaggccccatgaaaaccctgctggttagagtgatgacacccgatctgagagagcggctggaaaacctgagaaagaagcctgaaaatatcccccagcccatcagcaatacatctagagccaacctgaataagctgctgaccgattacaccgaaatgaagaaggcgatcctgcatgtgtactgggaagagttccagaaggaccctgtgggcctgatgagccgggtggcccagcctgccagcaagaagatcgatcagaacaagctgaaacctgagatggacgagaagggcaacctgaccaccgccggctttgcctgctctcagtgtggccagcccctgttcgtgtacaagctggagcaggtgtctgagaagggcaaggcttacaccaactacttcggacggtgcaatgtggccgagcacgaaaagctgatcctgctggcccagctgaagcccgagaaggatagcgacgaagccgtgacatatagcctgggaaagtttgggcagagggccctggatttctacagcattcatgtgaccaaggagtccacccaccccgtgaagcccctggcccagatcgccggaaacagatacgcctccggacctgtgggaaaggccctgagcgacgcatgtatgggcacaatcgcctccttcctgtctaagtaccaggacatcatcatcgaacaccagaaggtggtgaagggcaaccagaagagactggagagcctgcgggagctggccggcaaggaaaacctggaataccctagcgtgaccctgccacctcagcctcacaccaaggagggcgttgatgcctacaacgaagtgatcgcccgggtgcgaatgtgggtgaacctgaacctgtggcagaagctgaagctaagcagagatgatgccaagcctctgctgagactgaagggattcccttcctttcctctggtcgagagacaggccaacgaagtggactggtgggacatggtgtgtaacgtgaagaagctgatcaacgagaaaaaggaggatggcaaggtgttttggcagaatctggctggctacaagagacaggaagccctgagaccatacctgagcagcgaggaagatcggaagaagggaaagaaattcgctcggtaccagctgggcgacctgctgctgcacctggaaaagaagcacggcgaggactggggaaaggtgtacgacgaggcctgggagcggattgacaagaaagtggaaggcctgagcaagcacatcaagctggaagaggaacggagaagcgaggacgcccagagcaaggccgccctgaccgactggctgcgggctaaggccagcttcgtgatcgagggcctgaaggaggccgacaaggacgagttctgcagatgcgagctgaagctgcagaagtggtacggggacctgcggggaaagcccttcgccatcgaagccgagaacagcatcctggacatcagcggcttcagcaagcagtacaactgtgccttcatctggcagaaggacggcgtgaagaagctgaacctgtacctgatcatcaactacttcaagggcggcaagctgcggttcaagaagatcaaacctgaagccttcgaagccaacagattctacaccgtgatcaacaaaaagagcggcgagatcgtgcccatggaggtgaacttcaacttcgacgaccccaacctgatcatcctgcctctggcctttggcaagagacagggcagagaattcatctggaacgacctgctgtccctggaaaccggcagcctgaagctggccaacggaagagtgatcgagaagacactgtacaacagaagaacccggcaggatgagcctgccctgttcgtggccctgaccttcgagcggcgggaggtcctggactcctccaatatcaaaccaatgaacctgatcggcgtggcaagaggcgaaaacatccccgccgtgatcgccctgaccgaccccgagggctgcccactgagccggtttaaggatagcctgggaaacccaacccacatcctgagaatcggcgagagctataaggagaagcagcggaccatccaggccaagaaggaggtggagcagcggagagccggcggctacagccggaagtacgccagcaaagccaagaatctggcagacgatatggtgagaaacaccgctagagatctgctgtactacgccgtgacccaggatgccatgctgatcttcgccaacctgagccggggcttcggccggcagggcaagcggaccttcatggccgagagacagtacacacggatggaggactggctgaccgccaagctggcctacgagggcctgagcaagacctacctgtccaagacactggcccagtacacctccaagacatgcagcaactgtgggtttaccatcaccagcgccgactacgacagggtgctggagaagctgaagaagacagcaacaggctggatgaccacaattaacggcaaggagctgaaggtggagggccagattacctactacaacagatacaagagacagaacgtagtcaaggacctgtccgtcgagctggatagactgagcgaagaatctgtgaacaacgacatctcctcctggacaaagggcagaagcggagaagctctgagcctcctgaagaaaagattctcccatagacccgtgcaggagaagttcgtgtgcctgaactgcggcttcgagacacacgcagccgagcaagccgccctgaacatcgccagatcctggctgttcctgcggagccaggagtacaagaaataccagacaaacaagacaaccggcaacaccgataagagagccttcgtcgagacctggcagtccttttaccggaagaagcttaaggaggtgtggaaacctgccgtgcggtctggcggatctggcggaggctccaccagccccaagaaaaagagaaaagtctaagctgccttctgcggggcttgccttctggccatgcccttcttctctcccttgcacctgtacctcttggtctttgaataaagcctgagtaggaaggctagcaaaaaaaaaaaaaaaaaaaaaaaaaaaaaaaaaaaaaaaaaaaaaaaaaaaaaaaaaaaaaaaaaaaaaaaaaaaaaaaa

SEQ ID NO: 13414 - RNA, 5785 nt, synthetic construct
  source 1..5785: mol_type = other RNA
aggaaataagagagaaaagaagagtaagaagaaatataagagccaccatggcccctaagaagaagcgtaaagtgagccggatggaacgcctcgtctacgaggtgcggcagaagtgcagaaacatcgaggacatctgcatctcctgcggatctctgaacgtgaccctggagcacccactgttcatcggcggcatgtgccagaactgtaaaaactgttttctggagtgtgcctatcaatacgacgatgacggctaccagagctactgcaccatctgttgcggcggaagagaggtgctgatgtgtggaaataacaactgctgccggtgcttctgcgtggaatgcgtggacctgctggtgggccccggcgccgcccaggccgctattaaggaagatccttggaactgctacatgtgcggccacaagggcacatacggcctgctgagacggagagaggactggcctagcagactgcagatgttcttcgccaataaccacgaccaggagttcgacccccctaaggtgtaccctcccgtccccgccgagaagagaaagcccatccgggtcctgagcctgttcgatggcatcgccaccggtctgctggtgctgaaggacctgggcatccaggtggataggtacattgcctccgaggtgtgcgaggactccatcaccgtgggaatggtgcgtcatcagggcaagatcatgtacgtgggcgacgtgcggagcgtgacacagaagcatatccaggagtggggccctttcgacctggtgatcggcggcagcccttgcaatgacctgagcatcgtgaacccagcccggaagggcctgtacgagggaaccggcagactgttcttcgagttttacagactgctgcacgacgcccggcctaaggaaggcgacgaccggcccttcttttggctgttcgagaatgtggtggccatgggagtcagcgacaagcgggatattagccggttcctggagagcaaccccgtgatgatcgatgccaaggaagtgagcgccgcccaccgggccagatacttctggggcaatctgcctggcatgaacagacccctggccagcaccgtgaacgacaagctggagctgcaggagtgcctggagcacggccggatcgccaagttcagcaaggtgagaaccatcaccacccgaagcaacagcatcaaacaaggcaaggaccagcactttcctgtgttcatgaacgagaaggaggacatcctgtggtgtaccgagatggagagagtgttcgggttcccagtccactacacagatgtcagcaacatgtctagactggccagacagagactgctgggaagaagctggtccgtccctgtgatcagacacctgttcgcccctctgaaggagtacttcgcctgcgtgagcagcggcaacagcaacgccaacagccggggccccagcttctctagcggcctggtgccactgtccctgagagggagccacatgggccccatggagatctacaaaaccgtgagcgcctggaagcggcagcctgtgcgcgtgctgagcctgtttcggaatatcgataaagtcctgaaaagcctgggattcctggagagcggctctggctccggcggtggcaccctgaagtacgtggaggatgtgacaaacgtggtcagacgggatgtggagaagtggggccccttcgatctggtgtacggcagcacccaacccctgggcagctcttgtgaccggtgccctggctggtacatgtttcagttccaccggatcctgcagtacgccctgccgagacaggagtcccagcggccattcttttggattttcatggacaacttgctgctgaccgaggatgaccaggaaactaccactcggttcctgcagaccgaagccgtgaccctgcaggacgtgagaggccgggactaccagaacgccatgcgggtgtggtccaacatccctggactgaaaagcaagcacgcacctctgacccctaaagaagaggagtacctgcaggcccaggtgcggagcagaagcaagctggacgcccctaaggtggatctgctggtgaagaattgcctcctgcccctgagagagtacttcaagtatttcagccagaatagtctgcccctgggaggcagcggcggcggcccccaggagcccgtgaccttcgaggacgtggccgtgtacttcacccagaaccagtgggccagcctggaccccacccagagggccctgtacagggaggtgatgctggagaactacgccagcgtggccagcctggtgttccccttccccaagcccgacctggtgagccagctggagagggaggaggccccctggggccccgacccctgggaggccgaggtgctgaggggcatctgccccggcggcggcggcccaagcagcggcgcccctcctcccagcggcggcagcccagccggctccccaacctctaccgaggagggcacctctgagtccgccacccccgagagcggccctggcacctccaccgagcccagcgagggcagcgcacccggcagccctgccggcagccccacctccacagaggagggaaccagcaccgagcccagcgaaggcagcgccccaggcaccagcaccgagcctagtgagcaggagattaaacggatcaacaagatcagaagaagacttgtgaaagacagcaacaccaagaaggccggcaagacaggccccatgaaaaccctgctggttagagtgatgacacccgatctgagagagcggctggaaaacctgagaaagaagcctgaaaatatcccccagcccatcagcaatacatctagagccaacctgaataagctgctgaccgattacaccgaaatgaagaaggcgatcctgcatgtgtactgggaagagttccagaaggaccctgtgggcctgatgagccgggtggcccagcctgccagcaagaagatcgatcagaacaagctgaaacctgagatggacgagaagggcaacctgaccaccgccggctttgcctgctctcagtgtggccagcccctgttcgtgtacaagctggagcaggtgtctgagaagggcaaggcttacaccaactacttcggacggtgcaatgtggccgagcacgaaaagctgatcctgctggcccagctgaagcccgagaaggatagcgacgaagccgtgacatatagcctgggaaagtttgggcagagggccctggatttctacagcattcatgtgaccaaggagtccacccaccccgtgaagcccctggcccagatcgccggaaacagatacgcctccggacctgtgggaaaggccctgagcgacgcatgtatgggcacaatcgcctccttcctgtctaagtaccaggacatcatcatcgaacaccagaaggtggtgaagggcaaccagaagagactggagagcctgcgggagctggccggcaaggaaaacctggaataccctagcgtgaccctgccacctcagcctcacaccaaggagggcgttgatgcctacaacgaagtgatcgcccgggtgcgaatgtgggtgaacctgaacctgtggcagaagctgaagctaagcagagatgatgccaagcctctgctgagactgaagggattcccttcctttcctctggtcgagagacaggccaacgaagtggactggtgggacatggtgtgtaacgtgaagaagctgatcaacgagaaaaaggaggatggcaaggtgttttggcagaatctggctggctacaagagacaggaagccctgagaccatacctgagcagcgaggaagatcggaagaagggaaagaaattcgctcggtaccagctgggcgacctgctgctgcacctggaaaagaagcacggcgaggactggggaaaggtgtacgacgaggcctgggagcggattgacaagaaagtggaaggcctgagcaagcacatcaagctggaagaggaacggagaagcgaggacgcccagagcaaggccgccctgaccgactggctgcgggctaaggccagcttcgtgatcgagggcctgaaggaggccgacaaggacgagttctgcagatgcgagctgaagctgcagaagtggtacggggacctgcggggaaagcccttcgccatcgaagccgagaacagcatcctggacatcagcggcttcagcaagcagtacaactgtgccttcatctggcagaaggacggcgtgaagaagctgaacctgtacctgatcatcaactacttcaagggcggcaagctgcggttcaagaagatcaaacctgaagccttcgaagccaacagattctacaccgtgatcaacaaaaagagcggcgagatcgtgcccatggaggtgaacttcaacttcgacgaccccaacctgatcatcctgcctctggcctttggcaagagacagggcagagaattcatctggaacgacctgctgtccctggaaaccggcagcctgaagctggccaacggaagagtgatcgagaagacactgtacaacagaagaacccggcaggatgagcctgccctgttcgtggccctgaccttcgagcggcgggaggtcctggactcctccaatatcaaaccaatgaacctgatcggcgtggcaagaggcgaaaacatccccgccgtgatcgccctgaccgaccccgagggctgcccactgagccggtttaaggatagcctgggaaacccaacccacatcctgagaatcggcgagagctataaggagaagcagcggaccatccaggccaagaaggaggtggagcagcggagagccggcggctacagccggaagtacgccagcaaagccaagaatctggcagacgatatggtgagaaacaccgctagagatctgctgtactacgccgtgacccaggatgccatgctgatcttcgccaacctgagccggggcttcggccggcagggcaagcggaccttcatggccgagagacagtacacacggatggaggactggctgaccgccaagctggcctacgagggcctgagcaagacctacctgtccaagacactggcccagtacacctccaagacatgcagcaactgtgggtttaccatcaccagcgccgactacgacagggtgctggagaagctgaagaagacagcaacaggctggatgaccacaattaacggcaaggagctgaaggtggagggccagattacctactacaacagatacaagagacagaacgtagtcaaggacctgtccgtcgagctggatagactgagcgaagaatctgtgaacaacgacatctcctcctggacaaagggcagaagcggagaagctctgagcctcctgaagaaaagattctcccatagacccgtgcaggagaagttcgtgtgcctgaactgcggcttcgagacacacgcagccgagcaagccgccctgaacatcgccagatcctggctgttcctgcggagccaggagtacaagaaataccagacaaacaagacaaccggcaacaccgataagagagccttcgtcgagacctggcagtccttttaccggaagaagcttaaggaggtgtggaaacctgccgtgcggtctggcggatctggcggaggctccaccagccccaagaaaaagagaaaagtctaagctgccttctgcggggcttgccttctggccatgcccttcttctctcccttgcacctgtacctcttggtctttgaataaagcctgagtaggaaggctagcaaaaaaaaaaaaaaaaaaaaaaaaaaaaaaaaaaaaaaaaaaaaaaaaaaaaaaaaaaaaaaaaaaaaaaaaaaaaaaaa

SEQ ID NO: 13415 - RNA, 5785 nt, synthetic construct
  source 1..5785: mol_type = other RNA
aggaaataagagagaaaagaagagtaagaagaaatataagagccaccatggcccctaagaagaagcgtaaagtgagccggatggaacgcctcgtctacgaggtgcggcagaagtgcagaaacatcgaggacatctgcatctcctgcggatctctgaacgtgaccctggagcacccactgttcatcggcggcatgtgccagaactgtaaaaactgttttctggagtgtgcctatcaatacgacgatgacggctaccagagctactgcaccatctgttgcggcggaagagaggtgctgatgtgtggaaataacaactgctgccggtgcttctgcgtggaatgcgtggacctgctggtgggccccggcgccgcccaggccgctattaaggaagatccttggaactgctacatgtgcggccacaagggcacatacggcctgctgagacggagagaggactggcctagcagactgcagatgttcttcgccaataaccacgaccaggagttcgacccccctaaggtgtaccctcccgtccccgccgagaagagaaagcccatccgggtcctgagcctgttcgatggcatcgccaccggtctgctggtgctgaaggacctgggcatccaggtggataggtacattgcctccgaggtgtgcgaggactccatcaccgtgggaatggtgcgtcatcagggcaagatcatgtacgtgggcgacgtgcggagcgtgacacagaagcatatccaggagtggggccctttcgacctggtgatcggcggcagcccttgcaatgacctgagcatcgtgaacccagcccggaagggcctgtacgagggaaccggcagactgttcttcgagttttacagactgctgcacgacgcccggcctaaggaaggcgacgaccggcccttcttttggctgttcgagaatgtggtggccatgggagtcagcgacaagcgggatattagccggttcctggagagcaaccccgtgatgatcgatgccaaggaagtgagcgccgcccaccgggccagatacttctggggcaatctgcctggcatgaacagacccctggccagcaccgtgaacgacaagctggagctgcaggagtgcctggagcacggccggatcgccaagttcagcaaggtgagaaccatcaccacccgaagcaacagcatcaaacaaggcaaggaccagcactttcctgtgttcatgaacgagaaggaggacatcctgtggtgtaccgagatggagagagtgttcgggttcccagtccactacacagatgtcagcaacatgtctagactggccagacagagactgctgggaagaagctggtccgtccctgtgatcagacacctgttcgcccctctgaaggagtacttcgcctgcgtgagcagcggcaacagcaacgccaacagccggggccccagcttctctagcggcctggtgccactgtccctgagagggagccacatgggccccatggagatctacaaaaccgtgagcgcctggaagcggcagcctgtgcgcgtgctgagcctgtttcggaatatcgataaagtcctgaaaagcctgggattcctggagagcggctctggctccggcggtggcaccctgaagtacgtggaggatgtgacaaacgtggtcagacgggatgtggagaagtggggccccttcgatctggtgtacggcagcacccaacccctgggcagctcttgtgaccggtgccctggctggtacatgtttcagttccaccggatcctgcagtacgccctgccgagacaggagtcccagcggccattcttttggattttcatggacaacttgctgctgaccgaggatgaccaggaaactaccactcggttcctgcagaccgaagccgtgaccctgcaggacgtgagaggccgggactaccagaacgccatgcgggtgtggtccaacatccctggactgaaaagcaagcacgcacctctgacccctaaagaagaggagtacctgcaggcccaggtgcggagcagaagcaagctggacgcccctaaggtggatctgctggtgaagaattgcctcctgcccctgagagagtacttcaagtatttcagccagaatagtctgcccctgggaggcagcggcggcggccccaaggtgcccgtgaccttcgacgacgtggccgtgtacttcagcgagagcgagtggggcaggctggacaagtggcagaaggagctgtacaagcacgtgatgaggggcaactacgagatgctggtgagcctggactacgccatcagcaagcccgacatcctgaccaggatggagaggggcgaggagccctgccccgacggcccctggggccccgaggagggcaaggagagggaggccgccaggggcggcccaagcagcggcgcccctcctcccagcggcggcagcccagccggctccccaacctctaccgaggagggcacctctgagtccgccacccccgagagcggccctggcacctccaccgagcccagcgagggcagcgcacccggcagccctgccggcagccccacctccacagaggagggaaccagcaccgagcccagcgaaggcagcgccccaggcaccagcaccgagcctagtgagcaggagattaaacggatcaacaagatcagaagaagacttgtgaaagacagcaacaccaagaaggccggcaagacaggccccatgaaaaccctgctggttagagtgatgacacccgatctgagagagcggctggaaaacctgagaaagaagcctgaaaatatcccccagcccatcagcaatacatctagagccaacctgaataagctgctgaccgattacaccgaaatgaagaaggcgatcctgcatgtgtactgggaagagttccagaaggaccctgtgggcctgatgagccgggtggcccagcctgccagcaagaagatcgatcagaacaagctgaaacctgagatggacgagaagggcaacctgaccaccgccggctttgcctgctctcagtgtggccagcccctgttcgtgtacaagctggagcaggtgtctgagaagggcaaggcttacaccaactacttcggacggtgcaatgtggccgagcacgaaaagctgatcctgctggcccagctgaagcccgagaaggatagcgacgaagccgtgacatatagcctgggaaagtttgggcagagggccctggatttctacagcattcatgtgaccaaggagtccacccaccccgtgaagcccctggcccagatcgccggaaacagatacgcctccggacctgtgggaaaggccctgagcgacgcatgtatgggcacaatcgcctccttcctgtctaagtaccaggacatcatcatcgaacaccagaaggtggtgaagggcaaccagaagagactggagagcctgcgggagctggccggcaaggaaaacctggaataccctagcgtgaccctgccacctcagcctcacaccaaggagggcgttgatgcctacaacgaagtgatcgcccgggtgcgaatgtgggtgaacctgaacctgtggcagaagctgaagctaagcagagatgatgccaagcctctgctgagactgaagggattcccttcctttcctctggtcgagagacaggccaacgaagtggactggtgggacatggtgtgtaacgtgaagaagctgatcaacgagaaaaaggaggatggcaaggtgttttggcagaatctggctggctacaagagacaggaagccctgagaccatacctgagcagcgaggaagatcggaagaagggaaagaaattcgctcggtaccagctgggcgacctgctgctgcacctggaaaagaagcacggcgaggactggggaaaggtgtacgacgaggcctgggagcggattgacaagaaagtggaaggcctgagcaagcacatcaagctggaagaggaacggagaagcgaggacgcccagagcaaggccgccctgaccgactggctgcgggctaaggccagcttcgtgatcgagggcctgaaggaggccgacaaggacgagttctgcagatgcgagctgaagctgcagaagtggtacggggacctgcggggaaagcccttcgccatcgaagccgagaacagcatcctggacatcagcggcttcagcaagcagtacaactgtgccttcatctggcagaaggacggcgtgaagaagctgaacctgtacctgatcatcaactacttcaagggcggcaagctgcggttcaagaagatcaaacctgaagccttcgaagccaacagattctacaccgtgatcaacaaaaagagcggcgagatcgtgcccatggaggtgaacttcaacttcgacgaccccaacctgatcatcctgcctctggcctttggcaagagacagggcagagaattcatctggaacgacctgctgtccctggaaaccggcagcctgaagctggccaacggaagagtgatcgagaagacactgtacaacagaagaacccggcaggatgagcctgccctgttcgtggccctgaccttcgagcggcgggaggtcctggactcctccaatatcaaaccaatgaacctgatcggcgtggcaagaggcgaaaacatccccgccgtgatcgccctgaccgaccccgagggctgcccactgagccggtttaaggatagcctgggaaacccaacccacatcctgagaatcggcgagagctataaggagaagcagcggaccatccaggccaagaaggaggtggagcagcggagagccggcggctacagccggaagtacgccagcaaagccaagaatctggcagacgatatggtgagaaacaccgctagagatctgctgtactacgccgtgacccaggatgccatgctgatcttcgccaacctgagccggggcttcggccggcagggcaagcggaccttcatggccgagagacagtacacacggatggaggactggctgaccgccaagctggcctacgagggcctgagcaagacctacctgtccaagacactggcccagtacacctccaagacatgcagcaactgtgggtttaccatcaccagcgccgactacgacagggtgctggagaagctgaagaagacagcaacaggctggatgaccacaattaacggcaaggagctgaaggtggagggccagattacctactacaacagatacaagagacagaacgtagtcaaggacctgtccgtcgagctggatagactgagcgaagaatctgtgaacaacgacatctcctcctggacaaagggcagaagcggagaagctctgagcctcctgaagaaaagattctcccatagacccgtgcaggagaagttcgtgtgcctgaactgcggcttcgagacacacgcagccgagcaagccgccctgaacatcgccagatcctggctgttcctgcggagccaggagtacaagaaataccagacaaacaagacaaccggcaacaccgataagagagccttcgtcgagacctggcagtccttttaccggaagaagcttaaggaggtgtggaaacctgccgtgcggtctggcggatctggcggaggctccaccagccccaagaaaaagagaaaagtctaagctgccttctgcggggcttgccttctggccatgcccttcttctctcccttgcacctgtacctcttggtctttgaataaagcctgagtaggaaggctagcaaaaaaaaaaaaaaaaaaaaaaaaaaaaaaaaaaaaaaaaaaaaaaaaaaaaaaaaaaaaaaaaaaaaaaaaaaaaaaaa

SEQ ID NO: 13416 - RNA, 5785 nt, synthetic construct
  source 1..5785: mol_type = other RNA
aggaaataagagagaaaagaagagtaagaagaaatataagagccaccatggcccctaagaagaagcgtaaagtgagccggatggaacgcctcgtctacgaggtgcggcagaagtgcagaaacatcgaggacatctgcatctcctgcggatctctgaacgtgaccctggagcacccactgttcatcggcggcatgtgccagaactgtaaaaactgttttctggagtgtgcctatcaatacgacgatgacggctaccagagctactgcaccatctgttgcggcggaagagaggtgctgatgtgtggaaataacaactgctgccggtgcttctgcgtggaatgcgtggacctgctggtgggccccggcgccgcccaggccgctattaaggaagatccttggaactgctacatgtgcggccacaagggcacatacggcctgctgagacggagagaggactggcctagcagactgcagatgttcttcgccaataaccacgaccaggagttcgacccccctaaggtgtaccctcccgtccccgccgagaagagaaagcccatccgggtcctgagcctgttcgatggcatcgccaccggtctgctggtgctgaaggacctgggcatccaggtggataggtacattgcctccgaggtgtgcgaggactccatcaccgtgggaatggtgcgtcatcagggcaagatcatgtacgtgggcgacgtgcggagcgtgacacagaagcatatccaggagtggggccctttcgacctggtgatcggcggcagcccttgcaatgacctgagcatcgtgaacccagcccggaagggcctgtacgagggaaccggcagactgttcttcgagttttacagactgctgcacgacgcccggcctaaggaaggcgacgaccggcccttcttttggctgttcgagaatgtggtggccatgggagtcagcgacaagcgggatattagccggttcctggagagcaaccccgtgatgatcgatgccaaggaagtgagcgccgcccaccgggccagatacttctggggcaatctgcctggcatgaacagacccctggccagcaccgtgaacgacaagctggagctgcaggagtgcctggagcacggccggatcgccaagttcagcaaggtgagaaccatcaccacccgaagcaacagcatcaaacaaggcaaggaccagcactttcctgtgttcatgaacgagaaggaggacatcctgtggtgtaccgagatggagagagtgttcgggttcccagtccactacacagatgtcagcaacatgtctagactggccagacagagactgctgggaagaagctggtccgtccctgtgatcagacacctgttcgcccctctgaaggagtacttcgcctgcgtgagcagcggcaacagcaacgccaacagccggggccccagcttctctagcggcctggtgccactgtccctgagagggagccacatgggccccatggagatctacaaaaccgtgagcgcctggaagcggcagcctgtgcgcgtgctgagcctgtttcggaatatcgataaagtcctgaaaagcctgggattcctggagagcggctctggctccggcggtggcaccctgaagtacgtggaggatgtgacaaacgtggtcagacgggatgtggagaagtggggccccttcgatctggtgtacggcagcacccaacccctgggcagctcttgtgaccggtgccctggctggtacatgtttcagttccaccggatcctgcagtacgccctgccgagacaggagtcccagcggccattcttttggattttcatggacaacttgctgctgaccgaggatgaccaggaaactaccactcggttcctgcagaccgaagccgtgaccctgcaggacgtgagaggccgggactaccagaacgccatgcgggtgtggtccaacatccctggactgaaaagcaagcacgcacctctgacccctaaagaagaggagtacctgcaggcccaggtgcggagcagaagcaagctggacgcccctaaggtggatctgctggtgaagaattgcctcctgcccctgagagagtacttcaagtatttcagccagaatagtctgcccctgggaggcagcggcggcggctgcaacatgagcctgagcttcagcgacgtggccgtggacctgagccaggaggagtgggagtgcatgagccccgcccagagggccctgtacagggacgtgatgctggagaactacagcaacctggtgagcctgggctgcagcacccccaagcccgacatgatcaccctgctggagcaggagaaggagccctggatgatcctgagggagggcaccggcagctggttcaccgacctggagagcgagggcggcccaagcagcggcgcccctcctcccagcggcggcagcccagccggctccccaacctctaccgaggagggcacctctgagtccgccacccccgagagcggccctggcacctccaccgagcccagcgagggcagcgcacccggcagccctgccggcagccccacctccacagaggagggaaccagcaccgagcccagcgaaggcagcgccccaggcaccagcaccgagcctagtgagcaggagattaaacggatcaacaagatcagaagaagacttgtgaaagacagcaacaccaagaaggccggcaagacaggccccatgaaaaccctgctggttagagtgatgacacccgatctgagagagcggctggaaaacctgagaaagaagcctgaaaatatcccccagcccatcagcaatacatctagagccaacctgaataagctgctgaccgattacaccgaaatgaagaaggcgatcctgcatgtgtactgggaagagttccagaaggaccctgtgggcctgatgagccgggtggcccagcctgccagcaagaagatcgatcagaacaagctgaaacctgagatggacgagaagggcaacctgaccaccgccggctttgcctgctctcagtgtggccagcccctgttcgtgtacaagctggagcaggtgtctgagaagggcaaggcttacaccaactacttcggacggtgcaatgtggccgagcacgaaaagctgatcctgctggcccagctgaagcccgagaaggatagcgacgaagccgtgacatatagcctgggaaagtttgggcagagggccctggatttctacagcattcatgtgaccaaggagtccacccaccccgtgaagcccctggcccagatcgccggaaacagatacgcctccggacctgtgggaaaggccctgagcgacgcatgtatgggcacaatcgcctccttcctgtctaagtaccaggacatcatcatcgaacaccagaaggtggtgaagggcaaccagaagagactggagagcctgcgggagctggccggcaaggaaaacctggaataccctagcgtgaccctgccacctcagcctcacaccaaggagggcgttgatgcctacaacgaagtgatcgcccgggtgcgaatgtgggtgaacctgaacctgtggcagaagctgaagctaagcagagatgatgccaagcctctgctgagactgaagggattcccttcctttcctctggtcgagagacaggccaacgaagtggactggtgggacatggtgtgtaacgtgaagaagctgatcaacgagaaaaaggaggatggcaaggtgttttggcagaatctggctggctacaagagacaggaagccctgagaccatacctgagcagcgaggaagatcggaagaagggaaagaaattcgctcggtaccagctgggcgacctgctgctgcacctggaaaagaagcacggcgaggactggggaaaggtgtacgacgaggcctgggagcggattgacaagaaagtggaaggcctgagcaagcacatcaagctggaagaggaacggagaagcgaggacgcccagagcaaggccgccctgaccgactggctgcgggctaaggccagcttcgtgatcgagggcctgaaggaggccgacaaggacgagttctgcagatgcgagctgaagctgcagaagtggtacggggacctgcggggaaagcccttcgccatcgaagccgagaacagcatcctggacatcagcggcttcagcaagcagtacaactgtgccttcatctggcagaaggacggcgtgaagaagctgaacctgtacctgatcatcaactacttcaagggcggcaagctgcggttcaagaagatcaaacctgaagccttcgaagccaacagattctacaccgtgatcaacaaaaagagcggcgagatcgtgcccatggaggtgaacttcaacttcgacgaccccaacctgatcatcctgcctctggcctttggcaagagacagggcagagaattcatctggaacgacctgctgtccctggaaaccggcagcctgaagctggccaacggaagagtgatcgagaagacactgtacaacagaagaacccggcaggatgagcctgccctgttcgtggccctgaccttcgagcggcgggaggtcctggactcctccaatatcaaaccaatgaacctgatcggcgtggcaagaggcgaaaacatccccgccgtgatcgccctgaccgaccccgagggctgcccactgagccggtttaaggatagcctgggaaacccaacccacatcctgagaatcggcgagagctataaggagaagcagcggaccatccaggccaagaaggaggtggagcagcggagagccggcggctacagccggaagtacgccagcaaagccaagaatctggcagacgatatggtgagaaacaccgctagagatctgctgtactacgccgtgacccaggatgccatgctgatcttcgccaacctgagccggggcttcggccggcagggcaagcggaccttcatggccgagagacagtacacacggatggaggactggctgaccgccaagctggcctacgagggcctgagcaagacctacctgtccaagacactggcccagtacacctccaagacatgcagcaactgtgggtttaccatcaccagcgccgactacgacagggtgctggagaagctgaagaagacagcaacaggctggatgaccacaattaacggcaaggagctgaaggtggagggccagattacctactacaacagatacaagagacagaacgtagtcaaggacctgtccgtcgagctggatagactgagcgaagaatctgtgaacaacgacatctcctcctggacaaagggcagaagcggagaagctctgagcctcctgaagaaaagattctcccatagacccgtgcaggagaagttcgtgtgcctgaactgcggcttcgagacacacgcagccgagcaagccgccctgaacatcgccagatcctggctgttcctgcggagccaggagtacaagaaataccagacaaacaagacaaccggcaacaccgataagagagccttcgtcgagacctggcagtccttttaccggaagaagcttaaggaggtgtggaaacctgccgtgcggtctggcggatctggcggaggctccaccagccccaagaaaaagagaaaagtctaagctgccttctgcggggcttgccttctggccatgcccttcttctctcccttgcacctgtacctcttggtctttgaataaagcctgagtaggaaggctagcaaaaaaaaaaaaaaaaaaaaaaaaaaaaaaaaaaaaaaaaaaaaaaaaaaaaaaaaaaaaaaaaaaaaaaaaaaaaaaaa

SEQ ID NO: 13417 - RNA, 5785 nt, synthetic construct
  source 1..5785: mol_type = other RNA
aggaaataagagagaaaagaagagtaagaagaaatataagagccaccatggcccctaagaagaagcgtaaagtgagccggatggaacgcctcgtctacgaggtgcggcagaagtgcagaaacatcgaggacatctgcatctcctgcggatctctgaacgtgaccctggagcacccactgttcatcggcggcatgtgccagaactgtaaaaactgttttctggagtgtgcctatcaatacgacgatgacggctaccagagctactgcaccatctgttgcggcggaagagaggtgctgatgtgtggaaataacaactgctgccggtgcttctgcgtggaatgcgtggacctgctggtgggccccggcgccgcccaggccgctattaaggaagatccttggaactgctacatgtgcggccacaagggcacatacggcctgctgagacggagagaggactggcctagcagactgcagatgttcttcgccaataaccacgaccaggagttcgacccccctaaggtgtaccctcccgtccccgccgagaagagaaagcccatccgggtcctgagcctgttcgatggcatcgccaccggtctgctggtgctgaaggacctgggcatccaggtggataggtacattgcctccgaggtgtgcgaggactccatcaccgtgggaatggtgcgtcatcagggcaagatcatgtacgtgggcgacgtgcggagcgtgacacagaagcatatccaggagtggggccctttcgacctggtgatcggcggcagcccttgcaatgacctgagcatcgtgaacccagcccggaagggcctgtacgagggaaccggcagactgttcttcgagttttacagactgctgcacgacgcccggcctaaggaaggcgacgaccggcccttcttttggctgttcgagaatgtggtggccatgggagtcagcgacaagcgggatattagccggttcctggagagcaaccccgtgatgatcgatgccaaggaagtgagcgccgcccaccgggccagatacttctggggcaatctgcctggcatgaacagacccctggccagcaccgtgaacgacaagctggagctgcaggagtgcctggagcacggccggatcgccaagttcagcaaggtgagaaccatcaccacccgaagcaacagcatcaaacaaggcaaggaccagcactttcctgtgttcatgaacgagaaggaggacatcctgtggtgtaccgagatggagagagtgttcgggttcccagtccactacacagatgtcagcaacatgtctagactggccagacagagactgctgggaagaagctggtccgtccctgtgatcagacacctgttcgcccctctgaaggagtacttcgcctgcgtgagcagcggcaacagcaacgccaacagccggggccccagcttctctagcggcctggtgccactgtccctgagagggagccacatgggccccatggagatctacaaaaccgtgagcgcctggaagcggcagcctgtgcgcgtgctgagcctgtttcggaatatcgataaagtcctgaaaagcctgggattcctggagagcggctctggctccggcggtggcaccctgaagtacgtggaggatgtgacaaacgtggtcagacgggatgtggagaagtggggccccttcgatctggtgtacggcagcacccaacccctgggcagctcttgtgaccggtgccctggctggtacatgtttcagttccaccggatcctgcagtacgccctgccgagacaggagtcccagcggccattcttttggattttcatggacaacttgctgctgaccgaggatgaccaggaaactaccactcggttcctgcagaccgaagccgtgaccctgcaggacgtgagaggccgggactaccagaacgccatgcgggtgtggtccaacatccctggactgaaaagcaagcacgcacctctgacccctaaagaagaggagtacctgcaggcccaggtgcggagcagaagcaagctggacgcccctaaggtggatctgctggtgaagaattgcctcctgcccctgagagagtacttcaagtatttcagccagaatagtctgcccctgggaggcagcggcggcggcgagcccggcgccgtgagcttcgccgacgtggccgtgtacttctgcagggaggagtggggctgcctgaggcccgcccagagggccctgtacagggacgtgatgagggagacctacggccacctgagcgccctgggcatcggcggcaacaagcccgccctgatcagctgggtggaggaggaggccgagctgtggggccccgccgcccaggaccccgaggtggccaagtgccagacccagaccgacggcggcccaagcagcggcgcccctcctcccagcggcggcagcccagccggctccccaacctctaccgaggagggcacctctgagtccgccacccccgagagcggccctggcacctccaccgagcccagcgagggcagcgcacccggcagccctgccggcagccccacctccacagaggagggaaccagcaccgagcccagcgaaggcagcgccccaggcaccagcaccgagcctagtgagcaggagattaaacggatcaacaagatcagaagaagacttgtgaaagacagcaacaccaagaaggccggcaagacaggccccatgaaaaccctgctggttagagtgatgacacccgatctgagagagcggctggaaaacctgagaaagaagcctgaaaatatcccccagcccatcagcaatacatctagagccaacctgaataagctgctgaccgattacaccgaaatgaagaaggcgatcctgcatgtgtactgggaagagttccagaaggaccctgtgggcctgatgagccgggtggcccagcctgccagcaagaagatcgatcagaacaagctgaaacctgagatggacgagaagggcaacctgaccaccgccggctttgcctgctctcagtgtggccagcccctgttcgtgtacaagctggagcaggtgtctgagaagggcaaggcttacaccaactacttcggacggtgcaatgtggccgagcacgaaaagctgatcctgctggcccagctgaagcccgagaaggatagcgacgaagccgtgacatatagcctgggaaagtttgggcagagggccctggatttctacagcattcatgtgaccaaggagtccacccaccccgtgaagcccctggcccagatcgccggaaacagatacgcctccggacctgtgggaaaggccctgagcgacgcatgtatgggcacaatcgcctccttcctgtctaagtaccaggacatcatcatcgaacaccagaaggtggtgaagggcaaccagaagagactggagagcctgcgggagctggccggcaaggaaaacctggaataccctagcgtgaccctgccacctcagcctcacaccaaggagggcgttgatgcctacaacgaagtgatcgcccgggtgcgaatgtgggtgaacctgaacctgtggcagaagctgaagctaagcagagatgatgccaagcctctgctgagactgaagggattcccttcctttcctctggtcgagagacaggccaacgaagtggactggtgggacatggtgtgtaacgtgaagaagctgatcaacgagaaaaaggaggatggcaaggtgttttggcagaatctggctggctacaagagacaggaagccctgagaccatacctgagcagcgaggaagatcggaagaagggaaagaaattcgctcggtaccagctgggcgacctgctgctgcacctggaaaagaagcacggcgaggactggggaaaggtgtacgacgaggcctgggagcggattgacaagaaagtggaaggcctgagcaagcacatcaagctggaagaggaacggagaagcgaggacgcccagagcaaggccgccctgaccgactggctgcgggctaaggccagcttcgtgatcgagggcctgaaggaggccgacaaggacgagttctgcagatgcgagctgaagctgcagaagtggtacggggacctgcggggaaagcccttcgccatcgaagccgagaacagcatcctggacatcagcggcttcagcaagcagtacaactgtgccttcatctggcagaaggacggcgtgaagaagctgaacctgtacctgatcatcaactacttcaagggcggcaagctgcggttcaagaagatcaaacctgaagccttcgaagccaacagattctacaccgtgatcaacaaaaagagcggcgagatcgtgcccatggaggtgaacttcaacttcgacgaccccaacctgatcatcctgcctctggcctttggcaagagacagggcagagaattcatctggaacgacctgctgtccctggaaaccggcagcctgaagctggccaacggaagagtgatcgagaagacactgtacaacagaagaacccggcaggatgagcctgccctgttcgtggccctgaccttcgagcggcgggaggtcctggactcctccaatatcaaaccaatgaacctgatcggcgtggcaagaggcgaaaacatccccgccgtgatcgccctgaccgaccccgagggctgcccactgagccggtttaaggatagcctgggaaacccaacccacatcctgagaatcggcgagagctataaggagaagcagcggaccatccaggccaagaaggaggtggagcagcggagagccggcggctacagccggaagtacgccagcaaagccaagaatctggcagacgatatggtgagaaacaccgctagagatctgctgtactacgccgtgacccaggatgccatgctgatcttcgccaacctgagccggggcttcggccggcagggcaagcggaccttcatggccgagagacagtacacacggatggaggactggctgaccgccaagctggcctacgagggcctgagcaagacctacctgtccaagacactggcccagtacacctccaagacatgcagcaactgtgggtttaccatcaccagcgccgactacgacagggtgctggagaagctgaagaagacagcaacaggctggatgaccacaattaacggcaaggagctgaaggtggagggccagattacctactacaacagatacaagagacagaacgtagtcaaggacctgtccgtcgagctggatagactgagcgaagaatctgtgaacaacgacatctcctcctggacaaagggcagaagcggagaagctctgagcctcctgaagaaaagattctcccatagacccgtgcaggagaagttcgtgtgcctgaactgcggcttcgagacacacgcagccgagcaagccgccctgaacatcgccagatcctggctgttcctgcggagccaggagtacaagaaataccagacaaacaagacaaccggcaacaccgataagagagccttcgtcgagacctggcagtccttttaccggaagaagcttaaggaggtgtggaaacctgccgtgcggtctggcggatctggcggaggctccaccagccccaagaaaaagagaaaagtctaagctgccttctgcggggcttgccttctggccatgcccttcttctctcccttgcacctgtacctcttggtctttgaataaagcctgagtaggaaggctagcaaaaaaaaaaaaaaaaaaaaaaaaaaaaaaaaaaaaaaaaaaaaaaaaaaaaaaaaaaaaaaaaaaaaaaaaaaaaaaaa

SEQ ID NO: 13418 - RNA, 5785 nt, synthetic construct
  source 1..5785: mol_type = other RNA
aggaaataagagagaaaagaagagtaagaagaaatataagagccaccatggcccctaagaagaagcgtaaagtgagccggatggaacgcctcgtctacgaggtgcggcagaagtgcagaaacatcgaggacatctgcatctcctgcggatctctgaacgtgaccctggagcacccactgttcatcggcggcatgtgccagaactgtaaaaactgttttctggagtgtgcctatcaatacgacgatgacggctaccagagctactgcaccatctgttgcggcggaagagaggtgctgatgtgtggaaataacaactgctgccggtgcttctgcgtggaatgcgtggacctgctggtgggccccggcgccgcccaggccgctattaaggaagatccttggaactgctacatgtgcggccacaagggcacatacggcctgctgagacggagagaggactggcctagcagactgcagatgttcttcgccaataaccacgaccaggagttcgacccccctaaggtgtaccctcccgtccccgccgagaagagaaagcccatccgggtcctgagcctgttcgatggcatcgccaccggtctgctggtgctgaaggacctgggcatccaggtggataggtacattgcctccgaggtgtgcgaggactccatcaccgtgggaatggtgcgtcatcagggcaagatcatgtacgtgggcgacgtgcggagcgtgacacagaagcatatccaggagtggggccctttcgacctggtgatcggcggcagcccttgcaatgacctgagcatcgtgaacccagcccggaagggcctgtacgagggaaccggcagactgttcttcgagttttacagactgctgcacgacgcccggcctaaggaaggcgacgaccggcccttcttttggctgttcgagaatgtggtggccatgggagtcagcgacaagcgggatattagccggttcctggagagcaaccccgtgatgatcgatgccaaggaagtgagcgccgcccaccgggccagatacttctggggcaatctgcctggcatgaacagacccctggccagcaccgtgaacgacaagctggagctgcaggagtgcctggagcacggccggatcgccaagttcagcaaggtgagaaccatcaccacccgaagcaacagcatcaaacaaggcaaggaccagcactttcctgtgttcatgaacgagaaggaggacatcctgtggtgtaccgagatggagagagtgttcgggttcccagtccactacacagatgtcagcaacatgtctagactggccagacagagactgctgggaagaagctggtccgtccctgtgatcagacacctgttcgcccctctgaaggagtacttcgcctgcgtgagcagcggcaacagcaacgccaacagccggggccccagcttctctagcggcctggtgccactgtccctgagagggagccacatgggccccatggagatctacaaaaccgtgagcgcctggaagcggcagcctgtgcgcgtgctgagcctgtttcggaatatcgataaagtcctgaaaagcctgggattcctggagagcggctctggctccggcggtggcaccctgaagtacgtggaggatgtgacaaacgtggtcagacgggatgtggagaagtggggccccttcgatctggtgtacggcagcacccaacccctgggcagctcttgtgaccggtgccctggctggtacatgtttcagttccaccggatcctgcagtacgccctgccgagacaggagtcccagcggccattcttttggattttcatggacaacttgctgctgaccgaggatgaccaggaaactaccactcggttcctgcagaccgaagccgtgaccctgcaggacgtgagaggccgggactaccagaacgccatgcgggtgtggtccaacatccctggactgaaaagcaagcacgcacctctgacccctaaagaagaggagtacctgcaggcccaggtgcggagcagaagcaagctggacgcccctaaggtggatctgctggtgaagaattgcctcctgcccctgagagagtacttcaagtatttcagccagaatagtctgcccctgggaggcagcggcggcggcttcaagggccccgtgaccttcaaggacgtgaccgtggagttcaccaaggaggagtggaagctgctgacccccgcccagaggaccctgtacaaggacgtgatgctggagaactacaaccacctggtgagcgtgggctacagggtgagcaagcccaacctggtgttcaagctgaagcagggcaaggagccctgggtgctggaggtggagttccccaggaggaggtgccccgaggagctgtggaacggcggcccaagcagcggcgcccctcctcccagcggcggcagcccagccggctccccaacctctaccgaggagggcacctctgagtccgccacccccgagagcggccctggcacctccaccgagcccagcgagggcagcgcacccggcagccctgccggcagccccacctccacagaggagggaaccagcaccgagcccagcgaaggcagcgccccaggcaccagcaccgagcctagtgagcaggagattaaacggatcaacaagatcagaagaagacttgtgaaagacagcaacaccaagaaggccggcaagacaggccccatgaaaaccctgctggttagagtgatgacacccgatctgagagagcggctggaaaacctgagaaagaagcctgaaaatatcccccagcccatcagcaatacatctagagccaacctgaataagctgctgaccgattacaccgaaatgaagaaggcgatcctgcatgtgtactgggaagagttccagaaggaccctgtgggcctgatgagccgggtggcccagcctgccagcaagaagatcgatcagaacaagctgaaacctgagatggacgagaagggcaacctgaccaccgccggctttgcctgctctcagtgtggccagcccctgttcgtgtacaagctggagcaggtgtctgagaagggcaaggcttacaccaactacttcggacggtgcaatgtggccgagcacgaaaagctgatcctgctggcccagctgaagcccgagaaggatagcgacgaagccgtgacatatagcctgggaaagtttgggcagagggccctggatttctacagcattcatgtgaccaaggagtccacccaccccgtgaagcccctggcccagatcgccggaaacagatacgcctccggacctgtgggaaaggccctgagcgacgcatgtatgggcacaatcgcctccttcctgtctaagtaccaggacatcatcatcgaacaccagaaggtggtgaagggcaaccagaagagactggagagcctgcgggagctggccggcaaggaaaacctggaataccctagcgtgaccctgccacctcagcctcacaccaaggagggcgttgatgcctacaacgaagtgatcgcccgggtgcgaatgtgggtgaacctgaacctgtggcagaagctgaagctaagcagagatgatgccaagcctctgctgagactgaagggattcccttcctttcctctggtcgagagacaggccaacgaagtggactggtgggacatggtgtgtaacgtgaagaagctgatcaacgagaaaaaggaggatggcaaggtgttttggcagaatctggctggctacaagagacaggaagccctgagaccatacctgagcagcgaggaagatcggaagaagggaaagaaattcgctcggtaccagctgggcgacctgctgctgcacctggaaaagaagcacggcgaggactggggaaaggtgtacgacgaggcctgggagcggattgacaagaaagtggaaggcctgagcaagcacatcaagctggaagaggaacggagaagcgaggacgcccagagcaaggccgccctgaccgactggctgcgggctaaggccagcttcgtgatcgagggcctgaaggaggccgacaaggacgagttctgcagatgcgagctgaagctgcagaagtggtacggggacctgcggggaaagcccttcgccatcgaagccgagaacagcatcctggacatcagcggcttcagcaagcagtacaactgtgccttcatctggcagaaggacggcgtgaagaagctgaacctgtacctgatcatcaactacttcaagggcggcaagctgcggttcaagaagatcaaacctgaagccttcgaagccaacagattctacaccgtgatcaacaaaaagagcggcgagatcgtgcccatggaggtgaacttcaacttcgacgaccccaacctgatcatcctgcctctggcctttggcaagagacagggcagagaattcatctggaacgacctgctgtccctggaaaccggcagcctgaagctggccaacggaagagtgatcgagaagacactgtacaacagaagaacccggcaggatgagcctgccctgttcgtggccctgaccttcgagcggcgggaggtcctggactcctccaatatcaaaccaatgaacctgatcggcgtggcaagaggcgaaaacatccccgccgtgatcgccctgaccgaccccgagggctgcccactgagccggtttaaggatagcctgggaaacccaacccacatcctgagaatcggcgagagctataaggagaagcagcggaccatccaggccaagaaggaggtggagcagcggagagccggcggctacagccggaagtacgccagcaaagccaagaatctggcagacgatatggtgagaaacaccgctagagatctgctgtactacgccgtgacccaggatgccatgctgatcttcgccaacctgagccggggcttcggccggcagggcaagcggaccttcatggccgagagacagtacacacggatggaggactggctgaccgccaagctggcctacgagggcctgagcaagacctacctgtccaagacactggcccagtacacctccaagacatgcagcaactgtgggtttaccatcaccagcgccgactacgacagggtgctggagaagctgaagaagacagcaacaggctggatgaccacaattaacggcaaggagctgaaggtggagggccagattacctactacaacagatacaagagacagaacgtagtcaaggacctgtccgtcgagctggatagactgagcgaagaatctgtgaacaacgacatctcctcctggacaaagggcagaagcggagaagctctgagcctcctgaagaaaagattctcccatagacccgtgcaggagaagttcgtgtgcctgaactgcggcttcgagacacacgcagccgagcaagccgccctgaacatcgccagatcctggctgttcctgcggagccaggagtacaagaaataccagacaaacaagacaaccggcaacaccgataagagagccttcgtcgagacctggcagtccttttaccggaagaagcttaaggaggtgtggaaacctgccgtgcggtctggcggatctggcggaggctccaccagccccaagaaaaagagaaaagtctaagctgccttctgcggggcttgccttctggccatgcccttcttctctcccttgcacctgtacctcttggtctttgaataaagcctgagtaggaaggctagcaaaaaaaaaaaaaaaaaaaaaaaaaaaaaaaaaaaaaaaaaaaaaaaaaaaaaaaaaaaaaaaaaaaaaaaaaaaaaaaa

SEQ ID NO: 13419 - RNA, 5785 nt, synthetic construct
  source 1..5785: mol_type = other RNA
aggaaataagagagaaaagaagagtaagaagaaatataagagccaccatggcccctaagaagaagcgtaaagtgagccggatggaacgcctcgtctacgaggtgcggcagaagtgcagaaacatcgaggacatctgcatctcctgcggatctctgaacgtgaccctggagcacccactgttcatcggcggcatgtgccagaactgtaaaaactgttttctggagtgtgcctatcaatacgacgatgacggctaccagagctactgcaccatctgttgcggcggaagagaggtgctgatgtgtggaaataacaactgctgccggtgcttctgcgtggaatgcgtggacctgctggtgggccccggcgccgcccaggccgctattaaggaagatccttggaactgctacatgtgcggccacaagggcacatacggcctgctgagacggagagaggactggcctagcagactgcagatgttcttcgccaataaccacgaccaggagttcgacccccctaaggtgtaccctcccgtccccgccgagaagagaaagcccatccgggtcctgagcctgttcgatggcatcgccaccggtctgctggtgctgaaggacctgggcatccaggtggataggtacattgcctccgaggtgtgcgaggactccatcaccgtgggaatggtgcgtcatcagggcaagatcatgtacgtgggcgacgtgcggagcgtgacacagaagcatatccaggagtggggccctttcgacctggtgatcggcggcagcccttgcaatgacctgagcatcgtgaacccagcccggaagggcctgtacgagggaaccggcagactgttcttcgagttttacagactgctgcacgacgcccggcctaaggaaggcgacgaccggcccttcttttggctgttcgagaatgtggtggccatgggagtcagcgacaagcgggatattagccggttcctggagagcaaccccgtgatgatcgatgccaaggaagtgagcgccgcccaccgggccagatacttctggggcaatctgcctggcatgaacagacccctggccagcaccgtgaacgacaagctggagctgcaggagtgcctggagcacggccggatcgccaagttcagcaaggtgagaaccatcaccacccgaagcaacagcatcaaacaaggcaaggaccagcactttcctgtgttcatgaacgagaaggaggacatcctgtggtgtaccgagatggagagagtgttcgggttcccagtccactacacagatgtcagcaacatgtctagactggccagacagagactgctgggaagaagctggtccgtccctgtgatcagacacctgttcgcccctctgaaggagtacttcgcctgcgtgagcagcggcaacagcaacgccaacagccggggccccagcttctctagcggcctggtgccactgtccctgagagggagccacatgggccccatggagatctacaaaaccgtgagcgcctggaagcggcagcctgtgcgcgtgctgagcctgtttcggaatatcgataaagtcctgaaaagcctgggattcctggagagcggctctggctccggcggtggcaccctgaagtacgtggaggatgtgacaaacgtggtcagacgggatgtggagaagtggggccccttcgatctggtgtacggcagcacccaacccctgggcagctcttgtgaccggtgccctggctggtacatgtttcagttccaccggatcctgcagtacgccctgccgagacaggagtcccagcggccattcttttggattttcatggacaacttgctgctgaccgaggatgaccaggaaactaccactcggttcctgcagaccgaagccgtgaccctgcaggacgtgagaggccgggactaccagaacgccatgcgggtgtggtccaacatccctggactgaaaagcaagcacgcacctctgacccctaaagaagaggagtacctgcaggcccaggtgcggagcagaagcaagctggacgcccctaaggtggatctgctggtgaagaattgcctcctgcccctgagagagtacttcaagtatttcagccagaatagtctgcccctgggaggcagcggcggcggcgtggccggccccgtgaccttcgaggaggtggccgtgtacttcagcgaggaggagtgggccctgctggaccccggccagagggccctgtacagggacgtgatgcaggagaactacgaggccgtgagctggctgggcttccccgtgagcaagcccggcgagaccagctggctggagagggccggcaagctgcaggagtgggagagcaggagccacgccaacaccgccaggcccaggggcaaccagggcggcccaagcagcggcgcccctcctcccagcggcggcagcccagccggctccccaacctctaccgaggagggcacctctgagtccgccacccccgagagcggccctggcacctccaccgagcccagcgagggcagcgcacccggcagccctgccggcagccccacctccacagaggagggaaccagcaccgagcccagcgaaggcagcgccccaggcaccagcaccgagcctagtgagcaggagattaaacggatcaacaagatcagaagaagacttgtgaaagacagcaacaccaagaaggccggcaagacaggccccatgaaaaccctgctggttagagtgatgacacccgatctgagagagcggctggaaaacctgagaaagaagcctgaaaatatcccccagcccatcagcaatacatctagagccaacctgaataagctgctgaccgattacaccgaaatgaagaaggcgatcctgcatgtgtactgggaagagttccagaaggaccctgtgggcctgatgagccgggtggcccagcctgccagcaagaagatcgatcagaacaagctgaaacctgagatggacgagaagggcaacctgaccaccgccggctttgcctgctctcagtgtggccagcccctgttcgtgtacaagctggagcaggtgtctgagaagggcaaggcttacaccaactacttcggacggtgcaatgtggccgagcacgaaaagctgatcctgctggcccagctgaagcccgagaaggatagcgacgaagccgtgacatatagcctgggaaagtttgggcagagggccctggatttctacagcattcatgtgaccaaggagtccacccaccccgtgaagcccctggcccagatcgccggaaacagatacgcctccggacctgtgggaaaggccctgagcgacgcatgtatgggcacaatcgcctccttcctgtctaagtaccaggacatcatcatcgaacaccagaaggtggtgaagggcaaccagaagagactggagagcctgcgggagctggccggcaaggaaaacctggaataccctagcgtgaccctgccacctcagcctcacaccaaggagggcgttgatgcctacaacgaagtgatcgcccgggtgcgaatgtgggtgaacctgaacctgtggcagaagctgaagctaagcagagatgatgccaagcctctgctgagactgaagggattcccttcctttcctctggtcgagagacaggccaacgaagtggactggtgggacatggtgtgtaacgtgaagaagctgatcaacgagaaaaaggaggatggcaaggtgttttggcagaatctggctggctacaagagacaggaagccctgagaccatacctgagcagcgaggaagatcggaagaagggaaagaaattcgctcggtaccagctgggcgacctgctgctgcacctggaaaagaagcacggcgaggactggggaaaggtgtacgacgaggcctgggagcggattgacaagaaagtggaaggcctgagcaagcacatcaagctggaagaggaacggagaagcgaggacgcccagagcaaggccgccctgaccgactggctgcgggctaaggccagcttcgtgatcgagggcctgaaggaggccgacaaggacgagttctgcagatgcgagctgaagctgcagaagtggtacggggacctgcggggaaagcccttcgccatcgaagccgagaacagcatcctggacatcagcggcttcagcaagcagtacaactgtgccttcatctggcagaaggacggcgtgaagaagctgaacctgtacctgatcatcaactacttcaagggcggcaagctgcggttcaagaagatcaaacctgaagccttcgaagccaacagattctacaccgtgatcaacaaaaagagcggcgagatcgtgcccatggaggtgaacttcaacttcgacgaccccaacctgatcatcctgcctctggcctttggcaagagacagggcagagaattcatctggaacgacctgctgtccctggaaaccggcagcctgaagctggccaacggaagagtgatcgagaagacactgtacaacagaagaacccggcaggatgagcctgccctgttcgtggccctgaccttcgagcggcgggaggtcctggactcctccaatatcaaaccaatgaacctgatcggcgtggcaagaggcgaaaacatccccgccgtgatcgccctgaccgaccccgagggctgcccactgagccggtttaaggatagcctgggaaacccaacccacatcctgagaatcggcgagagctataaggagaagcagcggaccatccaggccaagaaggaggtggagcagcggagagccggcggctacagccggaagtacgccagcaaagccaagaatctggcagacgatatggtgagaaacaccgctagagatctgctgtactacgccgtgacccaggatgccatgctgatcttcgccaacctgagccggggcttcggccggcagggcaagcggaccttcatggccgagagacagtacacacggatggaggactggctgaccgccaagctggcctacgagggcctgagcaagacctacctgtccaagacactggcccagtacacctccaagacatgcagcaactgtgggtttaccatcaccagcgccgactacgacagggtgctggagaagctgaagaagacagcaacaggctggatgaccacaattaacggcaaggagctgaaggtggagggccagattacctactacaacagatacaagagacagaacgtagtcaaggacctgtccgtcgagctggatagactgagcgaagaatctgtgaacaacgacatctcctcctggacaaagggcagaagcggagaagctctgagcctcctgaagaaaagattctcccatagacccgtgcaggagaagttcgtgtgcctgaactgcggcttcgagacacacgcagccgagcaagccgccctgaacatcgccagatcctggctgttcctgcggagccaggagtacaagaaataccagacaaacaagacaaccggcaacaccgataagagagccttcgtcgagacctggcagtccttttaccggaagaagcttaaggaggtgtggaaacctgccgtgcggtctggcggatctggcggaggctccaccagccccaagaaaaagagaaaagtctaagctgccttctgcggggcttgccttctggccatgcccttcttctctcccttgcacctgtacctcttggtctttgaataaagcctgagtaggaaggctagcaaaaaaaaaaaaaaaaaaaaaaaaaaaaaaaaaaaaaaaaaaaaaaaaaaaaaaaaaaaaaaaaaaaaaaaaaaaaaaaa

SEQ ID NO: 13420 - RNA, 5791 nt, synthetic construct
  source 1..5791: mol_type = other RNA
aggaaataagagagaaaagaagagtaagaagaaatataagagccaccatggcccctaagaagaagcgtaaagtgagccggatggaacgcctcgtctacgaggtgcggcagaagtgcagaaacatcgaggacatctgcatctcctgcggatctctgaacgtgaccctggagcacccactgttcatcggcggcatgtgccagaactgtaaaaactgttttctggagtgtgcctatcaatacgacgatgacggctaccagagctactgcaccatctgttgcggcggaagagaggtgctgatgtgtggaaataacaactgctgccggtgcttctgcgtggaatgcgtggacctgctggtgggccccggcgccgcccaggccgctattaaggaagatccttggaactgctacatgtgcggccacaagggcacatacggcctgctgagacggagagaggactggcctagcagactgcagatgttcttcgccaataaccacgaccaggagttcgacccccctaaggtgtaccctcccgtccccgccgagaagagaaagcccatccgggtcctgagcctgttcgatggcatcgccaccggtctgctggtgctgaaggacctgggcatccaggtggataggtacattgcctccgaggtgtgcgaggactccatcaccgtgggaatggtgcgtcatcagggcaagatcatgtacgtgggcgacgtgcggagcgtgacacagaagcatatccaggagtggggccctttcgacctggtgatcggcggcagcccttgcaatgacctgagcatcgtgaacccagcccggaagggcctgtacgagggaaccggcagactgttcttcgagttttacagactgctgcacgacgcccggcctaaggaaggcgacgaccggcccttcttttggctgttcgagaatgtggtggccatgggagtcagcgacaagcgggatattagccggttcctggagagcaaccccgtgatgatcgatgccaaggaagtgagcgccgcccaccgggccagatacttctggggcaatctgcctggcatgaacagacccctggccagcaccgtgaacgacaagctggagctgcaggagtgcctggagcacggccggatcgccaagttcagcaaggtgagaaccatcaccacccgaagcaacagcatcaaacaaggcaaggaccagcactttcctgtgttcatgaacgagaaggaggacatcctgtggtgtaccgagatggagagagtgttcgggttcccagtccactacacagatgtcagcaacatgtctagactggccagacagagactgctgggaagaagctggtccgtccctgtgatcagacacctgttcgcccctctgaaggagtacttcgcctgcgtgagcagcggcaacagcaacgccaacagccggggccccagcttctctagcggcctggtgccactgtccctgagagggagccacatgggccccatggagatctacaaaaccgtgagcgcctggaagcggcagcctgtgcgcgtgctgagcctgtttcggaatatcgataaagtcctgaaaagcctgggattcctggagagcggctctggctccggcggtggcaccctgaagtacgtggaggatgtgacaaacgtggtcagacgggatgtggagaagtggggccccttcgatctggtgtacggcagcacccaacccctgggcagctcttgtgaccggtgccctggctggtacatgtttcagttccaccggatcctgcagtacgccctgccgagacaggagtcccagcggccattcttttggattttcatggacaacttgctgctgaccgaggatgaccaggaaactaccactcggttcctgcagaccgaagccgtgaccctgcaggacgtgagaggccgggactaccagaacgccatgcgggtgtggtccaacatccctggactgaaaagcaagcacgcacctctgacccctaaagaagaggagtacctgcaggcccaggtgcggagcagaagcaagctggacgcccctaaggtggatctgctggtgaagaattgcctcctgcccctgagagagtacttcaagtatttcagccagaatagtctgcccctgggaggcagcggcggcggcatgacctacgacgacgtgcacgtgaacttcaccggcgaggagtgggccctgctgagccccagccagaagaggctgtacaaggacgtgatgctggagacctacaggaacctgaccgccatcggctacaactgggaggaccacaacagcgagcacttccagcacagcaggaggcacggcaggcacgagaggaggcacaccggcgagaagcccagcgtgtacacccagtgcggcaaggtgttcgcctaccacggcggcccaagcagcggcgcccctcctcccagcggcggcagcccagccggctccccaacctctaccgaggagggcacctctgagtccgccacccccgagagcggccctggcacctccaccgagcccagcgagggcagcgcacccggcagccctgccggcagccccacctccacagaggagggaaccagcaccgagcccagcgaaggcagcgccccaggcaccagcaccgagcctagtgagcaggagattaaacggatcaacaagatcagaagaagacttgtgaaagacagcaacaccaagaaggccggcaagacaggccccatgaaaaccctgctggttagagtgatgacacccgatctgagagagcggctggaaaacctgagaaagaagcctgaaaatatcccccagcccatcagcaatacatctagagccaacctgaataagctgctgaccgattacaccgaaatgaagaaggcgatcctgcatgtgtactgggaagagttccagaaggaccctgtgggcctgatgagccgggtggcccagcctgccagcaagaagatcgatcagaacaagctgaaacctgagatggacgagaagggcaacctgaccaccgccggctttgcctgctctcagtgtggccagcccctgttcgtgtacaagctggagcaggtgtctgagaagggcaaggcttacaccaactacttcggacggtgcaatgtggccgagcacgaaaagctgatcctgctggcccagctgaagcccgagaaggatagcgacgaagccgtgacatatagcctgggaaagtttgggcagagggccctggatttctacagcattcatgtgaccaaggagtccacccaccccgtgaagcccctggcccagatcgccggaaacagatacgcctccggacctgtgggaaaggccctgagcgacgcatgtatgggcacaatcgcctccttcctgtctaagtaccaggacatcatcatcgaacaccagaaggtggtgaagggcaaccagaagagactggagagcctgcgggagctggccggcaaggaaaacctggaataccctagcgtgaccctgccacctcagcctcacaccaaggagggcgttgatgcctacaacgaagtgatcgcccgggtgcgaatgtgggtgaacctgaacctgtggcagaagctgaagctaagcagagatgatgccaagcctctgctgagactgaagggattcccttcctttcctctggtcgagagacaggccaacgaagtggactggtgggacatggtgtgtaacgtgaagaagctgatcaacgagaaaaaggaggatggcaaggtgttttggcagaatctggctggctacaagagacaggaagccctgagaccatacctgagcagcgaggaagatcggaagaagggaaagaaattcgctcggtaccagctgggcgacctgctgctgcacctggaaaagaagcacggcgaggactggggaaaggtgtacgacgaggcctgggagcggattgacaagaaagtggaaggcctgagcaagcacatcaagctggaagaggaacggagaagcgaggacgcccagagcaaggccgccctgaccgactggctgcgggctaaggccagcttcgtgatcgagggcctgaaggaggccgacaaggacgagttctgcagatgcgagctgaagctgcagaagtggtacggggacctgcggggaaagcccttcgccatcgaagccgagaacagcatcctggacatcagcggcttcagcaagcagtacaactgtgccttcatctggcagaaggacggcgtgaagaagctgaacctgtacctgatcatcaactacttcaagggcggcaagctgcggttcaagaagatcaaacctgaagccttcgaagccaacagattctacaccgtgatcaacaaaaagagcggcgagatcgtgcccatggaggtgaacttcaacttcgacgaccccaacctgatcatcctgcctctggcctttggcaagagacagggcagagaattcatctggaacgacctgctgtccctggaaaccggcagcctgaagctggccaacggaagagtgatcgagaagacactgtacaacagaagaacccggcaggatgagcctgccctgttcgtggccctgaccttcgagcggcgggaggtcctggactcctccaatatcaaaccaatgaacctgatcggcgtggcaagaggcgaaaacatccccgccgtgatcgccctgaccgaccccgagggctgcccactgagccggtttaaggatagcctgggaaacccaacccacatcctgagaatcggcgagagctataaggagaagcagcggaccatccaggccaagaaggaggtggagcagcggagagccggcggctacagccggaagtacgccagcaaagccaagaatctggcagacgatatggtgagaaacaccgctagagatctgctgtactacgccgtgacccaggatgccatgctgatcttcgccaacctgagccggggcttcggccggcagggcaagcggaccttcatggccgagagacagtacacacggatggaggactggctgaccgccaagctggcctacgagggcctgagcaagacctacctgtccaagacactggcccagtacacctccaagacatgcagcaactgtgggtttaccatcaccagcgccgactacgacagggtgctggagaagctgaagaagacagcaacaggctggatgaccacaattaacggcaaggagctgaaggtggagggccagattacctactacaacagatacaagagacagaacgtagtcaaggacctgtccgtcgagctggatagactgagcgaagaatctgtgaacaacgacatctcctcctggacaaagggcagaagcggagaagctctgagcctcctgaagaaaagattctcccatagacccgtgcaggagaagttcgtgtgcctgaactgcggcttcgagacacacgcagccgagcaagccgccctgaacatcgccagatcctggctgttcctgcggagccaggagtacaagaaataccagacaaacaagacaaccggcaacaccgataagagagccttcgtcgagacctggcagtccttttaccggaagaagcttaaggaggtgtggaaacctgccgtgcggtctggcggatctggcggaggctccaccagccccaagaaaaagagaaaagtctaagctgccttctgcggggcttgccttctggccatgcccttcttctctcccttgcacctgtacctcttggtctttgaataaagcctgagtaggaaggctagcaaaaaaaaaaaaaaaaaaaaaaaaaaaaaaaaaaaaaaaaaaaaaaaaaaaaaaaaaaaaaaaaaaaaaaaaaaaaaaaa

SEQ ID NO: 13421 - RNA, 5785 nt, synthetic construct
  source 1..5785: mol_type = other RNA
aggaaataagagagaaaagaagagtaagaagaaatataagagccaccatggcccctaagaagaagcgtaaagtgagccggatggaacgcctcgtctacgaggtgcggcagaagtgcagaaacatcgaggacatctgcatctcctgcggatctctgaacgtgaccctggagcacccactgttcatcggcggcatgtgccagaactgtaaaaactgttttctggagtgtgcctatcaatacgacgatgacggctaccagagctactgcaccatctgttgcggcggaagagaggtgctgatgtgtggaaataacaactgctgccggtgcttctgcgtggaatgcgtggacctgctggtgggccccggcgccgcccaggccgctattaaggaagatccttggaactgctacatgtgcggccacaagggcacatacggcctgctgagacggagagaggactggcctagcagactgcagatgttcttcgccaataaccacgaccaggagttcgacccccctaaggtgtaccctcccgtccccgccgagaagagaaagcccatccgggtcctgagcctgttcgatggcatcgccaccggtctgctggtgctgaaggacctgggcatccaggtggataggtacattgcctccgaggtgtgcgaggactccatcaccgtgggaatggtgcgtcatcagggcaagatcatgtacgtgggcgacgtgcggagcgtgacacagaagcatatccaggagtggggccctttcgacctggtgatcggcggcagcccttgcaatgacctgagcatcgtgaacccagcccggaagggcctgtacgagggaaccggcagactgttcttcgagttttacagactgctgcacgacgcccggcctaaggaaggcgacgaccggcccttcttttggctgttcgagaatgtggtggccatgggagtcagcgacaagcgggatattagccggttcctggagagcaaccccgtgatgatcgatgccaaggaagtgagcgccgcccaccgggccagatacttctggggcaatctgcctggcatgaacagacccctggccagcaccgtgaacgacaagctggagctgcaggagtgcctggagcacggccggatcgccaagttcagcaaggtgagaaccatcaccacccgaagcaacagcatcaaacaaggcaaggaccagcactttcctgtgttcatgaacgagaaggaggacatcctgtggtgtaccgagatggagagagtgttcgggttcccagtccactacacagatgtcagcaacatgtctagactggccagacagagactgctgggaagaagctggtccgtccctgtgatcagacacctgttcgcccctctgaaggagtacttcgcctgcgtgagcagcggcaacagcaacgccaacagccggggccccagcttctctagcggcctggtgccactgtccctgagagggagccacatgggccccatggagatctacaaaaccgtgagcgcctggaagcggcagcctgtgcgcgtgctgagcctgtttcggaatatcgataaagtcctgaaaagcctgggattcctggagagcggctctggctccggcggtggcaccctgaagtacgtggaggatgtgacaaacgtggtcagacgggatgtggagaagtggggccccttcgatctggtgtacggcagcacccaacccctgggcagctcttgtgaccggtgccctggctggtacatgtttcagttccaccggatcctgcagtacgccctgccgagacaggagtcccagcggccattcttttggattttcatggacaacttgctgctgaccgaggatgaccaggaaactaccactcggttcctgcagaccgaagccgtgaccctgcaggacgtgagaggccgggactaccagaacgccatgcgggtgtggtccaacatccctggactgaaaagcaagcacgcacctctgacccctaaagaagaggagtacctgcaggcccaggtgcggagcagaagcaagctggacgcccctaaggtggatctgctggtgaagaattgcctcctgcccctgagagagtacttcaagtatttcagccagaatagtctgcccctgggaggcagcggcggcggcctgcaggagcccctggagttcatggacgtggccatcgagttcagcctggaggagtggcactgcctggacaccgcccagaggaacctgtacagggacgtgatgctggagaactacaggaacctggtgttcctgggcatcgtggtgagcaagcccgacctgatcacctggctggagcagggcaagaagcccctgaccgtgaagaggaggggcatgatcgccgccccccccggcatgagcagccacggcggcccaagcagcggcgcccctcctcccagcggcggcagcccagccggctccccaacctctaccgaggagggcacctctgagtccgccacccccgagagcggccctggcacctccaccgagcccagcgagggcagcgcacccggcagccctgccggcagccccacctccacagaggagggaaccagcaccgagcccagcgaaggcagcgccccaggcaccagcaccgagcctagtgagcaggagattaaacggatcaacaagatcagaagaagacttgtgaaagacagcaacaccaagaaggccggcaagacaggccccatgaaaaccctgctggttagagtgatgacacccgatctgagagagcggctggaaaacctgagaaagaagcctgaaaatatcccccagcccatcagcaatacatctagagccaacctgaataagctgctgaccgattacaccgaaatgaagaaggcgatcctgcatgtgtactgggaagagttccagaaggaccctgtgggcctgatgagccgggtggcccagcctgccagcaagaagatcgatcagaacaagctgaaacctgagatggacgagaagggcaacctgaccaccgccggctttgcctgctctcagtgtggccagcccctgttcgtgtacaagctggagcaggtgtctgagaagggcaaggcttacaccaactacttcggacggtgcaatgtggccgagcacgaaaagctgatcctgctggcccagctgaagcccgagaaggatagcgacgaagccgtgacatatagcctgggaaagtttgggcagagggccctggatttctacagcattcatgtgaccaaggagtccacccaccccgtgaagcccctggcccagatcgccggaaacagatacgcctccggacctgtgggaaaggccctgagcgacgcatgtatgggcacaatcgcctccttcctgtctaagtaccaggacatcatcatcgaacaccagaaggtggtgaagggcaaccagaagagactggagagcctgcgggagctggccggcaaggaaaacctggaataccctagcgtgaccctgccacctcagcctcacaccaaggagggcgttgatgcctacaacgaagtgatcgcccgggtgcgaatgtgggtgaacctgaacctgtggcagaagctgaagctaagcagagatgatgccaagcctctgctgagactgaagggattcccttcctttcctctggtcgagagacaggccaacgaagtggactggtgggacatggtgtgtaacgtgaagaagctgatcaacgagaaaaaggaggatggcaaggtgttttggcagaatctggctggctacaagagacaggaagccctgagaccatacctgagcagcgaggaagatcggaagaagggaaagaaattcgctcggtaccagctgggcgacctgctgctgcacctggaaaagaagcacggcgaggactggggaaaggtgtacgacgaggcctgggagcggattgacaagaaagtggaaggcctgagcaagcacatcaagctggaagaggaacggagaagcgaggacgcccagagcaaggccgccctgaccgactggctgcgggctaaggccagcttcgtgatcgagggcctgaaggaggccgacaaggacgagttctgcagatgcgagctgaagctgcagaagtggtacggggacctgcggggaaagcccttcgccatcgaagccgagaacagcatcctggacatcagcggcttcagcaagcagtacaactgtgccttcatctggcagaaggacggcgtgaagaagctgaacctgtacctgatcatcaactacttcaagggcggcaagctgcggttcaagaagatcaaacctgaagccttcgaagccaacagattctacaccgtgatcaacaaaaagagcggcgagatcgtgcccatggaggtgaacttcaacttcgacgaccccaacctgatcatcctgcctctggcctttggcaagagacagggcagagaattcatctggaacgacctgctgtccctggaaaccggcagcctgaagctggccaacggaagagtgatcgagaagacactgtacaacagaagaacccggcaggatgagcctgccctgttcgtggccctgaccttcgagcggcgggaggtcctggactcctccaatatcaaaccaatgaacctgatcggcgtggcaagaggcgaaaacatccccgccgtgatcgccctgaccgaccccgagggctgcccactgagccggtttaaggatagcctgggaaacccaacccacatcctgagaatcggcgagagctataaggagaagcagcggaccatccaggccaagaaggaggtggagcagcggagagccggcggctacagccggaagtacgccagcaaagccaagaatctggcagacgatatggtgagaaacaccgctagagatctgctgtactacgccgtgacccaggatgccatgctgatcttcgccaacctgagccggggcttcggccggcagggcaagcggaccttcatggccgagagacagtacacacggatggaggactggctgaccgccaagctggcctacgagggcctgagcaagacctacctgtccaagacactggcccagtacacctccaagacatgcagcaactgtgggtttaccatcaccagcgccgactacgacagggtgctggagaagctgaagaagacagcaacaggctggatgaccacaattaacggcaaggagctgaaggtggagggccagattacctactacaacagatacaagagacagaacgtagtcaaggacctgtccgtcgagctggatagactgagcgaagaatctgtgaacaacgacatctcctcctggacaaagggcagaagcggagaagctctgagcctcctgaagaaaagattctcccatagacccgtgcaggagaagttcgtgtgcctgaactgcggcttcgagacacacgcagccgagcaagccgccctgaacatcgccagatcctggctgttcctgcggagccaggagtacaagaaataccagacaaacaagacaaccggcaacaccgataagagagccttcgtcgagacctggcagtccttttaccggaagaagcttaaggaggtgtggaaacctgccgtgcggtctggcggatctggcggaggctccaccagccccaagaaaaagagaaaagtctaagctgccttctgcggggcttgccttctggccatgcccttcttctctcccttgcacctgtacctcttggtctttgaataaagcctgagtaggaaggctagcaaaaaaaaaaaaaaaaaaaaaaaaaaaaaaaaaaaaaaaaaaaaaaaaaaaaaaaaaaaaaaaaaaaaaaaaaaaaaaaa

SEQ ID NO: 13422 - RNA, 5785 nt, synthetic construct
  source 1..5785: mol_type = other RNA
aggaaataagagagaaaagaagagtaagaagaaatataagagccaccatggcccctaagaagaagcgtaaagtgagccggatggaacgcctcgtctacgaggtgcggcagaagtgcagaaacatcgaggacatctgcatctcctgcggatctctgaacgtgaccctggagcacccactgttcatcggcggcatgtgccagaactgtaaaaactgttttctggagtgtgcctatcaatacgacgatgacggctaccagagctactgcaccatctgttgcggcggaagagaggtgctgatgtgtggaaataacaactgctgccggtgcttctgcgtggaatgcgtggacctgctggtgggccccggcgccgcccaggccgctattaaggaagatccttggaactgctacatgtgcggccacaagggcacatacggcctgctgagacggagagaggactggcctagcagactgcagatgttcttcgccaataaccacgaccaggagttcgacccccctaaggtgtaccctcccgtccccgccgagaagagaaagcccatccgggtcctgagcctgttcgatggcatcgccaccggtctgctggtgctgaaggacctgggcatccaggtggataggtacattgcctccgaggtgtgcgaggactccatcaccgtgggaatggtgcgtcatcagggcaagatcatgtacgtgggcgacgtgcggagcgtgacacagaagcatatccaggagtggggccctttcgacctggtgatcggcggcagcccttgcaatgacctgagcatcgtgaacccagcccggaagggcctgtacgagggaaccggcagactgttcttcgagttttacagactgctgcacgacgcccggcctaaggaaggcgacgaccggcccttcttttggctgttcgagaatgtggtggccatgggagtcagcgacaagcgggatattagccggttcctggagagcaaccccgtgatgatcgatgccaaggaagtgagcgccgcccaccgggccagatacttctggggcaatctgcctggcatgaacagacccctggccagcaccgtgaacgacaagctggagctgcaggagtgcctggagcacggccggatcgccaagttcagcaaggtgagaaccatcaccacccgaagcaacagcatcaaacaaggcaaggaccagcactttcctgtgttcatgaacgagaaggaggacatcctgtggtgtaccgagatggagagagtgttcgggttcccagtccactacacagatgtcagcaacatgtctagactggccagacagagactgctgggaagaagctggtccgtccctgtgatcagacacctgttcgcccctctgaaggagtacttcgcctgcgtgagcagcggcaacagcaacgccaacagccggggccccagcttctctagcggcctggtgccactgtccctgagagggagccacatgggccccatggagatctacaaaaccgtgagcgcctggaagcggcagcctgtgcgcgtgctgagcctgtttcggaatatcgataaagtcctgaaaagcctgggattcctggagagcggctctggctccggcggtggcaccctgaagtacgtggaggatgtgacaaacgtggtcagacgggatgtggagaagtggggccccttcgatctggtgtacggcagcacccaacccctgggcagctcttgtgaccggtgccctggctggtacatgtttcagttccaccggatcctgcagtacgccctgccgagacaggagtcccagcggccattcttttggattttcatggacaacttgctgctgaccgaggatgaccaggaaactaccactcggttcctgcagaccgaagccgtgaccctgcaggacgtgagaggccgggactaccagaacgccatgcgggtgtggtccaacatccctggactgaaaagcaagcacgcacctctgacccctaaagaagaggagtacctgcaggcccaggtgcggagcagaagcaagctggacgcccctaaggtggatctgctggtgaagaattgcctcctgcccctgagagagtacttcaagtatttcagccagaatagtctgcccctgggaggcagcggcggcggccagatgcccatcaagttcgaggacatcgccgtgagcttcagccaggaggagtgggagtacctgaacgaggagcagaaggagctgtacagggaggtgatgaaggagaactaccagaccctgatcagcctgggcaccggcagcccccccgtgacccccgacatcatcagccacatcgagaggggcgaggagccctacatcagggaggagcccggcagcgaggagagggagcccggcaggagcagcggcggcccaagcagcggcgcccctcctcccagcggcggcagcccagccggctccccaacctctaccgaggagggcacctctgagtccgccacccccgagagcggccctggcacctccaccgagcccagcgagggcagcgcacccggcagccctgccggcagccccacctccacagaggagggaaccagcaccgagcccagcgaaggcagcgccccaggcaccagcaccgagcctagtgagcaggagattaaacggatcaacaagatcagaagaagacttgtgaaagacagcaacaccaagaaggccggcaagacaggccccatgaaaaccctgctggttagagtgatgacacccgatctgagagagcggctggaaaacctgagaaagaagcctgaaaatatcccccagcccatcagcaatacatctagagccaacctgaataagctgctgaccgattacaccgaaatgaagaaggcgatcctgcatgtgtactgggaagagttccagaaggaccctgtgggcctgatgagccgggtggcccagcctgccagcaagaagatcgatcagaacaagctgaaacctgagatggacgagaagggcaacctgaccaccgccggctttgcctgctctcagtgtggccagcccctgttcgtgtacaagctggagcaggtgtctgagaagggcaaggcttacaccaactacttcggacggtgcaatgtggccgagcacgaaaagctgatcctgctggcccagctgaagcccgagaaggatagcgacgaagccgtgacatatagcctgggaaagtttgggcagagggccctggatttctacagcattcatgtgaccaaggagtccacccaccccgtgaagcccctggcccagatcgccggaaacagatacgcctccggacctgtgggaaaggccctgagcgacgcatgtatgggcacaatcgcctccttcctgtctaagtaccaggacatcatcatcgaacaccagaaggtggtgaagggcaaccagaagagactggagagcctgcgggagctggccggcaaggaaaacctggaataccctagcgtgaccctgccacctcagcctcacaccaaggagggcgttgatgcctacaacgaagtgatcgcccgggtgcgaatgtgggtgaacctgaacctgtggcagaagctgaagctaagcagagatgatgccaagcctctgctgagactgaagggattcccttcctttcctctggtcgagagacaggccaacgaagtggactggtgggacatggtgtgtaacgtgaagaagctgatcaacgagaaaaaggaggatggcaaggtgttttggcagaatctggctggctacaagagacaggaagccctgagaccatacctgagcagcgaggaagatcggaagaagggaaagaaattcgctcggtaccagctgggcgacctgctgctgcacctggaaaagaagcacggcgaggactggggaaaggtgtacgacgaggcctgggagcggattgacaagaaagtggaaggcctgagcaagcacatcaagctggaagaggaacggagaagcgaggacgcccagagcaaggccgccctgaccgactggctgcgggctaaggccagcttcgtgatcgagggcctgaaggaggccgacaaggacgagttctgcagatgcgagctgaagctgcagaagtggtacggggacctgcggggaaagcccttcgccatcgaagccgagaacagcatcctggacatcagcggcttcagcaagcagtacaactgtgccttcatctggcagaaggacggcgtgaagaagctgaacctgtacctgatcatcaactacttcaagggcggcaagctgcggttcaagaagatcaaacctgaagccttcgaagccaacagattctacaccgtgatcaacaaaaagagcggcgagatcgtgcccatggaggtgaacttcaacttcgacgaccccaacctgatcatcctgcctctggcctttggcaagagacagggcagagaattcatctggaacgacctgctgtccctggaaaccggcagcctgaagctggccaacggaagagtgatcgagaagacactgtacaacagaagaacccggcaggatgagcctgccctgttcgtggccctgaccttcgagcggcgggaggtcctggactcctccaatatcaaaccaatgaacctgatcggcgtggcaagaggcgaaaacatccccgccgtgatcgccctgaccgaccccgagggctgcccactgagccggtttaaggatagcctgggaaacccaacccacatcctgagaatcggcgagagctataaggagaagcagcggaccatccaggccaagaaggaggtggagcagcggagagccggcggctacagccggaagtacgccagcaaagccaagaatctggcagacgatatggtgagaaacaccgctagagatctgctgtactacgccgtgacccaggatgccatgctgatcttcgccaacctgagccggggcttcggccggcagggcaagcggaccttcatggccgagagacagtacacacggatggaggactggctgaccgccaagctggcctacgagggcctgagcaagacctacctgtccaagacactggcccagtacacctccaagacatgcagcaactgtgggtttaccatcaccagcgccgactacgacagggtgctggagaagctgaagaagacagcaacaggctggatgaccacaattaacggcaaggagctgaaggtggagggccagattacctactacaacagatacaagagacagaacgtagtcaaggacctgtccgtcgagctggatagactgagcgaagaatctgtgaacaacgacatctcctcctggacaaagggcagaagcggagaagctctgagcctcctgaagaaaagattctcccatagacccgtgcaggagaagttcgtgtgcctgaactgcggcttcgagacacacgcagccgagcaagccgccctgaacatcgccagatcctggctgttcctgcggagccaggagtacaagaaataccagacaaacaagacaaccggcaacaccgataagagagccttcgtcgagacctggcagtccttttaccggaagaagcttaaggaggtgtggaaacctgccgtgcggtctggcggatctggcggaggctccaccagccccaagaaaaagagaaaagtctaagctgccttctgcggggcttgccttctggccatgcccttcttctctcccttgcacctgtacctcttggtctttgaataaagcctgagtaggaaggctagcaaaaaaaaaaaaaaaaaaaaaaaaaaaaaaaaaaaaaaaaaaaaaaaaaaaaaaaaaaaaaaaaaaaaaaaaaaaaaaaa

SEQ ID NO: 13423 - RNA, 5785 nt, synthetic construct
  source 1..5785: mol_type = other RNA
aggaaataagagagaaaagaagagtaagaagaaatataagagccaccatggcccctaagaagaagcgtaaagtgagccggatggaacgcctcgtctacgaggtgcggcagaagtgcagaaacatcgaggacatctgcatctcctgcggatctctgaacgtgaccctggagcacccactgttcatcggcggcatgtgccagaactgtaaaaactgttttctggagtgtgcctatcaatacgacgatgacggctaccagagctactgcaccatctgttgcggcggaagagaggtgctgatgtgtggaaataacaactgctgccggtgcttctgcgtggaatgcgtggacctgctggtgggccccggcgccgcccaggccgctattaaggaagatccttggaactgctacatgtgcggccacaagggcacatacggcctgctgagacggagagaggactggcctagcagactgcagatgttcttcgccaataaccacgaccaggagttcgacccccctaaggtgtaccctcccgtccccgccgagaagagaaagcccatccgggtcctgagcctgttcgatggcatcgccaccggtctgctggtgctgaaggacctgggcatccaggtggataggtacattgcctccgaggtgtgcgaggactccatcaccgtgggaatggtgcgtcatcagggcaagatcatgtacgtgggcgacgtgcggagcgtgacacagaagcatatccaggagtggggccctttcgacctggtgatcggcggcagcccttgcaatgacctgagcatcgtgaacccagcccggaagggcctgtacgagggaaccggcagactgttcttcgagttttacagactgctgcacgacgcccggcctaaggaaggcgacgaccggcccttcttttggctgttcgagaatgtggtggccatgggagtcagcgacaagcgggatattagccggttcctggagagcaaccccgtgatgatcgatgccaaggaagtgagcgccgcccaccgggccagatacttctggggcaatctgcctggcatgaacagacccctggccagcaccgtgaacgacaagctggagctgcaggagtgcctggagcacggccggatcgccaagttcagcaaggtgagaaccatcaccacccgaagcaacagcatcaaacaaggcaaggaccagcactttcctgtgttcatgaacgagaaggaggacatcctgtggtgtaccgagatggagagagtgttcgggttcccagtccactacacagatgtcagcaacatgtctagactggccagacagagactgctgggaagaagctggtccgtccctgtgatcagacacctgttcgcccctctgaaggagtacttcgcctgcgtgagcagcggcaacagcaacgccaacagccggggccccagcttctctagcggcctggtgccactgtccctgagagggagccacatgggccccatggagatctacaaaaccgtgagcgcctggaagcggcagcctgtgcgcgtgctgagcctgtttcggaatatcgataaagtcctgaaaagcctgggattcctggagagcggctctggctccggcggtggcaccctgaagtacgtggaggatgtgacaaacgtggtcagacgggatgtggagaagtggggccccttcgatctggtgtacggcagcacccaacccctgggcagctcttgtgaccggtgccctggctggtacatgtttcagttccaccggatcctgcagtacgccctgccgagacaggagtcccagcggccattcttttggattttcatggacaacttgctgctgaccgaggatgaccaggaaactaccactcggttcctgcagaccgaagccgtgaccctgcaggacgtgagaggccgggactaccagaacgccatgcgggtgtggtccaacatccctggactgaaaagcaagcacgcacctctgacccctaaagaagaggagtacctgcaggcccaggtgcggagcagaagcaagctggacgcccctaaggtggatctgctggtgaagaattgcctcctgcccctgagagagtacttcaagtatttcagccagaatagtctgcccctgggaggcagcggcggcggcgtgtgcggcagcgtgaccttcaaggacgtggccgtggacttcagccaggaggagtgggcctgcctggacgccacccagaaggtgctgtacagggacatgatgctggagacctacagcaacctggtggccgtggtgggcaggtgcatcagcaagcccgacctgatcgtgctgctggagcaggagaaggagccctggatggccgtgaaggaggagaccgacaggcccagccccgacctggagagcggcggcccaagcagcggcgcccctcctcccagcggcggcagcccagccggctccccaacctctaccgaggagggcacctctgagtccgccacccccgagagcggccctggcacctccaccgagcccagcgagggcagcgcacccggcagccctgccggcagccccacctccacagaggagggaaccagcaccgagcccagcgaaggcagcgccccaggcaccagcaccgagcctagtgagcaggagattaaacggatcaacaagatcagaagaagacttgtgaaagacagcaacaccaagaaggccggcaagacaggccccatgaaaaccctgctggttagagtgatgacacccgatctgagagagcggctggaaaacctgagaaagaagcctgaaaatatcccccagcccatcagcaatacatctagagccaacctgaataagctgctgaccgattacaccgaaatgaagaaggcgatcctgcatgtgtactgggaagagttccagaaggaccctgtgggcctgatgagccgggtggcccagcctgccagcaagaagatcgatcagaacaagctgaaacctgagatggacgagaagggcaacctgaccaccgccggctttgcctgctctcagtgtggccagcccctgttcgtgtacaagctggagcaggtgtctgagaagggcaaggcttacaccaactacttcggacggtgcaatgtggccgagcacgaaaagctgatcctgctggcccagctgaagcccgagaaggatagcgacgaagccgtgacatatagcctgggaaagtttgggcagagggccctggatttctacagcattcatgtgaccaaggagtccacccaccccgtgaagcccctggcccagatcgccggaaacagatacgcctccggacctgtgggaaaggccctgagcgacgcatgtatgggcacaatcgcctccttcctgtctaagtaccaggacatcatcatcgaacaccagaaggtggtgaagggcaaccagaagagactggagagcctgcgggagctggccggcaaggaaaacctggaataccctagcgtgaccctgccacctcagcctcacaccaaggagggcgttgatgcctacaacgaagtgatcgcccgggtgcgaatgtgggtgaacctgaacctgtggcagaagctgaagctaagcagagatgatgccaagcctctgctgagactgaagggattcccttcctttcctctggtcgagagacaggccaacgaagtggactggtgggacatggtgtgtaacgtgaagaagctgatcaacgagaaaaaggaggatggcaaggtgttttggcagaatctggctggctacaagagacaggaagccctgagaccatacctgagcagcgaggaagatcggaagaagggaaagaaattcgctcggtaccagctgggcgacctgctgctgcacctggaaaagaagcacggcgaggactggggaaaggtgtacgacgaggcctgggagcggattgacaagaaagtggaaggcctgagcaagcacatcaagctggaagaggaacggagaagcgaggacgcccagagcaaggccgccctgaccgactggctgcgggctaaggccagcttcgtgatcgagggcctgaaggaggccgacaaggacgagttctgcagatgcgagctgaagctgcagaagtggtacggggacctgcggggaaagcccttcgccatcgaagccgagaacagcatcctggacatcagcggcttcagcaagcagtacaactgtgccttcatctggcagaaggacggcgtgaagaagctgaacctgtacctgatcatcaactacttcaagggcggcaagctgcggttcaagaagatcaaacctgaagccttcgaagccaacagattctacaccgtgatcaacaaaaagagcggcgagatcgtgcccatggaggtgaacttcaacttcgacgaccccaacctgatcatcctgcctctggcctttggcaagagacagggcagagaattcatctggaacgacctgctgtccctggaaaccggcagcctgaagctggccaacggaagagtgatcgagaagacactgtacaacagaagaacccggcaggatgagcctgccctgttcgtggccctgaccttcgagcggcgggaggtcctggactcctccaatatcaaaccaatgaacctgatcggcgtggcaagaggcgaaaacatccccgccgtgatcgccctgaccgaccccgagggctgcccactgagccggtttaaggatagcctgggaaacccaacccacatcctgagaatcggcgagagctataaggagaagcagcggaccatccaggccaagaaggaggtggagcagcggagagccggcggctacagccggaagtacgccagcaaagccaagaatctggcagacgatatggtgagaaacaccgctagagatctgctgtactacgccgtgacccaggatgccatgctgatcttcgccaacctgagccggggcttcggccggcagggcaagcggaccttcatggccgagagacagtacacacggatggaggactggctgaccgccaagctggcctacgagggcctgagcaagacctacctgtccaagacactggcccagtacacctccaagacatgcagcaactgtgggtttaccatcaccagcgccgactacgacagggtgctggagaagctgaagaagacagcaacaggctggatgaccacaattaacggcaaggagctgaaggtggagggccagattacctactacaacagatacaagagacagaacgtagtcaaggacctgtccgtcgagctggatagactgagcgaagaatctgtgaacaacgacatctcctcctggacaaagggcagaagcggagaagctctgagcctcctgaagaaaagattctcccatagacccgtgcaggagaagttcgtgtgcctgaactgcggcttcgagacacacgcagccgagcaagccgccctgaacatcgccagatcctggctgttcctgcggagccaggagtacaagaaataccagacaaacaagacaaccggcaacaccgataagagagccttcgtcgagacctggcagtccttttaccggaagaagcttaaggaggtgtggaaacctgccgtgcggtctggcggatctggcggaggctccaccagccccaagaaaaagagaaaagtctaagctgccttctgcggggcttgccttctggccatgcccttcttctctcccttgcacctgtacctcttggtctttgaataaagcctgagtaggaaggctagcaaaaaaaaaaaaaaaaaaaaaaaaaaaaaaaaaaaaaaaaaaaaaaaaaaaaaaaaaaaaaaaaaaaaaaaaaaaaaaaa

SEQ ID NO: 13424 - RNA, 5785 nt, synthetic construct
  source 1..5785: mol_type = other RNA
aggaaataagagagaaaagaagagtaagaagaaatataagagccaccatggcccctaagaagaagcgtaaagtgagccggatggaacgcctcgtctacgaggtgcggcagaagtgcagaaacatcgaggacatctgcatctcctgcggatctctgaacgtgaccctggagcacccactgttcatcggcggcatgtgccagaactgtaaaaactgttttctggagtgtgcctatcaatacgacgatgacggctaccagagctactgcaccatctgttgcggcggaagagaggtgctgatgtgtggaaataacaactgctgccggtgcttctgcgtggaatgcgtggacctgctggtgggccccggcgccgcccaggccgctattaaggaagatccttggaactgctacatgtgcggccacaagggcacatacggcctgctgagacggagagaggactggcctagcagactgcagatgttcttcgccaataaccacgaccaggagttcgacccccctaaggtgtaccctcccgtccccgccgagaagagaaagcccatccgggtcctgagcctgttcgatggcatcgccaccggtctgctggtgctgaaggacctgggcatccaggtggataggtacattgcctccgaggtgtgcgaggactccatcaccgtgggaatggtgcgtcatcagggcaagatcatgtacgtgggcgacgtgcggagcgtgacacagaagcatatccaggagtggggccctttcgacctggtgatcggcggcagcccttgcaatgacctgagcatcgtgaacccagcccggaagggcctgtacgagggaaccggcagactgttcttcgagttttacagactgctgcacgacgcccggcctaaggaaggcgacgaccggcccttcttttggctgttcgagaatgtggtggccatgggagtcagcgacaagcgggatattagccggttcctggagagcaaccccgtgatgatcgatgccaaggaagtgagcgccgcccaccgggccagatacttctggggcaatctgcctggcatgaacagacccctggccagcaccgtgaacgacaagctggagctgcaggagtgcctggagcacggccggatcgccaagttcagcaaggtgagaaccatcaccacccgaagcaacagcatcaaacaaggcaaggaccagcactttcctgtgttcatgaacgagaaggaggacatcctgtggtgtaccgagatggagagagtgttcgggttcccagtccactacacagatgtcagcaacatgtctagactggccagacagagactgctgggaagaagctggtccgtccctgtgatcagacacctgttcgcccctctgaaggagtacttcgcctgcgtgagcagcggcaacagcaacgccaacagccggggccccagcttctctagcggcctggtgccactgtccctgagagggagccacatgggccccatggagatctacaaaaccgtgagcgcctggaagcggcagcctgtgcgcgtgctgagcctgtttcggaatatcgataaagtcctgaaaagcctgggattcctggagagcggctctggctccggcggtggcaccctgaagtacgtggaggatgtgacaaacgtggtcagacgggatgtggagaagtggggccccttcgatctggtgtacggcagcacccaacccctgggcagctcttgtgaccggtgccctggctggtacatgtttcagttccaccggatcctgcagtacgccctgccgagacaggagtcccagcggccattcttttggattttcatggacaacttgctgctgaccgaggatgaccaggaaactaccactcggttcctgcagaccgaagccgtgaccctgcaggacgtgagaggccgggactaccagaacgccatgcgggtgtggtccaacatccctggactgaaaagcaagcacgcacctctgacccctaaagaagaggagtacctgcaggcccaggtgcggagcagaagcaagctggacgcccctaaggtggatctgctggtgaagaattgcctcctgcccctgagagagtacttcaagtatttcagccagaatagtctgcccctgggaggcagcggcggcggcttccaggagagcctgaccttcaaggacgtggccgtggacttcacctacgaggagtggcagcagctgaaccccgaccagaggtacctgtacagggacgtgatgctggagaactacaagaacctggtgttcctgggccaccagatcagcaagcccgacgtgatcagccagctggagcagggcaaggagccctggcccatcgagagggagatcttcacctacagctgcagggactgggagaccaagggcggcccaagcagcggcgcccctcctcccagcggcggcagcccagccggctccccaacctctaccgaggagggcacctctgagtccgccacccccgagagcggccctggcacctccaccgagcccagcgagggcagcgcacccggcagccctgccggcagccccacctccacagaggagggaaccagcaccgagcccagcgaaggcagcgccccaggcaccagcaccgagcctagtgagcaggagattaaacggatcaacaagatcagaagaagacttgtgaaagacagcaacaccaagaaggccggcaagacaggccccatgaaaaccctgctggttagagtgatgacacccgatctgagagagcggctggaaaacctgagaaagaagcctgaaaatatcccccagcccatcagcaatacatctagagccaacctgaataagctgctgaccgattacaccgaaatgaagaaggcgatcctgcatgtgtactgggaagagttccagaaggaccctgtgggcctgatgagccgggtggcccagcctgccagcaagaagatcgatcagaacaagctgaaacctgagatggacgagaagggcaacctgaccaccgccggctttgcctgctctcagtgtggccagcccctgttcgtgtacaagctggagcaggtgtctgagaagggcaaggcttacaccaactacttcggacggtgcaatgtggccgagcacgaaaagctgatcctgctggcccagctgaagcccgagaaggatagcgacgaagccgtgacatatagcctgggaaagtttgggcagagggccctggatttctacagcattcatgtgaccaaggagtccacccaccccgtgaagcccctggcccagatcgccggaaacagatacgcctccggacctgtgggaaaggccctgagcgacgcatgtatgggcacaatcgcctccttcctgtctaagtaccaggacatcatcatcgaacaccagaaggtggtgaagggcaaccagaagagactggagagcctgcgggagctggccggcaaggaaaacctggaataccctagcgtgaccctgccacctcagcctcacaccaaggagggcgttgatgcctacaacgaagtgatcgcccgggtgcgaatgtgggtgaacctgaacctgtggcagaagctgaagctaagcagagatgatgccaagcctctgctgagactgaagggattcccttcctttcctctggtcgagagacaggccaacgaagtggactggtgggacatggtgtgtaacgtgaagaagctgatcaacgagaaaaaggaggatggcaaggtgttttggcagaatctggctggctacaagagacaggaagccctgagaccatacctgagcagcgaggaagatcggaagaagggaaagaaattcgctcggtaccagctgggcgacctgctgctgcacctggaaaagaagcacggcgaggactggggaaaggtgtacgacgaggcctgggagcggattgacaagaaagtggaaggcctgagcaagcacatcaagctggaagaggaacggagaagcgaggacgcccagagcaaggccgccctgaccgactggctgcgggctaaggccagcttcgtgatcgagggcctgaaggaggccgacaaggacgagttctgcagatgcgagctgaagctgcagaagtggtacggggacctgcggggaaagcccttcgccatcgaagccgagaacagcatcctggacatcagcggcttcagcaagcagtacaactgtgccttcatctggcagaaggacggcgtgaagaagctgaacctgtacctgatcatcaactacttcaagggcggcaagctgcggttcaagaagatcaaacctgaagccttcgaagccaacagattctacaccgtgatcaacaaaaagagcggcgagatcgtgcccatggaggtgaacttcaacttcgacgaccccaacctgatcatcctgcctctggcctttggcaagagacagggcagagaattcatctggaacgacctgctgtccctggaaaccggcagcctgaagctggccaacggaagagtgatcgagaagacactgtacaacagaagaacccggcaggatgagcctgccctgttcgtggccctgaccttcgagcggcgggaggtcctggactcctccaatatcaaaccaatgaacctgatcggcgtggcaagaggcgaaaacatccccgccgtgatcgccctgaccgaccccgagggctgcccactgagccggtttaaggatagcctgggaaacccaacccacatcctgagaatcggcgagagctataaggagaagcagcggaccatccaggccaagaaggaggtggagcagcggagagccggcggctacagccggaagtacgccagcaaagccaagaatctggcagacgatatggtgagaaacaccgctagagatctgctgtactacgccgtgacccaggatgccatgctgatcttcgccaacctgagccggggcttcggccggcagggcaagcggaccttcatggccgagagacagtacacacggatggaggactggctgaccgccaagctggcctacgagggcctgagcaagacctacctgtccaagacactggcccagtacacctccaagacatgcagcaactgtgggtttaccatcaccagcgccgactacgacagggtgctggagaagctgaagaagacagcaacaggctggatgaccacaattaacggcaaggagctgaaggtggagggccagattacctactacaacagatacaagagacagaacgtagtcaaggacctgtccgtcgagctggatagactgagcgaagaatctgtgaacaacgacatctcctcctggacaaagggcagaagcggagaagctctgagcctcctgaagaaaagattctcccatagacccgtgcaggagaagttcgtgtgcctgaactgcggcttcgagacacacgcagccgagcaagccgccctgaacatcgccagatcctggctgttcctgcggagccaggagtacaagaaataccagacaaacaagacaaccggcaacaccgataagagagccttcgtcgagacctggcagtccttttaccggaagaagcttaaggaggtgtggaaacctgccgtgcggtctggcggatctggcggaggctccaccagccccaagaaaaagagaaaagtctaagctgccttctgcggggcttgccttctggccatgcccttcttctctcccttgcacctgtacctcttggtctttgaataaagcctgagtaggaaggctagcaaaaaaaaaaaaaaaaaaaaaaaaaaaaaaaaaaaaaaaaaaaaaaaaaaaaaaaaaaaaaaaaaaaaaaaaaaaaaaaa

SEQ ID NO: 13425 - RNA, 5785 nt, synthetic construct
  source 1..5785: mol_type = other RNA
aggaaataagagagaaaagaagagtaagaagaaatataagagccaccatggcccctaagaagaagcgtaaagtgagccggatggaacgcctcgtctacgaggtgcggcagaagtgcagaaacatcgaggacatctgcatctcctgcggatctctgaacgtgaccctggagcacccactgttcatcggcggcatgtgccagaactgtaaaaactgttttctggagtgtgcctatcaatacgacgatgacggctaccagagctactgcaccatctgttgcggcggaagagaggtgctgatgtgtggaaataacaactgctgccggtgcttctgcgtggaatgcgtggacctgctggtgggccccggcgccgcccaggccgctattaaggaagatccttggaactgctacatgtgcggccacaagggcacatacggcctgctgagacggagagaggactggcctagcagactgcagatgttcttcgccaataaccacgaccaggagttcgacccccctaaggtgtaccctcccgtccccgccgagaagagaaagcccatccgggtcctgagcctgttcgatggcatcgccaccggtctgctggtgctgaaggacctgggcatccaggtggataggtacattgcctccgaggtgtgcgaggactccatcaccgtgggaatggtgcgtcatcagggcaagatcatgtacgtgggcgacgtgcggagcgtgacacagaagcatatccaggagtggggccctttcgacctggtgatcggcggcagcccttgcaatgacctgagcatcgtgaacccagcccggaagggcctgtacgagggaaccggcagactgttcttcgagttttacagactgctgcacgacgcccggcctaaggaaggcgacgaccggcccttcttttggctgttcgagaatgtggtggccatgggagtcagcgacaagcgggatattagccggttcctggagagcaaccccgtgatgatcgatgccaaggaagtgagcgccgcccaccgggccagatacttctggggcaatctgcctggcatgaacagacccctggccagcaccgtgaacgacaagctggagctgcaggagtgcctggagcacggccggatcgccaagttcagcaaggtgagaaccatcaccacccgaagcaacagcatcaaacaaggcaaggaccagcactttcctgtgttcatgaacgagaaggaggacatcctgtggtgtaccgagatggagagagtgttcgggttcccagtccactacacagatgtcagcaacatgtctagactggccagacagagactgctgggaagaagctggtccgtccctgtgatcagacacctgttcgcccctctgaaggagtacttcgcctgcgtgagcagcggcaacagcaacgccaacagccggggccccagcttctctagcggcctggtgccactgtccctgagagggagccacatgggccccatggagatctacaaaaccgtgagcgcctggaagcggcagcctgtgcgcgtgctgagcctgtttcggaatatcgataaagtcctgaaaagcctgggattcctggagagcggctctggctccggcggtggcaccctgaagtacgtggaggatgtgacaaacgtggtcagacgggatgtggagaagtggggccccttcgatctggtgtacggcagcacccaacccctgggcagctcttgtgaccggtgccctggctggtacatgtttcagttccaccggatcctgcagtacgccctgccgagacaggagtcccagcggccattcttttggattttcatggacaacttgctgctgaccgaggatgaccaggaaactaccactcggttcctgcagaccgaagccgtgaccctgcaggacgtgagaggccgggactaccagaacgccatgcgggtgtggtccaacatccctggactgaaaagcaagcacgcacctctgacccctaaagaagaggagtacctgcaggcccaggtgcggagcagaagcaagctggacgcccctaaggtggatctgctggtgaagaattgcctcctgcccctgagagagtacttcaagtatttcagccagaatagtctgcccctgggaggcagcggcggcggcttccagaacagcctgaccttcgacgacgtggccgtggacttcacccaggaggagtgggtgctgatggaccagacccagagggacctgtacagggaggtgatgctggagaactaccagaacctgttcagcgccggctgcgagatcaccaagcccagcctgatcagctggctggaggaggacctgcagatcggccagagggaggacttccaggagtgggagatgcaggacaccctgagggagcagggcggcccaagcagcggcgcccctcctcccagcggcggcagcccagccggctccccaacctctaccgaggagggcacctctgagtccgccacccccgagagcggccctggcacctccaccgagcccagcgagggcagcgcacccggcagccctgccggcagccccacctccacagaggagggaaccagcaccgagcccagcgaaggcagcgccccaggcaccagcaccgagcctagtgagcaggagattaaacggatcaacaagatcagaagaagacttgtgaaagacagcaacaccaagaaggccggcaagacaggccccatgaaaaccctgctggttagagtgatgacacccgatctgagagagcggctggaaaacctgagaaagaagcctgaaaatatcccccagcccatcagcaatacatctagagccaacctgaataagctgctgaccgattacaccgaaatgaagaaggcgatcctgcatgtgtactgggaagagttccagaaggaccctgtgggcctgatgagccgggtggcccagcctgccagcaagaagatcgatcagaacaagctgaaacctgagatggacgagaagggcaacctgaccaccgccggctttgcctgctctcagtgtggccagcccctgttcgtgtacaagctggagcaggtgtctgagaagggcaaggcttacaccaactacttcggacggtgcaatgtggccgagcacgaaaagctgatcctgctggcccagctgaagcccgagaaggatagcgacgaagccgtgacatatagcctgggaaagtttgggcagagggccctggatttctacagcattcatgtgaccaaggagtccacccaccccgtgaagcccctggcccagatcgccggaaacagatacgcctccggacctgtgggaaaggccctgagcgacgcatgtatgggcacaatcgcctccttcctgtctaagtaccaggacatcatcatcgaacaccagaaggtggtgaagggcaaccagaagagactggagagcctgcgggagctggccggcaaggaaaacctggaataccctagcgtgaccctgccacctcagcctcacaccaaggagggcgttgatgcctacaacgaagtgatcgcccgggtgcgaatgtgggtgaacctgaacctgtggcagaagctgaagctaagcagagatgatgccaagcctctgctgagactgaagggattcccttcctttcctctggtcgagagacaggccaacgaagtggactggtgggacatggtgtgtaacgtgaagaagctgatcaacgagaaaaaggaggatggcaaggtgttttggcagaatctggctggctacaagagacaggaagccctgagaccatacctgagcagcgaggaagatcggaagaagggaaagaaattcgctcggtaccagctgggcgacctgctgctgcacctggaaaagaagcacggcgaggactggggaaaggtgtacgacgaggcctgggagcggattgacaagaaagtggaaggcctgagcaagcacatcaagctggaagaggaacggagaagcgaggacgcccagagcaaggccgccctgaccgactggctgcgggctaaggccagcttcgtgatcgagggcctgaaggaggccgacaaggacgagttctgcagatgcgagctgaagctgcagaagtggtacggggacctgcggggaaagcccttcgccatcgaagccgagaacagcatcctggacatcagcggcttcagcaagcagtacaactgtgccttcatctggcagaaggacggcgtgaagaagctgaacctgtacctgatcatcaactacttcaagggcggcaagctgcggttcaagaagatcaaacctgaagccttcgaagccaacagattctacaccgtgatcaacaaaaagagcggcgagatcgtgcccatggaggtgaacttcaacttcgacgaccccaacctgatcatcctgcctctggcctttggcaagagacagggcagagaattcatctggaacgacctgctgtccctggaaaccggcagcctgaagctggccaacggaagagtgatcgagaagacactgtacaacagaagaacccggcaggatgagcctgccctgttcgtggccctgaccttcgagcggcgggaggtcctggactcctccaatatcaaaccaatgaacctgatcggcgtggcaagaggcgaaaacatccccgccgtgatcgccctgaccgaccccgagggctgcccactgagccggtttaaggatagcctgggaaacccaacccacatcctgagaatcggcgagagctataaggagaagcagcggaccatccaggccaagaaggaggtggagcagcggagagccggcggctacagccggaagtacgccagcaaagccaagaatctggcagacgatatggtgagaaacaccgctagagatctgctgtactacgccgtgacccaggatgccatgctgatcttcgccaacctgagccggggcttcggccggcagggcaagcggaccttcatggccgagagacagtacacacggatggaggactggctgaccgccaagctggcctacgagggcctgagcaagacctacctgtccaagacactggcccagtacacctccaagacatgcagcaactgtgggtttaccatcaccagcgccgactacgacagggtgctggagaagctgaagaagacagcaacaggctggatgaccacaattaacggcaaggagctgaaggtggagggccagattacctactacaacagatacaagagacagaacgtagtcaaggacctgtccgtcgagctggatagactgagcgaagaatctgtgaacaacgacatctcctcctggacaaagggcagaagcggagaagctctgagcctcctgaagaaaagattctcccatagacccgtgcaggagaagttcgtgtgcctgaactgcggcttcgagacacacgcagccgagcaagccgccctgaacatcgccagatcctggctgttcctgcggagccaggagtacaagaaataccagacaaacaagacaaccggcaacaccgataagagagccttcgtcgagacctggcagtccttttaccggaagaagcttaaggaggtgtggaaacctgccgtgcggtctggcggatctggcggaggctccaccagccccaagaaaaagagaaaagtctaagctgccttctgcggggcttgccttctggccatgcccttcttctctcccttgcacctgtacctcttggtctttgaataaagcctgagtaggaaggctagcaaaaaaaaaaaaaaaaaaaaaaaaaaaaaaaaaaaaaaaaaaaaaaaaaaaaaaaaaaaaaaaaaaaaaaaaaaaaaaaa

SEQ ID NO: 13426 - RNA, 5785 nt, synthetic construct
  source 1..5785: mol_type = other RNA
aggaaataagagagaaaagaagagtaagaagaaatataagagccaccatggcccctaagaagaagcgtaaagtgagccggatggaacgcctcgtctacgaggtgcggcagaagtgcagaaacatcgaggacatctgcatctcctgcggatctctgaacgtgaccctggagcacccactgttcatcggcggcatgtgccagaactgtaaaaactgttttctggagtgtgcctatcaatacgacgatgacggctaccagagctactgcaccatctgttgcggcggaagagaggtgctgatgtgtggaaataacaactgctgccggtgcttctgcgtggaatgcgtggacctgctggtgggccccggcgccgcccaggccgctattaaggaagatccttggaactgctacatgtgcggccacaagggcacatacggcctgctgagacggagagaggactggcctagcagactgcagatgttcttcgccaataaccacgaccaggagttcgacccccctaaggtgtaccctcccgtccccgccgagaagagaaagcccatccgggtcctgagcctgttcgatggcatcgccaccggtctgctggtgctgaaggacctgggcatccaggtggataggtacattgcctccgaggtgtgcgaggactccatcaccgtgggaatggtgcgtcatcagggcaagatcatgtacgtgggcgacgtgcggagcgtgacacagaagcatatccaggagtggggccctttcgacctggtgatcggcggcagcccttgcaatgacctgagcatcgtgaacccagcccggaagggcctgtacgagggaaccggcagactgttcttcgagttttacagactgctgcacgacgcccggcctaaggaaggcgacgaccggcccttcttttggctgttcgagaatgtggtggccatgggagtcagcgacaagcgggatattagccggttcctggagagcaaccccgtgatgatcgatgccaaggaagtgagcgccgcccaccgggccagatacttctggggcaatctgcctggcatgaacagacccctggccagcaccgtgaacgacaagctggagctgcaggagtgcctggagcacggccggatcgccaagttcagcaaggtgagaaccatcaccacccgaagcaacagcatcaaacaaggcaaggaccagcactttcctgtgttcatgaacgagaaggaggacatcctgtggtgtaccgagatggagagagtgttcgggttcccagtccactacacagatgtcagcaacatgtctagactggccagacagagactgctgggaagaagctggtccgtccctgtgatcagacacctgttcgcccctctgaaggagtacttcgcctgcgtgagcagcggcaacagcaacgccaacagccggggccccagcttctctagcggcctggtgccactgtccctgagagggagccacatgggccccatggagatctacaaaaccgtgagcgcctggaagcggcagcctgtgcgcgtgctgagcctgtttcggaatatcgataaagtcctgaaaagcctgggattcctggagagcggctctggctccggcggtggcaccctgaagtacgtggaggatgtgacaaacgtggtcagacgggatgtggagaagtggggccccttcgatctggtgtacggcagcacccaacccctgggcagctcttgtgaccggtgccctggctggtacatgtttcagttccaccggatcctgcagtacgccctgccgagacaggagtcccagcggccattcttttggattttcatggacaacttgctgctgaccgaggatgaccaggaaactaccactcggttcctgcagaccgaagccgtgaccctgcaggacgtgagaggccgggactaccagaacgccatgcgggtgtggtccaacatccctggactgaaaagcaagcacgcacctctgacccctaaagaagaggagtacctgcaggcccaggtgcggagcagaagcaagctggacgcccctaaggtggatctgctggtgaagaattgcctcctgcccctgagagagtacttcaagtatttcagccagaatagtctgcccctgggaggcagcggcggcggcccccaggagagcgtgaccttcagggacgtggccgtggacttcacctgggaggagtggggccagctggaccccagccagaaggagctgtacagggaggtgatgctggagaactacggcaacctggcctgcctgggcctggccgtgagcaagcccgacgtgatcctgcagctggagaggggcgagatcccctggatgagcgagaggaaggtgcccgagggcatctgccccgactgggaggccaggggcggcccaagcagcggcgcccctcctcccagcggcggcagcccagccggctccccaacctctaccgaggagggcacctctgagtccgccacccccgagagcggccctggcacctccaccgagcccagcgagggcagcgcacccggcagccctgccggcagccccacctccacagaggagggaaccagcaccgagcccagcgaaggcagcgccccaggcaccagcaccgagcctagtgagcaggagattaaacggatcaacaagatcagaagaagacttgtgaaagacagcaacaccaagaaggccggcaagacaggccccatgaaaaccctgctggttagagtgatgacacccgatctgagagagcggctggaaaacctgagaaagaagcctgaaaatatcccccagcccatcagcaatacatctagagccaacctgaataagctgctgaccgattacaccgaaatgaagaaggcgatcctgcatgtgtactgggaagagttccagaaggaccctgtgggcctgatgagccgggtggcccagcctgccagcaagaagatcgatcagaacaagctgaaacctgagatggacgagaagggcaacctgaccaccgccggctttgcctgctctcagtgtggccagcccctgttcgtgtacaagctggagcaggtgtctgagaagggcaaggcttacaccaactacttcggacggtgcaatgtggccgagcacgaaaagctgatcctgctggcccagctgaagcccgagaaggatagcgacgaagccgtgacatatagcctgggaaagtttgggcagagggccctggatttctacagcattcatgtgaccaaggagtccacccaccccgtgaagcccctggcccagatcgccggaaacagatacgcctccggacctgtgggaaaggccctgagcgacgcatgtatgggcacaatcgcctccttcctgtctaagtaccaggacatcatcatcgaacaccagaaggtggtgaagggcaaccagaagagactggagagcctgcgggagctggccggcaaggaaaacctggaataccctagcgtgaccctgccacctcagcctcacaccaaggagggcgttgatgcctacaacgaagtgatcgcccgggtgcgaatgtgggtgaacctgaacctgtggcagaagctgaagctaagcagagatgatgccaagcctctgctgagactgaagggattcccttcctttcctctggtcgagagacaggccaacgaagtggactggtgggacatggtgtgtaacgtgaagaagctgatcaacgagaaaaaggaggatggcaaggtgttttggcagaatctggctggctacaagagacaggaagccctgagaccatacctgagcagcgaggaagatcggaagaagggaaagaaattcgctcggtaccagctgggcgacctgctgctgcacctggaaaagaagcacggcgaggactggggaaaggtgtacgacgaggcctgggagcggattgacaagaaagtggaaggcctgagcaagcacatcaagctggaagaggaacggagaagcgaggacgcccagagcaaggccgccctgaccgactggctgcgggctaaggccagcttcgtgatcgagggcctgaaggaggccgacaaggacgagttctgcagatgcgagctgaagctgcagaagtggtacggggacctgcggggaaagcccttcgccatcgaagccgagaacagcatcctggacatcagcggcttcagcaagcagtacaactgtgccttcatctggcagaaggacggcgtgaagaagctgaacctgtacctgatcatcaactacttcaagggcggcaagctgcggttcaagaagatcaaacctgaagccttcgaagccaacagattctacaccgtgatcaacaaaaagagcggcgagatcgtgcccatggaggtgaacttcaacttcgacgaccccaacctgatcatcctgcctctggcctttggcaagagacagggcagagaattcatctggaacgacctgctgtccctggaaaccggcagcctgaagctggccaacggaagagtgatcgagaagacactgtacaacagaagaacccggcaggatgagcctgccctgttcgtggccctgaccttcgagcggcgggaggtcctggactcctccaatatcaaaccaatgaacctgatcggcgtggcaagaggcgaaaacatccccgccgtgatcgccctgaccgaccccgagggctgcccactgagccggtttaaggatagcctgggaaacccaacccacatcctgagaatcggcgagagctataaggagaagcagcggaccatccaggccaagaaggaggtggagcagcggagagccggcggctacagccggaagtacgccagcaaagccaagaatctggcagacgatatggtgagaaacaccgctagagatctgctgtactacgccgtgacccaggatgccatgctgatcttcgccaacctgagccggggcttcggccggcagggcaagcggaccttcatggccgagagacagtacacacggatggaggactggctgaccgccaagctggcctacgagggcctgagcaagacctacctgtccaagacactggcccagtacacctccaagacatgcagcaactgtgggtttaccatcaccagcgccgactacgacagggtgctggagaagctgaagaagacagcaacaggctggatgaccacaattaacggcaaggagctgaaggtggagggccagattacctactacaacagatacaagagacagaacgtagtcaaggacctgtccgtcgagctggatagactgagcgaagaatctgtgaacaacgacatctcctcctggacaaagggcagaagcggagaagctctgagcctcctgaagaaaagattctcccatagacccgtgcaggagaagttcgtgtgcctgaactgcggcttcgagacacacgcagccgagcaagccgccctgaacatcgccagatcctggctgttcctgcggagccaggagtacaagaaataccagacaaacaagacaaccggcaacaccgataagagagccttcgtcgagacctggcagtccttttaccggaagaagcttaaggaggtgtggaaacctgccgtgcggtctggcggatctggcggaggctccaccagccccaagaaaaagagaaaagtctaagctgccttctgcggggcttgccttctggccatgcccttcttctctcccttgcacctgtacctcttggtctttgaataaagcctgagtaggaaggctagcaaaaaaaaaaaaaaaaaaaaaaaaaaaaaaaaaaaaaaaaaaaaaaaaaaaaaaaaaaaaaaaaaaaaaaaaaaaaaaaa

SEQ ID NO: 13427 - RNA, 5785 nt, synthetic construct
  source 1..5785: mol_type = other RNA
aggaaataagagagaaaagaagagtaagaagaaatataagagccaccatggcccctaagaagaagcgtaaagtgagccggatggaacgcctcgtctacgaggtgcggcagaagtgcagaaacatcgaggacatctgcatctcctgcggatctctgaacgtgaccctggagcacccactgttcatcggcggcatgtgccagaactgtaaaaactgttttctggagtgtgcctatcaatacgacgatgacggctaccagagctactgcaccatctgttgcggcggaagagaggtgctgatgtgtggaaataacaactgctgccggtgcttctgcgtggaatgcgtggacctgctggtgggccccggcgccgcccaggccgctattaaggaagatccttggaactgctacatgtgcggccacaagggcacatacggcctgctgagacggagagaggactggcctagcagactgcagatgttcttcgccaataaccacgaccaggagttcgacccccctaaggtgtaccctcccgtccccgccgagaagagaaagcccatccgggtcctgagcctgttcgatggcatcgccaccggtctgctggtgctgaaggacctgggcatccaggtggataggtacattgcctccgaggtgtgcgaggactccatcaccgtgggaatggtgcgtcatcagggcaagatcatgtacgtgggcgacgtgcggagcgtgacacagaagcatatccaggagtggggccctttcgacctggtgatcggcggcagcccttgcaatgacctgagcatcgtgaacccagcccggaagggcctgtacgagggaaccggcagactgttcttcgagttttacagactgctgcacgacgcccggcctaaggaaggcgacgaccggcccttcttttggctgttcgagaatgtggtggccatgggagtcagcgacaagcgggatattagccggttcctggagagcaaccccgtgatgatcgatgccaaggaagtgagcgccgcccaccgggccagatacttctggggcaatctgcctggcatgaacagacccctggccagcaccgtgaacgacaagctggagctgcaggagtgcctggagcacggccggatcgccaagttcagcaaggtgagaaccatcaccacccgaagcaacagcatcaaacaaggcaaggaccagcactttcctgtgttcatgaacgagaaggaggacatcctgtggtgtaccgagatggagagagtgttcgggttcccagtccactacacagatgtcagcaacatgtctagactggccagacagagactgctgggaagaagctggtccgtccctgtgatcagacacctgttcgcccctctgaaggagtacttcgcctgcgtgagcagcggcaacagcaacgccaacagccggggccccagcttctctagcggcctggtgccactgtccctgagagggagccacatgggccccatggagatctacaaaaccgtgagcgcctggaagcggcagcctgtgcgcgtgctgagcctgtttcggaatatcgataaagtcctgaaaagcctgggattcctggagagcggctctggctccggcggtggcaccctgaagtacgtggaggatgtgacaaacgtggtcagacgggatgtggagaagtggggccccttcgatctggtgtacggcagcacccaacccctgggcagctcttgtgaccggtgccctggctggtacatgtttcagttccaccggatcctgcagtacgccctgccgagacaggagtcccagcggccattcttttggattttcatggacaacttgctgctgaccgaggatgaccaggaaactaccactcggttcctgcagaccgaagccgtgaccctgcaggacgtgagaggccgggactaccagaacgccatgcgggtgtggtccaacatccctggactgaaaagcaagcacgcacctctgacccctaaagaagaggagtacctgcaggcccaggtgcggagcagaagcaagctggacgcccctaaggtggatctgctggtgaagaattgcctcctgcccctgagagagtacttcaagtatttcagccagaatagtctgcccctgggaggcagcggcggcggcgtggtgctgctggaggccttcgaggacgtggccgtgtacttcacccagaaggagtgggccctgctggacgacggcgacaaggccctgtacagggaccagatgctgaggaactaccaggccctgatcagcctgggctacaggggccccacccccgccctgatcaacaggatccagaggggcgagatggagctgtgggtgtgcgacaaggactacggcgagaagagcagcctggagggcctgttcggcggcccaagcagcggcgcccctcctcccagcggcggcagcccagccggctccccaacctctaccgaggagggcacctctgagtccgccacccccgagagcggccctggcacctccaccgagcccagcgagggcagcgcacccggcagccctgccggcagccccacctccacagaggagggaaccagcaccgagcccagcgaaggcagcgccccaggcaccagcaccgagcctagtgagcaggagattaaacggatcaacaagatcagaagaagacttgtgaaagacagcaacaccaagaaggccggcaagacaggccccatgaaaaccctgctggttagagtgatgacacccgatctgagagagcggctggaaaacctgagaaagaagcctgaaaatatcccccagcccatcagcaatacatctagagccaacctgaataagctgctgaccgattacaccgaaatgaagaaggcgatcctgcatgtgtactgggaagagttccagaaggaccctgtgggcctgatgagccgggtggcccagcctgccagcaagaagatcgatcagaacaagctgaaacctgagatggacgagaagggcaacctgaccaccgccggctttgcctgctctcagtgtggccagcccctgttcgtgtacaagctggagcaggtgtctgagaagggcaaggcttacaccaactacttcggacggtgcaatgtggccgagcacgaaaagctgatcctgctggcccagctgaagcccgagaaggatagcgacgaagccgtgacatatagcctgggaaagtttgggcagagggccctggatttctacagcattcatgtgaccaaggagtccacccaccccgtgaagcccctggcccagatcgccggaaacagatacgcctccggacctgtgggaaaggccctgagcgacgcatgtatgggcacaatcgcctccttcctgtctaagtaccaggacatcatcatcgaacaccagaaggtggtgaagggcaaccagaagagactggagagcctgcgggagctggccggcaaggaaaacctggaataccctagcgtgaccctgccacctcagcctcacaccaaggagggcgttgatgcctacaacgaagtgatcgcccgggtgcgaatgtgggtgaacctgaacctgtggcagaagctgaagctaagcagagatgatgccaagcctctgctgagactgaagggattcccttcctttcctctggtcgagagacaggccaacgaagtggactggtgggacatggtgtgtaacgtgaagaagctgatcaacgagaaaaaggaggatggcaaggtgttttggcagaatctggctggctacaagagacaggaagccctgagaccatacctgagcagcgaggaagatcggaagaagggaaagaaattcgctcggtaccagctgggcgacctgctgctgcacctggaaaagaagcacggcgaggactggggaaaggtgtacgacgaggcctgggagcggattgacaagaaagtggaaggcctgagcaagcacatcaagctggaagaggaacggagaagcgaggacgcccagagcaaggccgccctgaccgactggctgcgggctaaggccagcttcgtgatcgagggcctgaaggaggccgacaaggacgagttctgcagatgcgagctgaagctgcagaagtggtacggggacctgcggggaaagcccttcgccatcgaagccgagaacagcatcctggacatcagcggcttcagcaagcagtacaactgtgccttcatctggcagaaggacggcgtgaagaagctgaacctgtacctgatcatcaactacttcaagggcggcaagctgcggttcaagaagatcaaacctgaagccttcgaagccaacagattctacaccgtgatcaacaaaaagagcggcgagatcgtgcccatggaggtgaacttcaacttcgacgaccccaacctgatcatcctgcctctggcctttggcaagagacagggcagagaattcatctggaacgacctgctgtccctggaaaccggcagcctgaagctggccaacggaagagtgatcgagaagacactgtacaacagaagaacccggcaggatgagcctgccctgttcgtggccctgaccttcgagcggcgggaggtcctggactcctccaatatcaaaccaatgaacctgatcggcgtggcaagaggcgaaaacatccccgccgtgatcgccctgaccgaccccgagggctgcccactgagccggtttaaggatagcctgggaaacccaacccacatcctgagaatcggcgagagctataaggagaagcagcggaccatccaggccaagaaggaggtggagcagcggagagccggcggctacagccggaagtacgccagcaaagccaagaatctggcagacgatatggtgagaaacaccgctagagatctgctgtactacgccgtgacccaggatgccatgctgatcttcgccaacctgagccggggcttcggccggcagggcaagcggaccttcatggccgagagacagtacacacggatggaggactggctgaccgccaagctggcctacgagggcctgagcaagacctacctgtccaagacactggcccagtacacctccaagacatgcagcaactgtgggtttaccatcaccagcgccgactacgacagggtgctggagaagctgaagaagacagcaacaggctggatgaccacaattaacggcaaggagctgaaggtggagggccagattacctactacaacagatacaagagacagaacgtagtcaaggacctgtccgtcgagctggatagactgagcgaagaatctgtgaacaacgacatctcctcctggacaaagggcagaagcggagaagctctgagcctcctgaagaaaagattctcccatagacccgtgcaggagaagttcgtgtgcctgaactgcggcttcgagacacacgcagccgagcaagccgccctgaacatcgccagatcctggctgttcctgcggagccaggagtacaagaaataccagacaaacaagacaaccggcaacaccgataagagagccttcgtcgagacctggcagtccttttaccggaagaagcttaaggaggtgtggaaacctgccgtgcggtctggcggatctggcggaggctccaccagccccaagaaaaagagaaaagtctaagctgccttctgcggggcttgccttctggccatgcccttcttctctcccttgcacctgtacctcttggtctttgaataaagcctgagtaggaaggctagcaaaaaaaaaaaaaaaaaaaaaaaaaaaaaaaaaaaaaaaaaaaaaaaaaaaaaaaaaaaaaaaaaaaaaaaaaaaaaaaa

SEQ ID NO: 13428 - RNA, 5785 nt, synthetic construct
  source 1..5785: mol_type = other RNA
aggaaataagagagaaaagaagagtaagaagaaatataagagccaccatggcccctaagaagaagcgtaaagtgagccggatggaacgcctcgtctacgaggtgcggcagaagtgcagaaacatcgaggacatctgcatctcctgcggatctctgaacgtgaccctggagcacccactgttcatcggcggcatgtgccagaactgtaaaaactgttttctggagtgtgcctatcaatacgacgatgacggctaccagagctactgcaccatctgttgcggcggaagagaggtgctgatgtgtggaaataacaactgctgccggtgcttctgcgtggaatgcgtggacctgctggtgggccccggcgccgcccaggccgctattaaggaagatccttggaactgctacatgtgcggccacaagggcacatacggcctgctgagacggagagaggactggcctagcagactgcagatgttcttcgccaataaccacgaccaggagttcgacccccctaaggtgtaccctcccgtccccgccgagaagagaaagcccatccgggtcctgagcctgttcgatggcatcgccaccggtctgctggtgctgaaggacctgggcatccaggtggataggtacattgcctccgaggtgtgcgaggactccatcaccgtgggaatggtgcgtcatcagggcaagatcatgtacgtgggcgacgtgcggagcgtgacacagaagcatatccaggagtggggccctttcgacctggtgatcggcggcagcccttgcaatgacctgagcatcgtgaacccagcccggaagggcctgtacgagggaaccggcagactgttcttcgagttttacagactgctgcacgacgcccggcctaaggaaggcgacgaccggcccttcttttggctgttcgagaatgtggtggccatgggagtcagcgacaagcgggatattagccggttcctggagagcaaccccgtgatgatcgatgccaaggaagtgagcgccgcccaccgggccagatacttctggggcaatctgcctggcatgaacagacccctggccagcaccgtgaacgacaagctggagctgcaggagtgcctggagcacggccggatcgccaagttcagcaaggtgagaaccatcaccacccgaagcaacagcatcaaacaaggcaaggaccagcactttcctgtgttcatgaacgagaaggaggacatcctgtggtgtaccgagatggagagagtgttcgggttcccagtccactacacagatgtcagcaacatgtctagactggccagacagagactgctgggaagaagctggtccgtccctgtgatcagacacctgttcgcccctctgaaggagtacttcgcctgcgtgagcagcggcaacagcaacgccaacagccggggccccagcttctctagcggcctggtgccactgtccctgagagggagccacatgggccccatggagatctacaaaaccgtgagcgcctggaagcggcagcctgtgcgcgtgctgagcctgtttcggaatatcgataaagtcctgaaaagcctgggattcctggagagcggctctggctccggcggtggcaccctgaagtacgtggaggatgtgacaaacgtggtcagacgggatgtggagaagtggggccccttcgatctggtgtacggcagcacccaacccctgggcagctcttgtgaccggtgccctggctggtacatgtttcagttccaccggatcctgcagtacgccctgccgagacaggagtcccagcggccattcttttggattttcatggacaacttgctgctgaccgaggatgaccaggaaactaccactcggttcctgcagaccgaagccgtgaccctgcaggacgtgagaggccgggactaccagaacgccatgcgggtgtggtccaacatccctggactgaaaagcaagcacgcacctctgacccctaaagaagaggagtacctgcaggcccaggtgcggagcagaagcaagctggacgcccctaaggtggatctgctggtgaagaattgcctcctgcccctgagagagtacttcaagtatttcagccagaatagtctgcccctgggaggcagcggcggcggccaggccgaggtgaccttcgaggacgtggccgtgctgctgagccaggaggagtggggcctgctgggccccagccagaagggcctgtacagggaggtgatgctggagacctacaggaacctgctgagcctgggcgtgggcctggccgaccccaagcccgaggtgatcgtgcagctggagaggggcgacgagctgtgggtgctggacatgcacggcgccgagcagcccagcgtggacggcagcgccggcggcccaagcagcggcgcccctcctcccagcggcggcagcccagccggctccccaacctctaccgaggagggcacctctgagtccgccacccccgagagcggccctggcacctccaccgagcccagcgagggcagcgcacccggcagccctgccggcagccccacctccacagaggagggaaccagcaccgagcccagcgaaggcagcgccccaggcaccagcaccgagcctagtgagcaggagattaaacggatcaacaagatcagaagaagacttgtgaaagacagcaacaccaagaaggccggcaagacaggccccatgaaaaccctgctggttagagtgatgacacccgatctgagagagcggctggaaaacctgagaaagaagcctgaaaatatcccccagcccatcagcaatacatctagagccaacctgaataagctgctgaccgattacaccgaaatgaagaaggcgatcctgcatgtgtactgggaagagttccagaaggaccctgtgggcctgatgagccgggtggcccagcctgccagcaagaagatcgatcagaacaagctgaaacctgagatggacgagaagggcaacctgaccaccgccggctttgcctgctctcagtgtggccagcccctgttcgtgtacaagctggagcaggtgtctgagaagggcaaggcttacaccaactacttcggacggtgcaatgtggccgagcacgaaaagctgatcctgctggcccagctgaagcccgagaaggatagcgacgaagccgtgacatatagcctgggaaagtttgggcagagggccctggatttctacagcattcatgtgaccaaggagtccacccaccccgtgaagcccctggcccagatcgccggaaacagatacgcctccggacctgtgggaaaggccctgagcgacgcatgtatgggcacaatcgcctccttcctgtctaagtaccaggacatcatcatcgaacaccagaaggtggtgaagggcaaccagaagagactggagagcctgcgggagctggccggcaaggaaaacctggaataccctagcgtgaccctgccacctcagcctcacaccaaggagggcgttgatgcctacaacgaagtgatcgcccgggtgcgaatgtgggtgaacctgaacctgtggcagaagctgaagctaagcagagatgatgccaagcctctgctgagactgaagggattcccttcctttcctctggtcgagagacaggccaacgaagtggactggtgggacatggtgtgtaacgtgaagaagctgatcaacgagaaaaaggaggatggcaaggtgttttggcagaatctggctggctacaagagacaggaagccctgagaccatacctgagcagcgaggaagatcggaagaagggaaagaaattcgctcggtaccagctgggcgacctgctgctgcacctggaaaagaagcacggcgaggactggggaaaggtgtacgacgaggcctgggagcggattgacaagaaagtggaaggcctgagcaagcacatcaagctggaagaggaacggagaagcgaggacgcccagagcaaggccgccctgaccgactggctgcgggctaaggccagcttcgtgatcgagggcctgaaggaggccgacaaggacgagttctgcagatgcgagctgaagctgcagaagtggtacggggacctgcggggaaagcccttcgccatcgaagccgagaacagcatcctggacatcagcggcttcagcaagcagtacaactgtgccttcatctggcagaaggacggcgtgaagaagctgaacctgtacctgatcatcaactacttcaagggcggcaagctgcggttcaagaagatcaaacctgaagccttcgaagccaacagattctacaccgtgatcaacaaaaagagcggcgagatcgtgcccatggaggtgaacttcaacttcgacgaccccaacctgatcatcctgcctctggcctttggcaagagacagggcagagaattcatctggaacgacctgctgtccctggaaaccggcagcctgaagctggccaacggaagagtgatcgagaagacactgtacaacagaagaacccggcaggatgagcctgccctgttcgtggccctgaccttcgagcggcgggaggtcctggactcctccaatatcaaaccaatgaacctgatcggcgtggcaagaggcgaaaacatccccgccgtgatcgccctgaccgaccccgagggctgcccactgagccggtttaaggatagcctgggaaacccaacccacatcctgagaatcggcgagagctataaggagaagcagcggaccatccaggccaagaaggaggtggagcagcggagagccggcggctacagccggaagtacgccagcaaagccaagaatctggcagacgatatggtgagaaacaccgctagagatctgctgtactacgccgtgacccaggatgccatgctgatcttcgccaacctgagccggggcttcggccggcagggcaagcggaccttcatggccgagagacagtacacacggatggaggactggctgaccgccaagctggcctacgagggcctgagcaagacctacctgtccaagacactggcccagtacacctccaagacatgcagcaactgtgggtttaccatcaccagcgccgactacgacagggtgctggagaagctgaagaagacagcaacaggctggatgaccacaattaacggcaaggagctgaaggtggagggccagattacctactacaacagatacaagagacagaacgtagtcaaggacctgtccgtcgagctggatagactgagcgaagaatctgtgaacaacgacatctcctcctggacaaagggcagaagcggagaagctctgagcctcctgaagaaaagattctcccatagacccgtgcaggagaagttcgtgtgcctgaactgcggcttcgagacacacgcagccgagcaagccgccctgaacatcgccagatcctggctgttcctgcggagccaggagtacaagaaataccagacaaacaagacaaccggcaacaccgataagagagccttcgtcgagacctggcagtccttttaccggaagaagcttaaggaggtgtggaaacctgccgtgcggtctggcggatctggcggaggctccaccagccccaagaaaaagagaaaagtctaagctgccttctgcggggcttgccttctggccatgcccttcttctctcccttgcacctgtacctcttggtctttgaataaagcctgagtaggaaggctagcaaaaaaaaaaaaaaaaaaaaaaaaaaaaaaaaaaaaaaaaaaaaaaaaaaaaaaaaaaaaaaaaaaaaaaaaaaaaaaaa

SEQ ID NO: 13429 - RNA, 5785 nt, synthetic construct
  source 1..5785: mol_type = other RNA
aggaaataagagagaaaagaagagtaagaagaaatataagagccaccatggcccctaagaagaagcgtaaagtgagccggatggaacgcctcgtctacgaggtgcggcagaagtgcagaaacatcgaggacatctgcatctcctgcggatctctgaacgtgaccctggagcacccactgttcatcggcggcatgtgccagaactgtaaaaactgttttctggagtgtgcctatcaatacgacgatgacggctaccagagctactgcaccatctgttgcggcggaagagaggtgctgatgtgtggaaataacaactgctgccggtgcttctgcgtggaatgcgtggacctgctggtgggccccggcgccgcccaggccgctattaaggaagatccttggaactgctacatgtgcggccacaagggcacatacggcctgctgagacggagagaggactggcctagcagactgcagatgttcttcgccaataaccacgaccaggagttcgacccccctaaggtgtaccctcccgtccccgccgagaagagaaagcccatccgggtcctgagcctgttcgatggcatcgccaccggtctgctggtgctgaaggacctgggcatccaggtggataggtacattgcctccgaggtgtgcgaggactccatcaccgtgggaatggtgcgtcatcagggcaagatcatgtacgtgggcgacgtgcggagcgtgacacagaagcatatccaggagtggggccctttcgacctggtgatcggcggcagcccttgcaatgacctgagcatcgtgaacccagcccggaagggcctgtacgagggaaccggcagactgttcttcgagttttacagactgctgcacgacgcccggcctaaggaaggcgacgaccggcccttcttttggctgttcgagaatgtggtggccatgggagtcagcgacaagcgggatattagccggttcctggagagcaaccccgtgatgatcgatgccaaggaagtgagcgccgcccaccgggccagatacttctggggcaatctgcctggcatgaacagacccctggccagcaccgtgaacgacaagctggagctgcaggagtgcctggagcacggccggatcgccaagttcagcaaggtgagaaccatcaccacccgaagcaacagcatcaaacaaggcaaggaccagcactttcctgtgttcatgaacgagaaggaggacatcctgtggtgtaccgagatggagagagtgttcgggttcccagtccactacacagatgtcagcaacatgtctagactggccagacagagactgctgggaagaagctggtccgtccctgtgatcagacacctgttcgcccctctgaaggagtacttcgcctgcgtgagcagcggcaacagcaacgccaacagccggggccccagcttctctagcggcctggtgccactgtccctgagagggagccacatgggccccatggagatctacaaaaccgtgagcgcctggaagcggcagcctgtgcgcgtgctgagcctgtttcggaatatcgataaagtcctgaaaagcctgggattcctggagagcggctctggctccggcggtggcaccctgaagtacgtggaggatgtgacaaacgtggtcagacgggatgtggagaagtggggccccttcgatctggtgtacggcagcacccaacccctgggcagctcttgtgaccggtgccctggctggtacatgtttcagttccaccggatcctgcagtacgccctgccgagacaggagtcccagcggccattcttttggattttcatggacaacttgctgctgaccgaggatgaccaggaaactaccactcggttcctgcagaccgaagccgtgaccctgcaggacgtgagaggccgggactaccagaacgccatgcgggtgtggtccaacatccctggactgaaaagcaagcacgcacctctgacccctaaagaagaggagtacctgcaggcccaggtgcggagcagaagcaagctggacgcccctaaggtggatctgctggtgaagaattgcctcctgcccctgagagagtacttcaagtatttcagccagaatagtctgcccctgggaggcagcggcggcggcccccagagcctgctgagcttcggcgacgtggccgtggacttcagccaggaggagtgggagtacctggactacgaccagaggaccctgtacatggacgtgatgctggagaactacagcaacctggtgttcgtggagaaccacaggatctacggcaagtacgagaaggacctggaccagggcaccaagcacatcgcccacgaggacgtgatcatccaggagaagagctacaagtgcaacgagctgggcggcccaagcagcggcgcccctcctcccagcggcggcagcccagccggctccccaacctctaccgaggagggcacctctgagtccgccacccccgagagcggccctggcacctccaccgagcccagcgagggcagcgcacccggcagccctgccggcagccccacctccacagaggagggaaccagcaccgagcccagcgaaggcagcgccccaggcaccagcaccgagcctagtgagcaggagattaaacggatcaacaagatcagaagaagacttgtgaaagacagcaacaccaagaaggccggcaagacaggccccatgaaaaccctgctggttagagtgatgacacccgatctgagagagcggctggaaaacctgagaaagaagcctgaaaatatcccccagcccatcagcaatacatctagagccaacctgaataagctgctgaccgattacaccgaaatgaagaaggcgatcctgcatgtgtactgggaagagttccagaaggaccctgtgggcctgatgagccgggtggcccagcctgccagcaagaagatcgatcagaacaagctgaaacctgagatggacgagaagggcaacctgaccaccgccggctttgcctgctctcagtgtggccagcccctgttcgtgtacaagctggagcaggtgtctgagaagggcaaggcttacaccaactacttcggacggtgcaatgtggccgagcacgaaaagctgatcctgctggcccagctgaagcccgagaaggatagcgacgaagccgtgacatatagcctgggaaagtttgggcagagggccctggatttctacagcattcatgtgaccaaggagtccacccaccccgtgaagcccctggcccagatcgccggaaacagatacgcctccggacctgtgggaaaggccctgagcgacgcatgtatgggcacaatcgcctccttcctgtctaagtaccaggacatcatcatcgaacaccagaaggtggtgaagggcaaccagaagagactggagagcctgcgggagctggccggcaaggaaaacctggaataccctagcgtgaccctgccacctcagcctcacaccaaggagggcgttgatgcctacaacgaagtgatcgcccgggtgcgaatgtgggtgaacctgaacctgtggcagaagctgaagctaagcagagatgatgccaagcctctgctgagactgaagggattcccttcctttcctctggtcgagagacaggccaacgaagtggactggtgggacatggtgtgtaacgtgaagaagctgatcaacgagaaaaaggaggatggcaaggtgttttggcagaatctggctggctacaagagacaggaagccctgagaccatacctgagcagcgaggaagatcggaagaagggaaagaaattcgctcggtaccagctgggcgacctgctgctgcacctggaaaagaagcacggcgaggactggggaaaggtgtacgacgaggcctgggagcggattgacaagaaagtggaaggcctgagcaagcacatcaagctggaagaggaacggagaagcgaggacgcccagagcaaggccgccctgaccgactggctgcgggctaaggccagcttcgtgatcgagggcctgaaggaggccgacaaggacgagttctgcagatgcgagctgaagctgcagaagtggtacggggacctgcggggaaagcccttcgccatcgaagccgagaacagcatcctggacatcagcggcttcagcaagcagtacaactgtgccttcatctggcagaaggacggcgtgaagaagctgaacctgtacctgatcatcaactacttcaagggcggcaagctgcggttcaagaagatcaaacctgaagccttcgaagccaacagattctacaccgtgatcaacaaaaagagcggcgagatcgtgcccatggaggtgaacttcaacttcgacgaccccaacctgatcatcctgcctctggcctttggcaagagacagggcagagaattcatctggaacgacctgctgtccctggaaaccggcagcctgaagctggccaacggaagagtgatcgagaagacactgtacaacagaagaacccggcaggatgagcctgccctgttcgtggccctgaccttcgagcggcgggaggtcctggactcctccaatatcaaaccaatgaacctgatcggcgtggcaagaggcgaaaacatccccgccgtgatcgccctgaccgaccccgagggctgcccactgagccggtttaaggatagcctgggaaacccaacccacatcctgagaatcggcgagagctataaggagaagcagcggaccatccaggccaagaaggaggtggagcagcggagagccggcggctacagccggaagtacgccagcaaagccaagaatctggcagacgatatggtgagaaacaccgctagagatctgctgtactacgccgtgacccaggatgccatgctgatcttcgccaacctgagccggggcttcggccggcagggcaagcggaccttcatggccgagagacagtacacacggatggaggactggctgaccgccaagctggcctacgagggcctgagcaagacctacctgtccaagacactggcccagtacacctccaagacatgcagcaactgtgggtttaccatcaccagcgccgactacgacagggtgctggagaagctgaagaagacagcaacaggctggatgaccacaattaacggcaaggagctgaaggtggagggccagattacctactacaacagatacaagagacagaacgtagtcaaggacctgtccgtcgagctggatagactgagcgaagaatctgtgaacaacgacatctcctcctggacaaagggcagaagcggagaagctctgagcctcctgaagaaaagattctcccatagacccgtgcaggagaagttcgtgtgcctgaactgcggcttcgagacacacgcagccgagcaagccgccctgaacatcgccagatcctggctgttcctgcggagccaggagtacaagaaataccagacaaacaagacaaccggcaacaccgataagagagccttcgtcgagacctggcagtccttttaccggaagaagcttaaggaggtgtggaaacctgccgtgcggtctggcggatctggcggaggctccaccagccccaagaaaaagagaaaagtctaagctgccttctgcggggcttgccttctggccatgcccttcttctctcccttgcacctgtacctcttggtctttgaataaagcctgagtaggaaggctagcaaaaaaaaaaaaaaaaaaaaaaaaaaaaaaaaaaaaaaaaaaaaaaaaaaaaaaaaaaaaaaaaaaaaaaaaaaaaaaaa

SEQ ID NO: 13430 - RNA, 5785 nt, synthetic construct
  source 1..5785: mol_type = other RNA
aggaaataagagagaaaagaagagtaagaagaaatataagagccaccatggcccctaagaagaagcgtaaagtgagccggatggaacgcctcgtctacgaggtgcggcagaagtgcagaaacatcgaggacatctgcatctcctgcggatctctgaacgtgaccctggagcacccactgttcatcggcggcatgtgccagaactgtaaaaactgttttctggagtgtgcctatcaatacgacgatgacggctaccagagctactgcaccatctgttgcggcggaagagaggtgctgatgtgtggaaataacaactgctgccggtgcttctgcgtggaatgcgtggacctgctggtgggccccggcgccgcccaggccgctattaaggaagatccttggaactgctacatgtgcggccacaagggcacatacggcctgctgagacggagagaggactggcctagcagactgcagatgttcttcgccaataaccacgaccaggagttcgacccccctaaggtgtaccctcccgtccccgccgagaagagaaagcccatccgggtcctgagcctgttcgatggcatcgccaccggtctgctggtgctgaaggacctgggcatccaggtggataggtacattgcctccgaggtgtgcgaggactccatcaccgtgggaatggtgcgtcatcagggcaagatcatgtacgtgggcgacgtgcggagcgtgacacagaagcatatccaggagtggggccctttcgacctggtgatcggcggcagcccttgcaatgacctgagcatcgtgaacccagcccggaagggcctgtacgagggaaccggcagactgttcttcgagttttacagactgctgcacgacgcccggcctaaggaaggcgacgaccggcccttcttttggctgttcgagaatgtggtggccatgggagtcagcgacaagcgggatattagccggttcctggagagcaaccccgtgatgatcgatgccaaggaagtgagcgccgcccaccgggccagatacttctggggcaatctgcctggcatgaacagacccctggccagcaccgtgaacgacaagctggagctgcaggagtgcctggagcacggccggatcgccaagttcagcaaggtgagaaccatcaccacccgaagcaacagcatcaaacaaggcaaggaccagcactttcctgtgttcatgaacgagaaggaggacatcctgtggtgtaccgagatggagagagtgttcgggttcccagtccactacacagatgtcagcaacatgtctagactggccagacagagactgctgggaagaagctggtccgtccctgtgatcagacacctgttcgcccctctgaaggagtacttcgcctgcgtgagcagcggcaacagcaacgccaacagccggggccccagcttctctagcggcctggtgccactgtccctgagagggagccacatgggccccatggagatctacaaaaccgtgagcgcctggaagcggcagcctgtgcgcgtgctgagcctgtttcggaatatcgataaagtcctgaaaagcctgggattcctggagagcggctctggctccggcggtggcaccctgaagtacgtggaggatgtgacaaacgtggtcagacgggatgtggagaagtggggccccttcgatctggtgtacggcagcacccaacccctgggcagctcttgtgaccggtgccctggctggtacatgtttcagttccaccggatcctgcagtacgccctgccgagacaggagtcccagcggccattcttttggattttcatggacaacttgctgctgaccgaggatgaccaggaaactaccactcggttcctgcagaccgaagccgtgaccctgcaggacgtgagaggccgggactaccagaacgccatgcgggtgtggtccaacatccctggactgaaaagcaagcacgcacctctgacccctaaagaagaggagtacctgcaggcccaggtgcggagcagaagcaagctggacgcccctaaggtggatctgctggtgaagaattgcctcctgcccctgagagagtacttcaagtatttcagccagaatagtctgcccctgggaggcagcggcggcggcgccaggggcctggtgaccttcgaggacgtggccgtgtacttcagcagggaggagtggggcctgctgaacctgacccagaggagcctgtacagggacgtgatgctggagaacttcgccctgatcggcagcctgggcttcgcccccagcaggagccacgtggtggcccagctggagagcgaggaggagctgtgggtgcccagcatggtggacctgaccctgggcagcagggccgaggccaggaggggcggcccaagcagcggcgcccctcctcccagcggcggcagcccagccggctccccaacctctaccgaggagggcacctctgagtccgccacccccgagagcggccctggcacctccaccgagcccagcgagggcagcgcacccggcagccctgccggcagccccacctccacagaggagggaaccagcaccgagcccagcgaaggcagcgccccaggcaccagcaccgagcctagtgagcaggagattaaacggatcaacaagatcagaagaagacttgtgaaagacagcaacaccaagaaggccggcaagacaggccccatgaaaaccctgctggttagagtgatgacacccgatctgagagagcggctggaaaacctgagaaagaagcctgaaaatatcccccagcccatcagcaatacatctagagccaacctgaataagctgctgaccgattacaccgaaatgaagaaggcgatcctgcatgtgtactgggaagagttccagaaggaccctgtgggcctgatgagccgggtggcccagcctgccagcaagaagatcgatcagaacaagctgaaacctgagatggacgagaagggcaacctgaccaccgccggctttgcctgctctcagtgtggccagcccctgttcgtgtacaagctggagcaggtgtctgagaagggcaaggcttacaccaactacttcggacggtgcaatgtggccgagcacgaaaagctgatcctgctggcccagctgaagcccgagaaggatagcgacgaagccgtgacatatagcctgggaaagtttgggcagagggccctggatttctacagcattcatgtgaccaaggagtccacccaccccgtgaagcccctggcccagatcgccggaaacagatacgcctccggacctgtgggaaaggccctgagcgacgcatgtatgggcacaatcgcctccttcctgtctaagtaccaggacatcatcatcgaacaccagaaggtggtgaagggcaaccagaagagactggagagcctgcgggagctggccggcaaggaaaacctggaataccctagcgtgaccctgccacctcagcctcacaccaaggagggcgttgatgcctacaacgaagtgatcgcccgggtgcgaatgtgggtgaacctgaacctgtggcagaagctgaagctaagcagagatgatgccaagcctctgctgagactgaagggattcccttcctttcctctggtcgagagacaggccaacgaagtggactggtgggacatggtgtgtaacgtgaagaagctgatcaacgagaaaaaggaggatggcaaggtgttttggcagaatctggctggctacaagagacaggaagccctgagaccatacctgagcagcgaggaagatcggaagaagggaaagaaattcgctcggtaccagctgggcgacctgctgctgcacctggaaaagaagcacggcgaggactggggaaaggtgtacgacgaggcctgggagcggattgacaagaaagtggaaggcctgagcaagcacatcaagctggaagaggaacggagaagcgaggacgcccagagcaaggccgccctgaccgactggctgcgggctaaggccagcttcgtgatcgagggcctgaaggaggccgacaaggacgagttctgcagatgcgagctgaagctgcagaagtggtacggggacctgcggggaaagcccttcgccatcgaagccgagaacagcatcctggacatcagcggcttcagcaagcagtacaactgtgccttcatctggcagaaggacggcgtgaagaagctgaacctgtacctgatcatcaactacttcaagggcggcaagctgcggttcaagaagatcaaacctgaagccttcgaagccaacagattctacaccgtgatcaacaaaaagagcggcgagatcgtgcccatggaggtgaacttcaacttcgacgaccccaacctgatcatcctgcctctggcctttggcaagagacagggcagagaattcatctggaacgacctgctgtccctggaaaccggcagcctgaagctggccaacggaagagtgatcgagaagacactgtacaacagaagaacccggcaggatgagcctgccctgttcgtggccctgaccttcgagcggcgggaggtcctggactcctccaatatcaaaccaatgaacctgatcggcgtggcaagaggcgaaaacatccccgccgtgatcgccctgaccgaccccgagggctgcccactgagccggtttaaggatagcctgggaaacccaacccacatcctgagaatcggcgagagctataaggagaagcagcggaccatccaggccaagaaggaggtggagcagcggagagccggcggctacagccggaagtacgccagcaaagccaagaatctggcagacgatatggtgagaaacaccgctagagatctgctgtactacgccgtgacccaggatgccatgctgatcttcgccaacctgagccggggcttcggccggcagggcaagcggaccttcatggccgagagacagtacacacggatggaggactggctgaccgccaagctggcctacgagggcctgagcaagacctacctgtccaagacactggcccagtacacctccaagacatgcagcaactgtgggtttaccatcaccagcgccgactacgacagggtgctggagaagctgaagaagacagcaacaggctggatgaccacaattaacggcaaggagctgaaggtggagggccagattacctactacaacagatacaagagacagaacgtagtcaaggacctgtccgtcgagctggatagactgagcgaagaatctgtgaacaacgacatctcctcctggacaaagggcagaagcggagaagctctgagcctcctgaagaaaagattctcccatagacccgtgcaggagaagttcgtgtgcctgaactgcggcttcgagacacacgcagccgagcaagccgccctgaacatcgccagatcctggctgttcctgcggagccaggagtacaagaaataccagacaaacaagacaaccggcaacaccgataagagagccttcgtcgagacctggcagtccttttaccggaagaagcttaaggaggtgtggaaacctgccgtgcggtctggcggatctggcggaggctccaccagccccaagaaaaagagaaaagtctaagctgccttctgcggggcttgccttctggccatgcccttcttctctcccttgcacctgtacctcttggtctttgaataaagcctgagtaggaaggctagcaaaaaaaaaaaaaaaaaaaaaaaaaaaaaaaaaaaaaaaaaaaaaaaaaaaaaaaaaaaaaaaaaaaaaaaaaaaaaaaa

SEQ ID NO: 13431 - RNA, 5785 nt, synthetic construct
  source 1..5785: mol_type = other RNA
aggaaataagagagaaaagaagagtaagaagaaatataagagccaccatggcccctaagaagaagcgtaaagtgagccggatggaacgcctcgtctacgaggtgcggcagaagtgcagaaacatcgaggacatctgcatctcctgcggatctctgaacgtgaccctggagcacccactgttcatcggcggcatgtgccagaactgtaaaaactgttttctggagtgtgcctatcaatacgacgatgacggctaccagagctactgcaccatctgttgcggcggaagagaggtgctgatgtgtggaaataacaactgctgccggtgcttctgcgtggaatgcgtggacctgctggtgggccccggcgccgcccaggccgctattaaggaagatccttggaactgctacatgtgcggccacaagggcacatacggcctgctgagacggagagaggactggcctagcagactgcagatgttcttcgccaataaccacgaccaggagttcgacccccctaaggtgtaccctcccgtccccgccgagaagagaaagcccatccgggtcctgagcctgttcgatggcatcgccaccggtctgctggtgctgaaggacctgggcatccaggtggataggtacattgcctccgaggtgtgcgaggactccatcaccgtgggaatggtgcgtcatcagggcaagatcatgtacgtgggcgacgtgcggagcgtgacacagaagcatatccaggagtggggccctttcgacctggtgatcggcggcagcccttgcaatgacctgagcatcgtgaacccagcccggaagggcctgtacgagggaaccggcagactgttcttcgagttttacagactgctgcacgacgcccggcctaaggaaggcgacgaccggcccttcttttggctgttcgagaatgtggtggccatgggagtcagcgacaagcgggatattagccggttcctggagagcaaccccgtgatgatcgatgccaaggaagtgagcgccgcccaccgggccagatacttctggggcaatctgcctggcatgaacagacccctggccagcaccgtgaacgacaagctggagctgcaggagtgcctggagcacggccggatcgccaagttcagcaaggtgagaaccatcaccacccgaagcaacagcatcaaacaaggcaaggaccagcactttcctgtgttcatgaacgagaaggaggacatcctgtggtgtaccgagatggagagagtgttcgggttcccagtccactacacagatgtcagcaacatgtctagactggccagacagagactgctgggaagaagctggtccgtccctgtgatcagacacctgttcgcccctctgaaggagtacttcgcctgcgtgagcagcggcaacagcaacgccaacagccggggccccagcttctctagcggcctggtgccactgtccctgagagggagccacatgggccccatggagatctacaaaaccgtgagcgcctggaagcggcagcctgtgcgcgtgctgagcctgtttcggaatatcgataaagtcctgaaaagcctgggattcctggagagcggctctggctccggcggtggcaccctgaagtacgtggaggatgtgacaaacgtggtcagacgggatgtggagaagtggggccccttcgatctggtgtacggcagcacccaacccctgggcagctcttgtgaccggtgccctggctggtacatgtttcagttccaccggatcctgcagtacgccctgccgagacaggagtcccagcggccattcttttggattttcatggacaacttgctgctgaccgaggatgaccaggaaactaccactcggttcctgcagaccgaagccgtgaccctgcaggacgtgagaggccgggactaccagaacgccatgcgggtgtggtccaacatccctggactgaaaagcaagcacgcacctctgacccctaaagaagaggagtacctgcaggcccaggtgcggagcagaagcaagctggacgcccctaaggtggatctgctggtgaagaattgcctcctgcccctgagagagtacttcaagtatttcagccagaatagtctgcccctgggaggcagcggcggcggcccccaggagagcgtgaccttcaaggacgtggccgtggacttcacctgggaggagtggggctacctggacaccagccagaaggagctgtactgggaggtgatgctggagaactacaggaacctggtgagcctgggcctggccgacagcaacgtggacatgatcagccagctggagagcggcgaggcccagggcatccccgtggacagcgtgctgaccagctgctggcccgacggcgacaggaggggcggcccaagcagcggcgcccctcctcccagcggcggcagcccagccggctccccaacctctaccgaggagggcacctctgagtccgccacccccgagagcggccctggcacctccaccgagcccagcgagggcagcgcacccggcagccctgccggcagccccacctccacagaggagggaaccagcaccgagcccagcgaaggcagcgccccaggcaccagcaccgagcctagtgagcaggagattaaacggatcaacaagatcagaagaagacttgtgaaagacagcaacaccaagaaggccggcaagacaggccccatgaaaaccctgctggttagagtgatgacacccgatctgagagagcggctggaaaacctgagaaagaagcctgaaaatatcccccagcccatcagcaatacatctagagccaacctgaataagctgctgaccgattacaccgaaatgaagaaggcgatcctgcatgtgtactgggaagagttccagaaggaccctgtgggcctgatgagccgggtggcccagcctgccagcaagaagatcgatcagaacaagctgaaacctgagatggacgagaagggcaacctgaccaccgccggctttgcctgctctcagtgtggccagcccctgttcgtgtacaagctggagcaggtgtctgagaagggcaaggcttacaccaactacttcggacggtgcaatgtggccgagcacgaaaagctgatcctgctggcccagctgaagcccgagaaggatagcgacgaagccgtgacatatagcctgggaaagtttgggcagagggccctggatttctacagcattcatgtgaccaaggagtccacccaccccgtgaagcccctggcccagatcgccggaaacagatacgcctccggacctgtgggaaaggccctgagcgacgcatgtatgggcacaatcgcctccttcctgtctaagtaccaggacatcatcatcgaacaccagaaggtggtgaagggcaaccagaagagactggagagcctgcgggagctggccggcaaggaaaacctggaataccctagcgtgaccctgccacctcagcctcacaccaaggagggcgttgatgcctacaacgaagtgatcgcccgggtgcgaatgtgggtgaacctgaacctgtggcagaagctgaagctaagcagagatgatgccaagcctctgctgagactgaagggattcccttcctttcctctggtcgagagacaggccaacgaagtggactggtgggacatggtgtgtaacgtgaagaagctgatcaacgagaaaaaggaggatggcaaggtgttttggcagaatctggctggctacaagagacaggaagccctgagaccatacctgagcagcgaggaagatcggaagaagggaaagaaattcgctcggtaccagctgggcgacctgctgctgcacctggaaaagaagcacggcgaggactggggaaaggtgtacgacgaggcctgggagcggattgacaagaaagtggaaggcctgagcaagcacatcaagctggaagaggaacggagaagcgaggacgcccagagcaaggccgccctgaccgactggctgcgggctaaggccagcttcgtgatcgagggcctgaaggaggccgacaaggacgagttctgcagatgcgagctgaagctgcagaagtggtacggggacctgcggggaaagcccttcgccatcgaagccgagaacagcatcctggacatcagcggcttcagcaagcagtacaactgtgccttcatctggcagaaggacggcgtgaagaagctgaacctgtacctgatcatcaactacttcaagggcggcaagctgcggttcaagaagatcaaacctgaagccttcgaagccaacagattctacaccgtgatcaacaaaaagagcggcgagatcgtgcccatggaggtgaacttcaacttcgacgaccccaacctgatcatcctgcctctggcctttggcaagagacagggcagagaattcatctggaacgacctgctgtccctggaaaccggcagcctgaagctggccaacggaagagtgatcgagaagacactgtacaacagaagaacccggcaggatgagcctgccctgttcgtggccctgaccttcgagcggcgggaggtcctggactcctccaatatcaaaccaatgaacctgatcggcgtggcaagaggcgaaaacatccccgccgtgatcgccctgaccgaccccgagggctgcccactgagccggtttaaggatagcctgggaaacccaacccacatcctgagaatcggcgagagctataaggagaagcagcggaccatccaggccaagaaggaggtggagcagcggagagccggcggctacagccggaagtacgccagcaaagccaagaatctggcagacgatatggtgagaaacaccgctagagatctgctgtactacgccgtgacccaggatgccatgctgatcttcgccaacctgagccggggcttcggccggcagggcaagcggaccttcatggccgagagacagtacacacggatggaggactggctgaccgccaagctggcctacgagggcctgagcaagacctacctgtccaagacactggcccagtacacctccaagacatgcagcaactgtgggtttaccatcaccagcgccgactacgacagggtgctggagaagctgaagaagacagcaacaggctggatgaccacaattaacggcaaggagctgaaggtggagggccagattacctactacaacagatacaagagacagaacgtagtcaaggacctgtccgtcgagctggatagactgagcgaagaatctgtgaacaacgacatctcctcctggacaaagggcagaagcggagaagctctgagcctcctgaagaaaagattctcccatagacccgtgcaggagaagttcgtgtgcctgaactgcggcttcgagacacacgcagccgagcaagccgccctgaacatcgccagatcctggctgttcctgcggagccaggagtacaagaaataccagacaaacaagacaaccggcaacaccgataagagagccttcgtcgagacctggcagtccttttaccggaagaagcttaaggaggtgtggaaacctgccgtgcggtctggcggatctggcggaggctccaccagccccaagaaaaagagaaaagtctaagctgccttctgcggggcttgccttctggccatgcccttcttctctcccttgcacctgtacctcttggtctttgaataaagcctgagtaggaaggctagcaaaaaaaaaaaaaaaaaaaaaaaaaaaaaaaaaaaaaaaaaaaaaaaaaaaaaaaaaaaaaaaaaaaaaaaaaaaaaaaa

SEQ ID NO: 13432 - RNA, 5785 nt, synthetic construct
  source 1..5785: mol_type = other RNA
aggaaataagagagaaaagaagagtaagaagaaatataagagccaccatggcccctaagaagaagcgtaaagtgagccggatggaacgcctcgtctacgaggtgcggcagaagtgcagaaacatcgaggacatctgcatctcctgcggatctctgaacgtgaccctggagcacccactgttcatcggcggcatgtgccagaactgtaaaaactgttttctggagtgtgcctatcaatacgacgatgacggctaccagagctactgcaccatctgttgcggcggaagagaggtgctgatgtgtggaaataacaactgctgccggtgcttctgcgtggaatgcgtggacctgctggtgggccccggcgccgcccaggccgctattaaggaagatccttggaactgctacatgtgcggccacaagggcacatacggcctgctgagacggagagaggactggcctagcagactgcagatgttcttcgccaataaccacgaccaggagttcgacccccctaaggtgtaccctcccgtccccgccgagaagagaaagcccatccgggtcctgagcctgttcgatggcatcgccaccggtctgctggtgctgaaggacctgggcatccaggtggataggtacattgcctccgaggtgtgcgaggactccatcaccgtgggaatggtgcgtcatcagggcaagatcatgtacgtgggcgacgtgcggagcgtgacacagaagcatatccaggagtggggccctttcgacctggtgatcggcggcagcccttgcaatgacctgagcatcgtgaacccagcccggaagggcctgtacgagggaaccggcagactgttcttcgagttttacagactgctgcacgacgcccggcctaaggaaggcgacgaccggcccttcttttggctgttcgagaatgtggtggccatgggagtcagcgacaagcgggatattagccggttcctggagagcaaccccgtgatgatcgatgccaaggaagtgagcgccgcccaccgggccagatacttctggggcaatctgcctggcatgaacagacccctggccagcaccgtgaacgacaagctggagctgcaggagtgcctggagcacggccggatcgccaagttcagcaaggtgagaaccatcaccacccgaagcaacagcatcaaacaaggcaaggaccagcactttcctgtgttcatgaacgagaaggaggacatcctgtggtgtaccgagatggagagagtgttcgggttcccagtccactacacagatgtcagcaacatgtctagactggccagacagagactgctgggaagaagctggtccgtccctgtgatcagacacctgttcgcccctctgaaggagtacttcgcctgcgtgagcagcggcaacagcaacgccaacagccggggccccagcttctctagcggcctggtgccactgtccctgagagggagccacatgggccccatggagatctacaaaaccgtgagcgcctggaagcggcagcctgtgcgcgtgctgagcctgtttcggaatatcgataaagtcctgaaaagcctgggattcctggagagcggctctggctccggcggtggcaccctgaagtacgtggaggatgtgacaaacgtggtcagacgggatgtggagaagtggggccccttcgatctggtgtacggcagcacccaacccctgggcagctcttgtgaccggtgccctggctggtacatgtttcagttccaccggatcctgcagtacgccctgccgagacaggagtcccagcggccattcttttggattttcatggacaacttgctgctgaccgaggatgaccaggaaactaccactcggttcctgcagaccgaagccgtgaccctgcaggacgtgagaggccgggactaccagaacgccatgcgggtgtggtccaacatccctggactgaaaagcaagcacgcacctctgacccctaaagaagaggagtacctgcaggcccaggtgcggagcagaagcaagctggacgcccctaaggtggatctgctggtgaagaattgcctcctgcccctgagagagtacttcaagtatttcagccagaatagtctgcccctgggaggcagcggcggcggcgcccaggtgctggtgaccttccaggacgtggccgtggacttcacccaggaggagtggaggctgctggacctgggccagaaggagctgtacaaggaggtgatgctggagaacgtgcagaacatgctgttcctgggcctgcccgtgcccagggaggactggatcagccacttcgaccagggcagggccccctggatgctggagggcgagggccccagcaacagcaggctggacggccagaggaggggcggcccaagcagcggcgcccctcctcccagcggcggcagcccagccggctccccaacctctaccgaggagggcacctctgagtccgccacccccgagagcggccctggcacctccaccgagcccagcgagggcagcgcacccggcagccctgccggcagccccacctccacagaggagggaaccagcaccgagcccagcgaaggcagcgccccaggcaccagcaccgagcctagtgagcaggagattaaacggatcaacaagatcagaagaagacttgtgaaagacagcaacaccaagaaggccggcaagacaggccccatgaaaaccctgctggttagagtgatgacacccgatctgagagagcggctggaaaacctgagaaagaagcctgaaaatatcccccagcccatcagcaatacatctagagccaacctgaataagctgctgaccgattacaccgaaatgaagaaggcgatcctgcatgtgtactgggaagagttccagaaggaccctgtgggcctgatgagccgggtggcccagcctgccagcaagaagatcgatcagaacaagctgaaacctgagatggacgagaagggcaacctgaccaccgccggctttgcctgctctcagtgtggccagcccctgttcgtgtacaagctggagcaggtgtctgagaagggcaaggcttacaccaactacttcggacggtgcaatgtggccgagcacgaaaagctgatcctgctggcccagctgaagcccgagaaggatagcgacgaagccgtgacatatagcctgggaaagtttgggcagagggccctggatttctacagcattcatgtgaccaaggagtccacccaccccgtgaagcccctggcccagatcgccggaaacagatacgcctccggacctgtgggaaaggccctgagcgacgcatgtatgggcacaatcgcctccttcctgtctaagtaccaggacatcatcatcgaacaccagaaggtggtgaagggcaaccagaagagactggagagcctgcgggagctggccggcaaggaaaacctggaataccctagcgtgaccctgccacctcagcctcacaccaaggagggcgttgatgcctacaacgaagtgatcgcccgggtgcgaatgtgggtgaacctgaacctgtggcagaagctgaagctaagcagagatgatgccaagcctctgctgagactgaagggattcccttcctttcctctggtcgagagacaggccaacgaagtggactggtgggacatggtgtgtaacgtgaagaagctgatcaacgagaaaaaggaggatggcaaggtgttttggcagaatctggctggctacaagagacaggaagccctgagaccatacctgagcagcgaggaagatcggaagaagggaaagaaattcgctcggtaccagctgggcgacctgctgctgcacctggaaaagaagcacggcgaggactggggaaaggtgtacgacgaggcctgggagcggattgacaagaaagtggaaggcctgagcaagcacatcaagctggaagaggaacggagaagcgaggacgcccagagcaaggccgccctgaccgactggctgcgggctaaggccagcttcgtgatcgagggcctgaaggaggccgacaaggacgagttctgcagatgcgagctgaagctgcagaagtggtacggggacctgcggggaaagcccttcgccatcgaagccgagaacagcatcctggacatcagcggcttcagcaagcagtacaactgtgccttcatctggcagaaggacggcgtgaagaagctgaacctgtacctgatcatcaactacttcaagggcggcaagctgcggttcaagaagatcaaacctgaagccttcgaagccaacagattctacaccgtgatcaacaaaaagagcggcgagatcgtgcccatggaggtgaacttcaacttcgacgaccccaacctgatcatcctgcctctggcctttggcaagagacagggcagagaattcatctggaacgacctgctgtccctggaaaccggcagcctgaagctggccaacggaagagtgatcgagaagacactgtacaacagaagaacccggcaggatgagcctgccctgttcgtggccctgaccttcgagcggcgggaggtcctggactcctccaatatcaaaccaatgaacctgatcggcgtggcaagaggcgaaaacatccccgccgtgatcgccctgaccgaccccgagggctgcccactgagccggtttaaggatagcctgggaaacccaacccacatcctgagaatcggcgagagctataaggagaagcagcggaccatccaggccaagaaggaggtggagcagcggagagccggcggctacagccggaagtacgccagcaaagccaagaatctggcagacgatatggtgagaaacaccgctagagatctgctgtactacgccgtgacccaggatgccatgctgatcttcgccaacctgagccggggcttcggccggcagggcaagcggaccttcatggccgagagacagtacacacggatggaggactggctgaccgccaagctggcctacgagggcctgagcaagacctacctgtccaagacactggcccagtacacctccaagacatgcagcaactgtgggtttaccatcaccagcgccgactacgacagggtgctggagaagctgaagaagacagcaacaggctggatgaccacaattaacggcaaggagctgaaggtggagggccagattacctactacaacagatacaagagacagaacgtagtcaaggacctgtccgtcgagctggatagactgagcgaagaatctgtgaacaacgacatctcctcctggacaaagggcagaagcggagaagctctgagcctcctgaagaaaagattctcccatagacccgtgcaggagaagttcgtgtgcctgaactgcggcttcgagacacacgcagccgagcaagccgccctgaacatcgccagatcctggctgttcctgcggagccaggagtacaagaaataccagacaaacaagacaaccggcaacaccgataagagagccttcgtcgagacctggcagtccttttaccggaagaagcttaaggaggtgtggaaacctgccgtgcggtctggcggatctggcggaggctccaccagccccaagaaaaagagaaaagtctaagctgccttctgcggggcttgccttctggccatgcccttcttctctcccttgcacctgtacctcttggtctttgaataaagcctgagtaggaaggctagcaaaaaaaaaaaaaaaaaaaaaaaaaaaaaaaaaaaaaaaaaaaaaaaaaaaaaaaaaaaaaaaaaaaaaaaaaaaaaaaa

SEQ ID NO: 13433 - RNA, 5785 nt, synthetic construct
  source 1..5785: mol_type = other RNA
aggaaataagagagaaaagaagagtaagaagaaatataagagccaccatggcccctaagaagaagcgtaaagtgagccggatggaacgcctcgtctacgaggtgcggcagaagtgcagaaacatcgaggacatctgcatctcctgcggatctctgaacgtgaccctggagcacccactgttcatcggcggcatgtgccagaactgtaaaaactgttttctggagtgtgcctatcaatacgacgatgacggctaccagagctactgcaccatctgttgcggcggaagagaggtgctgatgtgtggaaataacaactgctgccggtgcttctgcgtggaatgcgtggacctgctggtgggccccggcgccgcccaggccgctattaaggaagatccttggaactgctacatgtgcggccacaagggcacatacggcctgctgagacggagagaggactggcctagcagactgcagatgttcttcgccaataaccacgaccaggagttcgacccccctaaggtgtaccctcccgtccccgccgagaagagaaagcccatccgggtcctgagcctgttcgatggcatcgccaccggtctgctggtgctgaaggacctgggcatccaggtggataggtacattgcctccgaggtgtgcgaggactccatcaccgtgggaatggtgcgtcatcagggcaagatcatgtacgtgggcgacgtgcggagcgtgacacagaagcatatccaggagtggggccctttcgacctggtgatcggcggcagcccttgcaatgacctgagcatcgtgaacccagcccggaagggcctgtacgagggaaccggcagactgttcttcgagttttacagactgctgcacgacgcccggcctaaggaaggcgacgaccggcccttcttttggctgttcgagaatgtggtggccatgggagtcagcgacaagcgggatattagccggttcctggagagcaaccccgtgatgatcgatgccaaggaagtgagcgccgcccaccgggccagatacttctggggcaatctgcctggcatgaacagacccctggccagcaccgtgaacgacaagctggagctgcaggagtgcctggagcacggccggatcgccaagttcagcaaggtgagaaccatcaccacccgaagcaacagcatcaaacaaggcaaggaccagcactttcctgtgttcatgaacgagaaggaggacatcctgtggtgtaccgagatggagagagtgttcgggttcccagtccactacacagatgtcagcaacatgtctagactggccagacagagactgctgggaagaagctggtccgtccctgtgatcagacacctgttcgcccctctgaaggagtacttcgcctgcgtgagcagcggcaacagcaacgccaacagccggggccccagcttctctagcggcctggtgccactgtccctgagagggagccacatgggccccatggagatctacaaaaccgtgagcgcctggaagcggcagcctgtgcgcgtgctgagcctgtttcggaatatcgataaagtcctgaaaagcctgggattcctggagagcggctctggctccggcggtggcaccctgaagtacgtggaggatgtgacaaacgtggtcagacgggatgtggagaagtggggccccttcgatctggtgtacggcagcacccaacccctgggcagctcttgtgaccggtgccctggctggtacatgtttcagttccaccggatcctgcagtacgccctgccgagacaggagtcccagcggccattcttttggattttcatggacaacttgctgctgaccgaggatgaccaggaaactaccactcggttcctgcagaccgaagccgtgaccctgcaggacgtgagaggccgggactaccagaacgccatgcgggtgtggtccaacatccctggactgaaaagcaagcacgcacctctgacccctaaagaagaggagtacctgcaggcccaggtgcggagcagaagcaagctggacgcccctaaggtggatctgctggtgaagaattgcctcctgcccctgagagagtacttcaagtatttcagccagaatagtctgcccctgggaggcagcggcggcggcatgcccctgaaggccaggtaccaggagatggtgaccttcgaggacgtggccgtgcacttcaccaagaccgagtggaccggcctgagccccgcccagagggccctgtacaggagcgtgatgctggagaacttcggcaacctgaccgccctgggctaccccgtgcccaagcccgccctgatcagcctgctggagggcggcgacatggactggggcctggaggcccaggacgacccccccgccgagggcggcccaagcagcggcgcccctcctcccagcggcggcagcccagccggctccccaacctctaccgaggagggcacctctgagtccgccacccccgagagcggccctggcacctccaccgagcccagcgagggcagcgcacccggcagccctgccggcagccccacctccacagaggagggaaccagcaccgagcccagcgaaggcagcgccccaggcaccagcaccgagcctagtgagcaggagattaaacggatcaacaagatcagaagaagacttgtgaaagacagcaacaccaagaaggccggcaagacaggccccatgaaaaccctgctggttagagtgatgacacccgatctgagagagcggctggaaaacctgagaaagaagcctgaaaatatcccccagcccatcagcaatacatctagagccaacctgaataagctgctgaccgattacaccgaaatgaagaaggcgatcctgcatgtgtactgggaagagttccagaaggaccctgtgggcctgatgagccgggtggcccagcctgccagcaagaagatcgatcagaacaagctgaaacctgagatggacgagaagggcaacctgaccaccgccggctttgcctgctctcagtgtggccagcccctgttcgtgtacaagctggagcaggtgtctgagaagggcaaggcttacaccaactacttcggacggtgcaatgtggccgagcacgaaaagctgatcctgctggcccagctgaagcccgagaaggatagcgacgaagccgtgacatatagcctgggaaagtttgggcagagggccctggatttctacagcattcatgtgaccaaggagtccacccaccccgtgaagcccctggcccagatcgccggaaacagatacgcctccggacctgtgggaaaggccctgagcgacgcatgtatgggcacaatcgcctccttcctgtctaagtaccaggacatcatcatcgaacaccagaaggtggtgaagggcaaccagaagagactggagagcctgcgggagctggccggcaaggaaaacctggaataccctagcgtgaccctgccacctcagcctcacaccaaggagggcgttgatgcctacaacgaagtgatcgcccgggtgcgaatgtgggtgaacctgaacctgtggcagaagctgaagctaagcagagatgatgccaagcctctgctgagactgaagggattcccttcctttcctctggtcgagagacaggccaacgaagtggactggtgggacatggtgtgtaacgtgaagaagctgatcaacgagaaaaaggaggatggcaaggtgttttggcagaatctggctggctacaagagacaggaagccctgagaccatacctgagcagcgaggaagatcggaagaagggaaagaaattcgctcggtaccagctgggcgacctgctgctgcacctggaaaagaagcacggcgaggactggggaaaggtgtacgacgaggcctgggagcggattgacaagaaagtggaaggcctgagcaagcacatcaagctggaagaggaacggagaagcgaggacgcccagagcaaggccgccctgaccgactggctgcgggctaaggccagcttcgtgatcgagggcctgaaggaggccgacaaggacgagttctgcagatgcgagctgaagctgcagaagtggtacggggacctgcggggaaagcccttcgccatcgaagccgagaacagcatcctggacatcagcggcttcagcaagcagtacaactgtgccttcatctggcagaaggacggcgtgaagaagctgaacctgtacctgatcatcaactacttcaagggcggcaagctgcggttcaagaagatcaaacctgaagccttcgaagccaacagattctacaccgtgatcaacaaaaagagcggcgagatcgtgcccatggaggtgaacttcaacttcgacgaccccaacctgatcatcctgcctctggcctttggcaagagacagggcagagaattcatctggaacgacctgctgtccctggaaaccggcagcctgaagctggccaacggaagagtgatcgagaagacactgtacaacagaagaacccggcaggatgagcctgccctgttcgtggccctgaccttcgagcggcgggaggtcctggactcctccaatatcaaaccaatgaacctgatcggcgtggcaagaggcgaaaacatccccgccgtgatcgccctgaccgaccccgagggctgcccactgagccggtttaaggatagcctgggaaacccaacccacatcctgagaatcggcgagagctataaggagaagcagcggaccatccaggccaagaaggaggtggagcagcggagagccggcggctacagccggaagtacgccagcaaagccaagaatctggcagacgatatggtgagaaacaccgctagagatctgctgtactacgccgtgacccaggatgccatgctgatcttcgccaacctgagccggggcttcggccggcagggcaagcggaccttcatggccgagagacagtacacacggatggaggactggctgaccgccaagctggcctacgagggcctgagcaagacctacctgtccaagacactggcccagtacacctccaagacatgcagcaactgtgggtttaccatcaccagcgccgactacgacagggtgctggagaagctgaagaagacagcaacaggctggatgaccacaattaacggcaaggagctgaaggtggagggccagattacctactacaacagatacaagagacagaacgtagtcaaggacctgtccgtcgagctggatagactgagcgaagaatctgtgaacaacgacatctcctcctggacaaagggcagaagcggagaagctctgagcctcctgaagaaaagattctcccatagacccgtgcaggagaagttcgtgtgcctgaactgcggcttcgagacacacgcagccgagcaagccgccctgaacatcgccagatcctggctgttcctgcggagccaggagtacaagaaataccagacaaacaagacaaccggcaacaccgataagagagccttcgtcgagacctggcagtccttttaccggaagaagcttaaggaggtgtggaaacctgccgtgcggtctggcggatctggcggaggctccaccagccccaagaaaaagagaaaagtctaagctgccttctgcggggcttgccttctggccatgcccttcttctctcccttgcacctgtacctcttggtctttgaataaagcctgagtaggaaggctagcaaaaaaaaaaaaaaaaaaaaaaaaaaaaaaaaaaaaaaaaaaaaaaaaaaaaaaaaaaaaaaaaaaaaaaaaaaaaaaaa

SEQ ID NO: 13434 - RNA, 5785 nt, synthetic construct
  source 1..5785: mol_type = other RNA
aggaaataagagagaaaagaagagtaagaagaaatataagagccaccatggcccctaagaagaagcgtaaagtgagccggatggaacgcctcgtctacgaggtgcggcagaagtgcagaaacatcgaggacatctgcatctcctgcggatctctgaacgtgaccctggagcacccactgttcatcggcggcatgtgccagaactgtaaaaactgttttctggagtgtgcctatcaatacgacgatgacggctaccagagctactgcaccatctgttgcggcggaagagaggtgctgatgtgtggaaataacaactgctgccggtgcttctgcgtggaatgcgtggacctgctggtgggccccggcgccgcccaggccgctattaaggaagatccttggaactgctacatgtgcggccacaagggcacatacggcctgctgagacggagagaggactggcctagcagactgcagatgttcttcgccaataaccacgaccaggagttcgacccccctaaggtgtaccctcccgtccccgccgagaagagaaagcccatccgggtcctgagcctgttcgatggcatcgccaccggtctgctggtgctgaaggacctgggcatccaggtggataggtacattgcctccgaggtgtgcgaggactccatcaccgtgggaatggtgcgtcatcagggcaagatcatgtacgtgggcgacgtgcggagcgtgacacagaagcatatccaggagtggggccctttcgacctggtgatcggcggcagcccttgcaatgacctgagcatcgtgaacccagcccggaagggcctgtacgagggaaccggcagactgttcttcgagttttacagactgctgcacgacgcccggcctaaggaaggcgacgaccggcccttcttttggctgttcgagaatgtggtggccatgggagtcagcgacaagcgggatattagccggttcctggagagcaaccccgtgatgatcgatgccaaggaagtgagcgccgcccaccgggccagatacttctggggcaatctgcctggcatgaacagacccctggccagcaccgtgaacgacaagctggagctgcaggagtgcctggagcacggccggatcgccaagttcagcaaggtgagaaccatcaccacccgaagcaacagcatcaaacaaggcaaggaccagcactttcctgtgttcatgaacgagaaggaggacatcctgtggtgtaccgagatggagagagtgttcgggttcccagtccactacacagatgtcagcaacatgtctagactggccagacagagactgctgggaagaagctggtccgtccctgtgatcagacacctgttcgcccctctgaaggagtacttcgcctgcgtgagcagcggcaacagcaacgccaacagccggggccccagcttctctagcggcctggtgccactgtccctgagagggagccacatgggccccatggagatctacaaaaccgtgagcgcctggaagcggcagcctgtgcgcgtgctgagcctgtttcggaatatcgataaagtcctgaaaagcctgggattcctggagagcggctctggctccggcggtggcaccctgaagtacgtggaggatgtgacaaacgtggtcagacgggatgtggagaagtggggccccttcgatctggtgtacggcagcacccaacccctgggcagctcttgtgaccggtgccctggctggtacatgtttcagttccaccggatcctgcagtacgccctgccgagacaggagtcccagcggccattcttttggattttcatggacaacttgctgctgaccgaggatgaccaggaaactaccactcggttcctgcagaccgaagccgtgaccctgcaggacgtgagaggccgggactaccagaacgccatgcgggtgtggtccaacatccctggactgaaaagcaagcacgcacctctgacccctaaagaagaggagtacctgcaggcccaggtgcggagcagaagcaagctggacgcccctaaggtggatctgctggtgaagaattgcctcctgcccctgagagagtacttcaagtatttcagccagaatagtctgcccctgggaggcagcggcggcggcgagctggtgaccttcagggacgtggtgatcagcttcagccaggaggagtgggagtacctggacagcgcccagagggacctgtactgggacgtgatgatggagaactacagcaacctggtgagcctggacctggagagcaagtacgacaagaagaccctgagcaccgagaaggacatcatcgagaagaacgacagccagtgggaggtgatcgagagcagcaagctggtgggcctggccaacagcggcggcccaagcagcggcgcccctcctcccagcggcggcagcccagccggctccccaacctctaccgaggagggcacctctgagtccgccacccccgagagcggccctggcacctccaccgagcccagcgagggcagcgcacccggcagccctgccggcagccccacctccacagaggagggaaccagcaccgagcccagcgaaggcagcgccccaggcaccagcaccgagcctagtgagcaggagattaaacggatcaacaagatcagaagaagacttgtgaaagacagcaacaccaagaaggccggcaagacaggccccatgaaaaccctgctggttagagtgatgacacccgatctgagagagcggctggaaaacctgagaaagaagcctgaaaatatcccccagcccatcagcaatacatctagagccaacctgaataagctgctgaccgattacaccgaaatgaagaaggcgatcctgcatgtgtactgggaagagttccagaaggaccctgtgggcctgatgagccgggtggcccagcctgccagcaagaagatcgatcagaacaagctgaaacctgagatggacgagaagggcaacctgaccaccgccggctttgcctgctctcagtgtggccagcccctgttcgtgtacaagctggagcaggtgtctgagaagggcaaggcttacaccaactacttcggacggtgcaatgtggccgagcacgaaaagctgatcctgctggcccagctgaagcccgagaaggatagcgacgaagccgtgacatatagcctgggaaagtttgggcagagggccctggatttctacagcattcatgtgaccaaggagtccacccaccccgtgaagcccctggcccagatcgccggaaacagatacgcctccggacctgtgggaaaggccctgagcgacgcatgtatgggcacaatcgcctccttcctgtctaagtaccaggacatcatcatcgaacaccagaaggtggtgaagggcaaccagaagagactggagagcctgcgggagctggccggcaaggaaaacctggaataccctagcgtgaccctgccacctcagcctcacaccaaggagggcgttgatgcctacaacgaagtgatcgcccgggtgcgaatgtgggtgaacctgaacctgtggcagaagctgaagctaagcagagatgatgccaagcctctgctgagactgaagggattcccttcctttcctctggtcgagagacaggccaacgaagtggactggtgggacatggtgtgtaacgtgaagaagctgatcaacgagaaaaaggaggatggcaaggtgttttggcagaatctggctggctacaagagacaggaagccctgagaccatacctgagcagcgaggaagatcggaagaagggaaagaaattcgctcggtaccagctgggcgacctgctgctgcacctggaaaagaagcacggcgaggactggggaaaggtgtacgacgaggcctgggagcggattgacaagaaagtggaaggcctgagcaagcacatcaagctggaagaggaacggagaagcgaggacgcccagagcaaggccgccctgaccgactggctgcgggctaaggccagcttcgtgatcgagggcctgaaggaggccgacaaggacgagttctgcagatgcgagctgaagctgcagaagtggtacggggacctgcggggaaagcccttcgccatcgaagccgagaacagcatcctggacatcagcggcttcagcaagcagtacaactgtgccttcatctggcagaaggacggcgtgaagaagctgaacctgtacctgatcatcaactacttcaagggcggcaagctgcggttcaagaagatcaaacctgaagccttcgaagccaacagattctacaccgtgatcaacaaaaagagcggcgagatcgtgcccatggaggtgaacttcaacttcgacgaccccaacctgatcatcctgcctctggcctttggcaagagacagggcagagaattcatctggaacgacctgctgtccctggaaaccggcagcctgaagctggccaacggaagagtgatcgagaagacactgtacaacagaagaacccggcaggatgagcctgccctgttcgtggccctgaccttcgagcggcgggaggtcctggactcctccaatatcaaaccaatgaacctgatcggcgtggcaagaggcgaaaacatccccgccgtgatcgccctgaccgaccccgagggctgcccactgagccggtttaaggatagcctgggaaacccaacccacatcctgagaatcggcgagagctataaggagaagcagcggaccatccaggccaagaaggaggtggagcagcggagagccggcggctacagccggaagtacgccagcaaagccaagaatctggcagacgatatggtgagaaacaccgctagagatctgctgtactacgccgtgacccaggatgccatgctgatcttcgccaacctgagccggggcttcggccggcagggcaagcggaccttcatggccgagagacagtacacacggatggaggactggctgaccgccaagctggcctacgagggcctgagcaagacctacctgtccaagacactggcccagtacacctccaagacatgcagcaactgtgggtttaccatcaccagcgccgactacgacagggtgctggagaagctgaagaagacagcaacaggctggatgaccacaattaacggcaaggagctgaaggtggagggccagattacctactacaacagatacaagagacagaacgtagtcaaggacctgtccgtcgagctggatagactgagcgaagaatctgtgaacaacgacatctcctcctggacaaagggcagaagcggagaagctctgagcctcctgaagaaaagattctcccatagacccgtgcaggagaagttcgtgtgcctgaactgcggcttcgagacacacgcagccgagcaagccgccctgaacatcgccagatcctggctgttcctgcggagccaggagtacaagaaataccagacaaacaagacaaccggcaacaccgataagagagccttcgtcgagacctggcagtccttttaccggaagaagcttaaggaggtgtggaaacctgccgtgcggtctggcggatctggcggaggctccaccagccccaagaaaaagagaaaagtctaagctgccttctgcggggcttgccttctggccatgcccttcttctctcccttgcacctgtacctcttggtctttgaataaagcctgagtaggaaggctagcaaaaaaaaaaaaaaaaaaaaaaaaaaaaaaaaaaaaaaaaaaaaaaaaaaaaaaaaaaaaaaaaaaaaaaaaaaaaaaaa

SEQ ID NO: 13435 - RNA, 5785 nt, synthetic construct
  source 1..5785: mol_type = other RNA
aggaaataagagagaaaagaagagtaagaagaaatataagagccaccatggcccctaagaagaagcgtaaagtgagccggatggaacgcctcgtctacgaggtgcggcagaagtgcagaaacatcgaggacatctgcatctcctgcggatctctgaacgtgaccctggagcacccactgttcatcggcggcatgtgccagaactgtaaaaactgttttctggagtgtgcctatcaatacgacgatgacggctaccagagctactgcaccatctgttgcggcggaagagaggtgctgatgtgtggaaataacaactgctgccggtgcttctgcgtggaatgcgtggacctgctggtgggccccggcgccgcccaggccgctattaaggaagatccttggaactgctacatgtgcggccacaagggcacatacggcctgctgagacggagagaggactggcctagcagactgcagatgttcttcgccaataaccacgaccaggagttcgacccccctaaggtgtaccctcccgtccccgccgagaagagaaagcccatccgggtcctgagcctgttcgatggcatcgccaccggtctgctggtgctgaaggacctgggcatccaggtggataggtacattgcctccgaggtgtgcgaggactccatcaccgtgggaatggtgcgtcatcagggcaagatcatgtacgtgggcgacgtgcggagcgtgacacagaagcatatccaggagtggggccctttcgacctggtgatcggcggcagcccttgcaatgacctgagcatcgtgaacccagcccggaagggcctgtacgagggaaccggcagactgttcttcgagttttacagactgctgcacgacgcccggcctaaggaaggcgacgaccggcccttcttttggctgttcgagaatgtggtggccatgggagtcagcgacaagcgggatattagccggttcctggagagcaaccccgtgatgatcgatgccaaggaagtgagcgccgcccaccgggccagatacttctggggcaatctgcctggcatgaacagacccctggccagcaccgtgaacgacaagctggagctgcaggagtgcctggagcacggccggatcgccaagttcagcaaggtgagaaccatcaccacccgaagcaacagcatcaaacaaggcaaggaccagcactttcctgtgttcatgaacgagaaggaggacatcctgtggtgtaccgagatggagagagtgttcgggttcccagtccactacacagatgtcagcaacatgtctagactggccagacagagactgctgggaagaagctggtccgtccctgtgatcagacacctgttcgcccctctgaaggagtacttcgcctgcgtgagcagcggcaacagcaacgccaacagccggggccccagcttctctagcggcctggtgccactgtccctgagagggagccacatgggccccatggagatctacaaaaccgtgagcgcctggaagcggcagcctgtgcgcgtgctgagcctgtttcggaatatcgataaagtcctgaaaagcctgggattcctggagagcggctctggctccggcggtggcaccctgaagtacgtggaggatgtgacaaacgtggtcagacgggatgtggagaagtggggccccttcgatctggtgtacggcagcacccaacccctgggcagctcttgtgaccggtgccctggctggtacatgtttcagttccaccggatcctgcagtacgccctgccgagacaggagtcccagcggccattcttttggattttcatggacaacttgctgctgaccgaggatgaccaggaaactaccactcggttcctgcagaccgaagccgtgaccctgcaggacgtgagaggccgggactaccagaacgccatgcgggtgtggtccaacatccctggactgaaaagcaagcacgcacctctgacccctaaagaagaggagtacctgcaggcccaggtgcggagcagaagcaagctggacgcccctaaggtggatctgctggtgaagaattgcctcctgcccctgagagagtacttcaagtatttcagccagaatagtctgcccctgggaggcagcggcggcggcgcctgcgagagcatcaccttcggcgacgtggccatcgacttcagccaccaggagtgggagtacctgaacctggtgcagaagaccctgtaccaggaggtgatgatggagaactacgacaacctggtgagcctgggccacagcatcagcaagcccgacctgatcaccctgctggagcagggcaaggagccctggatgatcgtgggcgaggagaccaggggcgagtgcaccgacctggacagcaggggcggcccaagcagcggcgcccctcctcccagcggcggcagcccagccggctccccaacctctaccgaggagggcacctctgagtccgccacccccgagagcggccctggcacctccaccgagcccagcgagggcagcgcacccggcagccctgccggcagccccacctccacagaggagggaaccagcaccgagcccagcgaaggcagcgccccaggcaccagcaccgagcctagtgagcaggagattaaacggatcaacaagatcagaagaagacttgtgaaagacagcaacaccaagaaggccggcaagacaggccccatgaaaaccctgctggttagagtgatgacacccgatctgagagagcggctggaaaacctgagaaagaagcctgaaaatatcccccagcccatcagcaatacatctagagccaacctgaataagctgctgaccgattacaccgaaatgaagaaggcgatcctgcatgtgtactgggaagagttccagaaggaccctgtgggcctgatgagccgggtggcccagcctgccagcaagaagatcgatcagaacaagctgaaacctgagatggacgagaagggcaacctgaccaccgccggctttgcctgctctcagtgtggccagcccctgttcgtgtacaagctggagcaggtgtctgagaagggcaaggcttacaccaactacttcggacggtgcaatgtggccgagcacgaaaagctgatcctgctggcccagctgaagcccgagaaggatagcgacgaagccgtgacatatagcctgggaaagtttgggcagagggccctggatttctacagcattcatgtgaccaaggagtccacccaccccgtgaagcccctggcccagatcgccggaaacagatacgcctccggacctgtgggaaaggccctgagcgacgcatgtatgggcacaatcgcctccttcctgtctaagtaccaggacatcatcatcgaacaccagaaggtggtgaagggcaaccagaagagactggagagcctgcgggagctggccggcaaggaaaacctggaataccctagcgtgaccctgccacctcagcctcacaccaaggagggcgttgatgcctacaacgaagtgatcgcccgggtgcgaatgtgggtgaacctgaacctgtggcagaagctgaagctaagcagagatgatgccaagcctctgctgagactgaagggattcccttcctttcctctggtcgagagacaggccaacgaagtggactggtgggacatggtgtgtaacgtgaagaagctgatcaacgagaaaaaggaggatggcaaggtgttttggcagaatctggctggctacaagagacaggaagccctgagaccatacctgagcagcgaggaagatcggaagaagggaaagaaattcgctcggtaccagctgggcgacctgctgctgcacctggaaaagaagcacggcgaggactggggaaaggtgtacgacgaggcctgggagcggattgacaagaaagtggaaggcctgagcaagcacatcaagctggaagaggaacggagaagcgaggacgcccagagcaaggccgccctgaccgactggctgcgggctaaggccagcttcgtgatcgagggcctgaaggaggccgacaaggacgagttctgcagatgcgagctgaagctgcagaagtggtacggggacctgcggggaaagcccttcgccatcgaagccgagaacagcatcctggacatcagcggcttcagcaagcagtacaactgtgccttcatctggcagaaggacggcgtgaagaagctgaacctgtacctgatcatcaactacttcaagggcggcaagctgcggttcaagaagatcaaacctgaagccttcgaagccaacagattctacaccgtgatcaacaaaaagagcggcgagatcgtgcccatggaggtgaacttcaacttcgacgaccccaacctgatcatcctgcctctggcctttggcaagagacagggcagagaattcatctggaacgacctgctgtccctggaaaccggcagcctgaagctggccaacggaagagtgatcgagaagacactgtacaacagaagaacccggcaggatgagcctgccctgttcgtggccctgaccttcgagcggcgggaggtcctggactcctccaatatcaaaccaatgaacctgatcggcgtggcaagaggcgaaaacatccccgccgtgatcgccctgaccgaccccgagggctgcccactgagccggtttaaggatagcctgggaaacccaacccacatcctgagaatcggcgagagctataaggagaagcagcggaccatccaggccaagaaggaggtggagcagcggagagccggcggctacagccggaagtacgccagcaaagccaagaatctggcagacgatatggtgagaaacaccgctagagatctgctgtactacgccgtgacccaggatgccatgctgatcttcgccaacctgagccggggcttcggccggcagggcaagcggaccttcatggccgagagacagtacacacggatggaggactggctgaccgccaagctggcctacgagggcctgagcaagacctacctgtccaagacactggcccagtacacctccaagacatgcagcaactgtgggtttaccatcaccagcgccgactacgacagggtgctggagaagctgaagaagacagcaacaggctggatgaccacaattaacggcaaggagctgaaggtggagggccagattacctactacaacagatacaagagacagaacgtagtcaaggacctgtccgtcgagctggatagactgagcgaagaatctgtgaacaacgacatctcctcctggacaaagggcagaagcggagaagctctgagcctcctgaagaaaagattctcccatagacccgtgcaggagaagttcgtgtgcctgaactgcggcttcgagacacacgcagccgagcaagccgccctgaacatcgccagatcctggctgttcctgcggagccaggagtacaagaaataccagacaaacaagacaaccggcaacaccgataagagagccttcgtcgagacctggcagtccttttaccggaagaagcttaaggaggtgtggaaacctgccgtgcggtctggcggatctggcggaggctccaccagccccaagaaaaagagaaaagtctaagctgccttctgcggggcttgccttctggccatgcccttcttctctcccttgcacctgtacctcttggtctttgaataaagcctgagtaggaaggctagcaaaaaaaaaaaaaaaaaaaaaaaaaaaaaaaaaaaaaaaaaaaaaaaaaaaaaaaaaaaaaaaaaaaaaaaaaaaaaaaa

SEQ ID NO: 13436 - RNA, 5782 nt, synthetic construct
  source 1..5782: mol_type = other RNA
aggaaataagagagaaaagaagagtaagaagaaatataagagccaccatggcccctaagaagaagcgtaaagtgagccggatggaacgcctcgtctacgaggtgcggcagaagtgcagaaacatcgaggacatctgcatctcctgcggatctctgaacgtgaccctggagcacccactgttcatcggcggcatgtgccagaactgtaaaaactgttttctggagtgtgcctatcaatacgacgatgacggctaccagagctactgcaccatctgttgcggcggaagagaggtgctgatgtgtggaaataacaactgctgccggtgcttctgcgtggaatgcgtggacctgctggtgggccccggcgccgcccaggccgctattaaggaagatccttggaactgctacatgtgcggccacaagggcacatacggcctgctgagacggagagaggactggcctagcagactgcagatgttcttcgccaataaccacgaccaggagttcgacccccctaaggtgtaccctcccgtccccgccgagaagagaaagcccatccgggtcctgagcctgttcgatggcatcgccaccggtctgctggtgctgaaggacctgggcatccaggtggataggtacattgcctccgaggtgtgcgaggactccatcaccgtgggaatggtgcgtcatcagggcaagatcatgtacgtgggcgacgtgcggagcgtgacacagaagcatatccaggagtggggccctttcgacctggtgatcggcggcagcccttgcaatgacctgagcatcgtgaacccagcccggaagggcctgtacgagggaaccggcagactgttcttcgagttttacagactgctgcacgacgcccggcctaaggaaggcgacgaccggcccttcttttggctgttcgagaatgtggtggccatgggagtcagcgacaagcgggatattagccggttcctggagagcaaccccgtgatgatcgatgccaaggaagtgagcgccgcccaccgggccagatacttctggggcaatctgcctggcatgaacagacccctggccagcaccgtgaacgacaagctggagctgcaggagtgcctggagcacggccggatcgccaagttcagcaaggtgagaaccatcaccacccgaagcaacagcatcaaacaaggcaaggaccagcactttcctgtgttcatgaacgagaaggaggacatcctgtggtgtaccgagatggagagagtgttcgggttcccagtccactacacagatgtcagcaacatgtctagactggccagacagagactgctgggaagaagctggtccgtccctgtgatcagacacctgttcgcccctctgaaggagtacttcgcctgcgtgagcagcggcaacagcaacgccaacagccggggccccagcttctctagcggcctggtgccactgtccctgagagggagccacatgggccccatggagatctacaaaaccgtgagcgcctggaagcggcagcctgtgcgcgtgctgagcctgtttcggaatatcgataaagtcctgaaaagcctgggattcctggagagcggctctggctccggcggtggcaccctgaagtacgtggaggatgtgacaaacgtggtcagacgggatgtggagaagtggggccccttcgatctggtgtacggcagcacccaacccctgggcagctcttgtgaccggtgccctggctggtacatgtttcagttccaccggatcctgcagtacgccctgccgagacaggagtcccagcggccattcttttggattttcatggacaacttgctgctgaccgaggatgaccaggaaactaccactcggttcctgcagaccgaagccgtgaccctgcaggacgtgagaggccgggactaccagaacgccatgcgggtgtggtccaacatccctggactgaaaagcaagcacgcacctctgacccctaaagaagaggagtacctgcaggcccaggtgcggagcagaagcaagctggacgcccctaaggtggatctgctggtgaagaattgcctcctgcccctgagagagtacttcaagtatttcagccagaatagtctgcccctgggaggcagcggcggcggcctgcagggcctgctgaccttcggcgacgtggccatcgagttcagccaggaggagtggaggtgcctgagccacacccagagggagctgtacagggacgtgatgctggagaactacggccacctgctgttcctgggcctgaccgtgagcaagcccgacctggtgagcttcctggagcagaggaaggagccctgggacgagaagaggaacaagaccgccggcttcgacgccagcaggtgggagggcggcccaagcagcggcgcccctcctcccagcggcggcagcccagccggctccccaacctctaccgaggagggcacctctgagtccgccacccccgagagcggccctggcacctccaccgagcccagcgagggcagcgcacccggcagccctgccggcagccccacctccacagaggagggaaccagcaccgagcccagcgaaggcagcgccccaggcaccagcaccgagcctagtgagcaggagattaaacggatcaacaagatcagaagaagacttgtgaaagacagcaacaccaagaaggccggcaagacaggccccatgaaaaccctgctggttagagtgatgacacccgatctgagagagcggctggaaaacctgagaaagaagcctgaaaatatcccccagcccatcagcaatacatctagagccaacctgaataagctgctgaccgattacaccgaaatgaagaaggcgatcctgcatgtgtactgggaagagttccagaaggaccctgtgggcctgatgagccgggtggcccagcctgccagcaagaagatcgatcagaacaagctgaaacctgagatggacgagaagggcaacctgaccaccgccggctttgcctgctctcagtgtggccagcccctgttcgtgtacaagctggagcaggtgtctgagaagggcaaggcttacaccaactacttcggacggtgcaatgtggccgagcacgaaaagctgatcctgctggcccagctgaagcccgagaaggatagcgacgaagccgtgacatatagcctgggaaagtttgggcagagggccctggatttctacagcattcatgtgaccaaggagtccacccaccccgtgaagcccctggcccagatcgccggaaacagatacgcctccggacctgtgggaaaggccctgagcgacgcatgtatgggcacaatcgcctccttcctgtctaagtaccaggacatcatcatcgaacaccagaaggtggtgaagggcaaccagaagagactggagagcctgcgggagctggccggcaaggaaaacctggaataccctagcgtgaccctgccacctcagcctcacaccaaggagggcgttgatgcctacaacgaagtgatcgcccgggtgcgaatgtgggtgaacctgaacctgtggcagaagctgaagctaagcagagatgatgccaagcctctgctgagactgaagggattcccttcctttcctctggtcgagagacaggccaacgaagtggactggtgggacatggtgtgtaacgtgaagaagctgatcaacgagaaaaaggaggatggcaaggtgttttggcagaatctggctggctacaagagacaggaagccctgagaccatacctgagcagcgaggaagatcggaagaagggaaagaaattcgctcggtaccagctgggcgacctgctgctgcacctggaaaagaagcacggcgaggactggggaaaggtgtacgacgaggcctgggagcggattgacaagaaagtggaaggcctgagcaagcacatcaagctggaagaggaacggagaagcgaggacgcccagagcaaggccgccctgaccgactggctgcgggctaaggccagcttcgtgatcgagggcctgaaggaggccgacaaggacgagttctgcagatgcgagctgaagctgcagaagtggtacggggacctgcggggaaagcccttcgccatcgaagccgagaacagcatcctggacatcagcggcttcagcaagcagtacaactgtgccttcatctggcagaaggacggcgtgaagaagctgaacctgtacctgatcatcaactacttcaagggcggcaagctgcggttcaagaagatcaaacctgaagccttcgaagccaacagattctacaccgtgatcaacaaaaagagcggcgagatcgtgcccatggaggtgaacttcaacttcgacgaccccaacctgatcatcctgcctctggcctttggcaagagacagggcagagaattcatctggaacgacctgctgtccctggaaaccggcagcctgaagctggccaacggaagagtgatcgagaagacactgtacaacagaagaacccggcaggatgagcctgccctgttcgtggccctgaccttcgagcggcgggaggtcctggactcctccaatatcaaaccaatgaacctgatcggcgtggcaagaggcgaaaacatccccgccgtgatcgccctgaccgaccccgagggctgcccactgagccggtttaaggatagcctgggaaacccaacccacatcctgagaatcggcgagagctataaggagaagcagcggaccatccaggccaagaaggaggtggagcagcggagagccggcggctacagccggaagtacgccagcaaagccaagaatctggcagacgatatggtgagaaacaccgctagagatctgctgtactacgccgtgacccaggatgccatgctgatcttcgccaacctgagccggggcttcggccggcagggcaagcggaccttcatggccgagagacagtacacacggatggaggactggctgaccgccaagctggcctacgagggcctgagcaagacctacctgtccaagacactggcccagtacacctccaagacatgcagcaactgtgggtttaccatcaccagcgccgactacgacagggtgctggagaagctgaagaagacagcaacaggctggatgaccacaattaacggcaaggagctgaaggtggagggccagattacctactacaacagatacaagagacagaacgtagtcaaggacctgtccgtcgagctggatagactgagcgaagaatctgtgaacaacgacatctcctcctggacaaagggcagaagcggagaagctctgagcctcctgaagaaaagattctcccatagacccgtgcaggagaagttcgtgtgcctgaactgcggcttcgagacacacgcagccgagcaagccgccctgaacatcgccagatcctggctgttcctgcggagccaggagtacaagaaataccagacaaacaagacaaccggcaacaccgataagagagccttcgtcgagacctggcagtccttttaccggaagaagcttaaggaggtgtggaaacctgccgtgcggtctggcggatctggcggaggctccaccagccccaagaaaaagagaaaagtctaagctgccttctgcggggcttgccttctggccatgcccttcttctctcccttgcacctgtacctcttggtctttgaataaagcctgagtaggaaggctagcaaaaaaaaaaaaaaaaaaaaaaaaaaaaaaaaaaaaaaaaaaaaaaaaaaaaaaaaaaaaaaaaaaaaaaaaaaaaaaaa

SEQ ID NO: 13437 - RNA, 5785 nt, synthetic construct
  source 1..5785: mol_type = other RNA
aggaaataagagagaaaagaagagtaagaagaaatataagagccaccatggcccctaagaagaagcgtaaagtgagccggatggaacgcctcgtctacgaggtgcggcagaagtgcagaaacatcgaggacatctgcatctcctgcggatctctgaacgtgaccctggagcacccactgttcatcggcggcatgtgccagaactgtaaaaactgttttctggagtgtgcctatcaatacgacgatgacggctaccagagctactgcaccatctgttgcggcggaagagaggtgctgatgtgtggaaataacaactgctgccggtgcttctgcgtggaatgcgtggacctgctggtgggccccggcgccgcccaggccgctattaaggaagatccttggaactgctacatgtgcggccacaagggcacatacggcctgctgagacggagagaggactggcctagcagactgcagatgttcttcgccaataaccacgaccaggagttcgacccccctaaggtgtaccctcccgtccccgccgagaagagaaagcccatccgggtcctgagcctgttcgatggcatcgccaccggtctgctggtgctgaaggacctgggcatccaggtggataggtacattgcctccgaggtgtgcgaggactccatcaccgtgggaatggtgcgtcatcagggcaagatcatgtacgtgggcgacgtgcggagcgtgacacagaagcatatccaggagtggggccctttcgacctggtgatcggcggcagcccttgcaatgacctgagcatcgtgaacccagcccggaagggcctgtacgagggaaccggcagactgttcttcgagttttacagactgctgcacgacgcccggcctaaggaaggcgacgaccggcccttcttttggctgttcgagaatgtggtggccatgggagtcagcgacaagcgggatattagccggttcctggagagcaaccccgtgatgatcgatgccaaggaagtgagcgccgcccaccgggccagatacttctggggcaatctgcctggcatgaacagacccctggccagcaccgtgaacgacaagctggagctgcaggagtgcctggagcacggccggatcgccaagttcagcaaggtgagaaccatcaccacccgaagcaacagcatcaaacaaggcaaggaccagcactttcctgtgttcatgaacgagaaggaggacatcctgtggtgtaccgagatggagagagtgttcgggttcccagtccactacacagatgtcagcaacatgtctagactggccagacagagactgctgggaagaagctggtccgtccctgtgatcagacacctgttcgcccctctgaaggagtacttcgcctgcgtgagcagcggcaacagcaacgccaacagccggggccccagcttctctagcggcctggtgccactgtccctgagagggagccacatgggccccatggagatctacaaaaccgtgagcgcctggaagcggcagcctgtgcgcgtgctgagcctgtttcggaatatcgataaagtcctgaaaagcctgggattcctggagagcggctctggctccggcggtggcaccctgaagtacgtggaggatgtgacaaacgtggtcagacgggatgtggagaagtggggccccttcgatctggtgtacggcagcacccaacccctgggcagctcttgtgaccggtgccctggctggtacatgtttcagttccaccggatcctgcagtacgccctgccgagacaggagtcccagcggccattcttttggattttcatggacaacttgctgctgaccgaggatgaccaggaaactaccactcggttcctgcagaccgaagccgtgaccctgcaggacgtgagaggccgggactaccagaacgccatgcgggtgtggtccaacatccctggactgaaaagcaagcacgcacctctgacccctaaagaagaggagtacctgcaggcccaggtgcggagcagaagcaagctggacgcccctaaggtggatctgctggtgaagaattgcctcctgcccctgagagagtacttcaagtatttcagccagaatagtctgcccctgggaggcagcggcggcggcgtgcacggcagcgtgaccttcagggacgtggccatcgacttcagccaggaggagtgggagtgcctgcagcccgaccagaggaacctgtacagggacgtgatgctggagaactacagccacctgatcagcctgggcagcagcatcagcaagcccgacgtgatcaccctgctggagcaggagaaggagccctggatcgtggtgaggaaggagaccagcaggtggtaccccgacctggagagcaagggcggcccaagcagcggcgcccctcctcccagcggcggcagcccagccggctccccaacctctaccgaggagggcacctctgagtccgccacccccgagagcggccctggcacctccaccgagcccagcgagggcagcgcacccggcagccctgccggcagccccacctccacagaggagggaaccagcaccgagcccagcgaaggcagcgccccaggcaccagcaccgagcctagtgagcaggagattaaacggatcaacaagatcagaagaagacttgtgaaagacagcaacaccaagaaggccggcaagacaggccccatgaaaaccctgctggttagagtgatgacacccgatctgagagagcggctggaaaacctgagaaagaagcctgaaaatatcccccagcccatcagcaatacatctagagccaacctgaataagctgctgaccgattacaccgaaatgaagaaggcgatcctgcatgtgtactgggaagagttccagaaggaccctgtgggcctgatgagccgggtggcccagcctgccagcaagaagatcgatcagaacaagctgaaacctgagatggacgagaagggcaacctgaccaccgccggctttgcctgctctcagtgtggccagcccctgttcgtgtacaagctggagcaggtgtctgagaagggcaaggcttacaccaactacttcggacggtgcaatgtggccgagcacgaaaagctgatcctgctggcccagctgaagcccgagaaggatagcgacgaagccgtgacatatagcctgggaaagtttgggcagagggccctggatttctacagcattcatgtgaccaaggagtccacccaccccgtgaagcccctggcccagatcgccggaaacagatacgcctccggacctgtgggaaaggccctgagcgacgcatgtatgggcacaatcgcctccttcctgtctaagtaccaggacatcatcatcgaacaccagaaggtggtgaagggcaaccagaagagactggagagcctgcgggagctggccggcaaggaaaacctggaataccctagcgtgaccctgccacctcagcctcacaccaaggagggcgttgatgcctacaacgaagtgatcgcccgggtgcgaatgtgggtgaacctgaacctgtggcagaagctgaagctaagcagagatgatgccaagcctctgctgagactgaagggattcccttcctttcctctggtcgagagacaggccaacgaagtggactggtgggacatggtgtgtaacgtgaagaagctgatcaacgagaaaaaggaggatggcaaggtgttttggcagaatctggctggctacaagagacaggaagccctgagaccatacctgagcagcgaggaagatcggaagaagggaaagaaattcgctcggtaccagctgggcgacctgctgctgcacctggaaaagaagcacggcgaggactggggaaaggtgtacgacgaggcctgggagcggattgacaagaaagtggaaggcctgagcaagcacatcaagctggaagaggaacggagaagcgaggacgcccagagcaaggccgccctgaccgactggctgcgggctaaggccagcttcgtgatcgagggcctgaaggaggccgacaaggacgagttctgcagatgcgagctgaagctgcagaagtggtacggggacctgcggggaaagcccttcgccatcgaagccgagaacagcatcctggacatcagcggcttcagcaagcagtacaactgtgccttcatctggcagaaggacggcgtgaagaagctgaacctgtacctgatcatcaactacttcaagggcggcaagctgcggttcaagaagatcaaacctgaagccttcgaagccaacagattctacaccgtgatcaacaaaaagagcggcgagatcgtgcccatggaggtgaacttcaacttcgacgaccccaacctgatcatcctgcctctggcctttggcaagagacagggcagagaattcatctggaacgacctgctgtccctggaaaccggcagcctgaagctggccaacggaagagtgatcgagaagacactgtacaacagaagaacccggcaggatgagcctgccctgttcgtggccctgaccttcgagcggcgggaggtcctggactcctccaatatcaaaccaatgaacctgatcggcgtggcaagaggcgaaaacatccccgccgtgatcgccctgaccgaccccgagggctgcccactgagccggtttaaggatagcctgggaaacccaacccacatcctgagaatcggcgagagctataaggagaagcagcggaccatccaggccaagaaggaggtggagcagcggagagccggcggctacagccggaagtacgccagcaaagccaagaatctggcagacgatatggtgagaaacaccgctagagatctgctgtactacgccgtgacccaggatgccatgctgatcttcgccaacctgagccggggcttcggccggcagggcaagcggaccttcatggccgagagacagtacacacggatggaggactggctgaccgccaagctggcctacgagggcctgagcaagacctacctgtccaagacactggcccagtacacctccaagacatgcagcaactgtgggtttaccatcaccagcgccgactacgacagggtgctggagaagctgaagaagacagcaacaggctggatgaccacaattaacggcaaggagctgaaggtggagggccagattacctactacaacagatacaagagacagaacgtagtcaaggacctgtccgtcgagctggatagactgagcgaagaatctgtgaacaacgacatctcctcctggacaaagggcagaagcggagaagctctgagcctcctgaagaaaagattctcccatagacccgtgcaggagaagttcgtgtgcctgaactgcggcttcgagacacacgcagccgagcaagccgccctgaacatcgccagatcctggctgttcctgcggagccaggagtacaagaaataccagacaaacaagacaaccggcaacaccgataagagagccttcgtcgagacctggcagtccttttaccggaagaagcttaaggaggtgtggaaacctgccgtgcggtctggcggatctggcggaggctccaccagccccaagaaaaagagaaaagtctaagctgccttctgcggggcttgccttctggccatgcccttcttctctcccttgcacctgtacctcttggtctttgaataaagcctgagtaggaaggctagcaaaaaaaaaaaaaaaaaaaaaaaaaaaaaaaaaaaaaaaaaaaaaaaaaaaaaaaaaaaaaaaaaaaaaaaaaaaaaaaa

SEQ ID NO: 13438 - RNA, 5785 nt, synthetic construct
  source 1..5785: mol_type = other RNA
aggaaataagagagaaaagaagagtaagaagaaatataagagccaccatggcccctaagaagaagcgtaaagtgagccggatggaacgcctcgtctacgaggtgcggcagaagtgcagaaacatcgaggacatctgcatctcctgcggatctctgaacgtgaccctggagcacccactgttcatcggcggcatgtgccagaactgtaaaaactgttttctggagtgtgcctatcaatacgacgatgacggctaccagagctactgcaccatctgttgcggcggaagagaggtgctgatgtgtggaaataacaactgctgccggtgcttctgcgtggaatgcgtggacctgctggtgggccccggcgccgcccaggccgctattaaggaagatccttggaactgctacatgtgcggccacaagggcacatacggcctgctgagacggagagaggactggcctagcagactgcagatgttcttcgccaataaccacgaccaggagttcgacccccctaaggtgtaccctcccgtccccgccgagaagagaaagcccatccgggtcctgagcctgttcgatggcatcgccaccggtctgctggtgctgaaggacctgggcatccaggtggataggtacattgcctccgaggtgtgcgaggactccatcaccgtgggaatggtgcgtcatcagggcaagatcatgtacgtgggcgacgtgcggagcgtgacacagaagcatatccaggagtggggccctttcgacctggtgatcggcggcagcccttgcaatgacctgagcatcgtgaacccagcccggaagggcctgtacgagggaaccggcagactgttcttcgagttttacagactgctgcacgacgcccggcctaaggaaggcgacgaccggcccttcttttggctgttcgagaatgtggtggccatgggagtcagcgacaagcgggatattagccggttcctggagagcaaccccgtgatgatcgatgccaaggaagtgagcgccgcccaccgggccagatacttctggggcaatctgcctggcatgaacagacccctggccagcaccgtgaacgacaagctggagctgcaggagtgcctggagcacggccggatcgccaagttcagcaaggtgagaaccatcaccacccgaagcaacagcatcaaacaaggcaaggaccagcactttcctgtgttcatgaacgagaaggaggacatcctgtggtgtaccgagatggagagagtgttcgggttcccagtccactacacagatgtcagcaacatgtctagactggccagacagagactgctgggaagaagctggtccgtccctgtgatcagacacctgttcgcccctctgaaggagtacttcgcctgcgtgagcagcggcaacagcaacgccaacagccggggccccagcttctctagcggcctggtgccactgtccctgagagggagccacatgggccccatggagatctacaaaaccgtgagcgcctggaagcggcagcctgtgcgcgtgctgagcctgtttcggaatatcgataaagtcctgaaaagcctgggattcctggagagcggctctggctccggcggtggcaccctgaagtacgtggaggatgtgacaaacgtggtcagacgggatgtggagaagtggggccccttcgatctggtgtacggcagcacccaacccctgggcagctcttgtgaccggtgccctggctggtacatgtttcagttccaccggatcctgcagtacgccctgccgagacaggagtcccagcggccattcttttggattttcatggacaacttgctgctgaccgaggatgaccaggaaactaccactcggttcctgcagaccgaagccgtgaccctgcaggacgtgagaggccgggactaccagaacgccatgcgggtgtggtccaacatccctggactgaaaagcaagcacgcacctctgacccctaaagaagaggagtacctgcaggcccaggtgcggagcagaagcaagctggacgcccctaaggtggatctgctggtgaagaattgcctcctgcccctgagagagtacttcaagtatttcagccagaatagtctgcccctgggaggcagcggcggcggcatgggccccctgcagttcagggacgtggccatcgagttcagcctggaggagtggcactgcctggacaccacccagaggaacctgtacagggacgtgatgctggagaactacaggaacctggtgttcctgggcatcgtggtgagcaagcccgacctgatcacctgcctggagcagggcaagaagcccctgaccatgaagaggcacgagatgatcgccaagccccccggccaggcccagtggctgggcggcccaagcagcggcgcccctcctcccagcggcggcagcccagccggctccccaacctctaccgaggagggcacctctgagtccgccacccccgagagcggccctggcacctccaccgagcccagcgagggcagcgcacccggcagccctgccggcagccccacctccacagaggagggaaccagcaccgagcccagcgaaggcagcgccccaggcaccagcaccgagcctagtgagcaggagattaaacggatcaacaagatcagaagaagacttgtgaaagacagcaacaccaagaaggccggcaagacaggccccatgaaaaccctgctggttagagtgatgacacccgatctgagagagcggctggaaaacctgagaaagaagcctgaaaatatcccccagcccatcagcaatacatctagagccaacctgaataagctgctgaccgattacaccgaaatgaagaaggcgatcctgcatgtgtactgggaagagttccagaaggaccctgtgggcctgatgagccgggtggcccagcctgccagcaagaagatcgatcagaacaagctgaaacctgagatggacgagaagggcaacctgaccaccgccggctttgcctgctctcagtgtggccagcccctgttcgtgtacaagctggagcaggtgtctgagaagggcaaggcttacaccaactacttcggacggtgcaatgtggccgagcacgaaaagctgatcctgctggcccagctgaagcccgagaaggatagcgacgaagccgtgacatatagcctgggaaagtttgggcagagggccctggatttctacagcattcatgtgaccaaggagtccacccaccccgtgaagcccctggcccagatcgccggaaacagatacgcctccggacctgtgggaaaggccctgagcgacgcatgtatgggcacaatcgcctccttcctgtctaagtaccaggacatcatcatcgaacaccagaaggtggtgaagggcaaccagaagagactggagagcctgcgggagctggccggcaaggaaaacctggaataccctagcgtgaccctgccacctcagcctcacaccaaggagggcgttgatgcctacaacgaagtgatcgcccgggtgcgaatgtgggtgaacctgaacctgtggcagaagctgaagctaagcagagatgatgccaagcctctgctgagactgaagggattcccttcctttcctctggtcgagagacaggccaacgaagtggactggtgggacatggtgtgtaacgtgaagaagctgatcaacgagaaaaaggaggatggcaaggtgttttggcagaatctggctggctacaagagacaggaagccctgagaccatacctgagcagcgaggaagatcggaagaagggaaagaaattcgctcggtaccagctgggcgacctgctgctgcacctggaaaagaagcacggcgaggactggggaaaggtgtacgacgaggcctgggagcggattgacaagaaagtggaaggcctgagcaagcacatcaagctggaagaggaacggagaagcgaggacgcccagagcaaggccgccctgaccgactggctgcgggctaaggccagcttcgtgatcgagggcctgaaggaggccgacaaggacgagttctgcagatgcgagctgaagctgcagaagtggtacggggacctgcggggaaagcccttcgccatcgaagccgagaacagcatcctggacatcagcggcttcagcaagcagtacaactgtgccttcatctggcagaaggacggcgtgaagaagctgaacctgtacctgatcatcaactacttcaagggcggcaagctgcggttcaagaagatcaaacctgaagccttcgaagccaacagattctacaccgtgatcaacaaaaagagcggcgagatcgtgcccatggaggtgaacttcaacttcgacgaccccaacctgatcatcctgcctctggcctttggcaagagacagggcagagaattcatctggaacgacctgctgtccctggaaaccggcagcctgaagctggccaacggaagagtgatcgagaagacactgtacaacagaagaacccggcaggatgagcctgccctgttcgtggccctgaccttcgagcggcgggaggtcctggactcctccaatatcaaaccaatgaacctgatcggcgtggcaagaggcgaaaacatccccgccgtgatcgccctgaccgaccccgagggctgcccactgagccggtttaaggatagcctgggaaacccaacccacatcctgagaatcggcgagagctataaggagaagcagcggaccatccaggccaagaaggaggtggagcagcggagagccggcggctacagccggaagtacgccagcaaagccaagaatctggcagacgatatggtgagaaacaccgctagagatctgctgtactacgccgtgacccaggatgccatgctgatcttcgccaacctgagccggggcttcggccggcagggcaagcggaccttcatggccgagagacagtacacacggatggaggactggctgaccgccaagctggcctacgagggcctgagcaagacctacctgtccaagacactggcccagtacacctccaagacatgcagcaactgtgggtttaccatcaccagcgccgactacgacagggtgctggagaagctgaagaagacagcaacaggctggatgaccacaattaacggcaaggagctgaaggtggagggccagattacctactacaacagatacaagagacagaacgtagtcaaggacctgtccgtcgagctggatagactgagcgaagaatctgtgaacaacgacatctcctcctggacaaagggcagaagcggagaagctctgagcctcctgaagaaaagattctcccatagacccgtgcaggagaagttcgtgtgcctgaactgcggcttcgagacacacgcagccgagcaagccgccctgaacatcgccagatcctggctgttcctgcggagccaggagtacaagaaataccagacaaacaagacaaccggcaacaccgataagagagccttcgtcgagacctggcagtccttttaccggaagaagcttaaggaggtgtggaaacctgccgtgcggtctggcggatctggcggaggctccaccagccccaagaaaaagagaaaagtctaagctgccttctgcggggcttgccttctggccatgcccttcttctctcccttgcacctgtacctcttggtctttgaataaagcctgagtaggaaggctagcaaaaaaaaaaaaaaaaaaaaaaaaaaaaaaaaaaaaaaaaaaaaaaaaaaaaaaaaaaaaaaaaaaaaaaaaaaaaaaaa

SEQ ID NO: 13439 - RNA, 5785 nt, synthetic construct
  source 1..5785: mol_type = other RNA
aggaaataagagagaaaagaagagtaagaagaaatataagagccaccatggcccctaagaagaagcgtaaagtgagccggatggaacgcctcgtctacgaggtgcggcagaagtgcagaaacatcgaggacatctgcatctcctgcggatctctgaacgtgaccctggagcacccactgttcatcggcggcatgtgccagaactgtaaaaactgttttctggagtgtgcctatcaatacgacgatgacggctaccagagctactgcaccatctgttgcggcggaagagaggtgctgatgtgtggaaataacaactgctgccggtgcttctgcgtggaatgcgtggacctgctggtgggccccggcgccgcccaggccgctattaaggaagatccttggaactgctacatgtgcggccacaagggcacatacggcctgctgagacggagagaggactggcctagcagactgcagatgttcttcgccaataaccacgaccaggagttcgacccccctaaggtgtaccctcccgtccccgccgagaagagaaagcccatccgggtcctgagcctgttcgatggcatcgccaccggtctgctggtgctgaaggacctgggcatccaggtggataggtacattgcctccgaggtgtgcgaggactccatcaccgtgggaatggtgcgtcatcagggcaagatcatgtacgtgggcgacgtgcggagcgtgacacagaagcatatccaggagtggggccctttcgacctggtgatcggcggcagcccttgcaatgacctgagcatcgtgaacccagcccggaagggcctgtacgagggaaccggcagactgttcttcgagttttacagactgctgcacgacgcccggcctaaggaaggcgacgaccggcccttcttttggctgttcgagaatgtggtggccatgggagtcagcgacaagcgggatattagccggttcctggagagcaaccccgtgatgatcgatgccaaggaagtgagcgccgcccaccgggccagatacttctggggcaatctgcctggcatgaacagacccctggccagcaccgtgaacgacaagctggagctgcaggagtgcctggagcacggccggatcgccaagttcagcaaggtgagaaccatcaccacccgaagcaacagcatcaaacaaggcaaggaccagcactttcctgtgttcatgaacgagaaggaggacatcctgtggtgtaccgagatggagagagtgttcgggttcccagtccactacacagatgtcagcaacatgtctagactggccagacagagactgctgggaagaagctggtccgtccctgtgatcagacacctgttcgcccctctgaaggagtacttcgcctgcgtgagcagcggcaacagcaacgccaacagccggggccccagcttctctagcggcctggtgccactgtccctgagagggagccacatgggccccatggagatctacaaaaccgtgagcgcctggaagcggcagcctgtgcgcgtgctgagcctgtttcggaatatcgataaagtcctgaaaagcctgggattcctggagagcggctctggctccggcggtggcaccctgaagtacgtggaggatgtgacaaacgtggtcagacgggatgtggagaagtggggccccttcgatctggtgtacggcagcacccaacccctgggcagctcttgtgaccggtgccctggctggtacatgtttcagttccaccggatcctgcagtacgccctgccgagacaggagtcccagcggccattcttttggattttcatggacaacttgctgctgaccgaggatgaccaggaaactaccactcggttcctgcagaccgaagccgtgaccctgcaggacgtgagaggccgggactaccagaacgccatgcgggtgtggtccaacatccctggactgaaaagcaagcacgcacctctgacccctaaagaagaggagtacctgcaggcccaggtgcggagcagaagcaagctggacgcccctaaggtggatctgctggtgaagaattgcctcctgcccctgagagagtacttcaagtatttcagccagaatagtctgcccctgggaggcagcggcggcggcgccagcggcaccctgaccttcgacgacgtggccctgtacttcagcgagcaggagtgggagatcctggagaagtggcagaagcagatgtacaagcaggagatgaagaccaactacgagaccctggacagcctgggctacgccttcagcaagcccgacctgatcacctggatggagaagggcaggatgctgctgatcagcgaccagggcaggctgcacaagaccaagaggaccgccggcccccccggcggcccaagcagcggcgcccctcctcccagcggcggcagcccagccggctccccaacctctaccgaggagggcacctctgagtccgccacccccgagagcggccctggcacctccaccgagcccagcgagggcagcgcacccggcagccctgccggcagccccacctccacagaggagggaaccagcaccgagcccagcgaaggcagcgccccaggcaccagcaccgagcctagtgagcaggagattaaacggatcaacaagatcagaagaagacttgtgaaagacagcaacaccaagaaggccggcaagacaggccccatgaaaaccctgctggttagagtgatgacacccgatctgagagagcggctggaaaacctgagaaagaagcctgaaaatatcccccagcccatcagcaatacatctagagccaacctgaataagctgctgaccgattacaccgaaatgaagaaggcgatcctgcatgtgtactgggaagagttccagaaggaccctgtgggcctgatgagccgggtggcccagcctgccagcaagaagatcgatcagaacaagctgaaacctgagatggacgagaagggcaacctgaccaccgccggctttgcctgctctcagtgtggccagcccctgttcgtgtacaagctggagcaggtgtctgagaagggcaaggcttacaccaactacttcggacggtgcaatgtggccgagcacgaaaagctgatcctgctggcccagctgaagcccgagaaggatagcgacgaagccgtgacatatagcctgggaaagtttgggcagagggccctggatttctacagcattcatgtgaccaaggagtccacccaccccgtgaagcccctggcccagatcgccggaaacagatacgcctccggacctgtgggaaaggccctgagcgacgcatgtatgggcacaatcgcctccttcctgtctaagtaccaggacatcatcatcgaacaccagaaggtggtgaagggcaaccagaagagactggagagcctgcgggagctggccggcaaggaaaacctggaataccctagcgtgaccctgccacctcagcctcacaccaaggagggcgttgatgcctacaacgaagtgatcgcccgggtgcgaatgtgggtgaacctgaacctgtggcagaagctgaagctaagcagagatgatgccaagcctctgctgagactgaagggattcccttcctttcctctggtcgagagacaggccaacgaagtggactggtgggacatggtgtgtaacgtgaagaagctgatcaacgagaaaaaggaggatggcaaggtgttttggcagaatctggctggctacaagagacaggaagccctgagaccatacctgagcagcgaggaagatcggaagaagggaaagaaattcgctcggtaccagctgggcgacctgctgctgcacctggaaaagaagcacggcgaggactggggaaaggtgtacgacgaggcctgggagcggattgacaagaaagtggaaggcctgagcaagcacatcaagctggaagaggaacggagaagcgaggacgcccagagcaaggccgccctgaccgactggctgcgggctaaggccagcttcgtgatcgagggcctgaaggaggccgacaaggacgagttctgcagatgcgagctgaagctgcagaagtggtacggggacctgcggggaaagcccttcgccatcgaagccgagaacagcatcctggacatcagcggcttcagcaagcagtacaactgtgccttcatctggcagaaggacggcgtgaagaagctgaacctgtacctgatcatcaactacttcaagggcggcaagctgcggttcaagaagatcaaacctgaagccttcgaagccaacagattctacaccgtgatcaacaaaaagagcggcgagatcgtgcccatggaggtgaacttcaacttcgacgaccccaacctgatcatcctgcctctggcctttggcaagagacagggcagagaattcatctggaacgacctgctgtccctggaaaccggcagcctgaagctggccaacggaagagtgatcgagaagacactgtacaacagaagaacccggcaggatgagcctgccctgttcgtggccctgaccttcgagcggcgggaggtcctggactcctccaatatcaaaccaatgaacctgatcggcgtggcaagaggcgaaaacatccccgccgtgatcgccctgaccgaccccgagggctgcccactgagccggtttaaggatagcctgggaaacccaacccacatcctgagaatcggcgagagctataaggagaagcagcggaccatccaggccaagaaggaggtggagcagcggagagccggcggctacagccggaagtacgccagcaaagccaagaatctggcagacgatatggtgagaaacaccgctagagatctgctgtactacgccgtgacccaggatgccatgctgatcttcgccaacctgagccggggcttcggccggcagggcaagcggaccttcatggccgagagacagtacacacggatggaggactggctgaccgccaagctggcctacgagggcctgagcaagacctacctgtccaagacactggcccagtacacctccaagacatgcagcaactgtgggtttaccatcaccagcgccgactacgacagggtgctggagaagctgaagaagacagcaacaggctggatgaccacaattaacggcaaggagctgaaggtggagggccagattacctactacaacagatacaagagacagaacgtagtcaaggacctgtccgtcgagctggatagactgagcgaagaatctgtgaacaacgacatctcctcctggacaaagggcagaagcggagaagctctgagcctcctgaagaaaagattctcccatagacccgtgcaggagaagttcgtgtgcctgaactgcggcttcgagacacacgcagccgagcaagccgccctgaacatcgccagatcctggctgttcctgcggagccaggagtacaagaaataccagacaaacaagacaaccggcaacaccgataagagagccttcgtcgagacctggcagtccttttaccggaagaagcttaaggaggtgtggaaacctgccgtgcggtctggcggatctggcggaggctccaccagccccaagaaaaagagaaaagtctaagctgccttctgcggggcttgccttctggccatgcccttcttctctcccttgcacctgtacctcttggtctttgaataaagcctgagtaggaaggctagcaaaaaaaaaaaaaaaaaaaaaaaaaaaaaaaaaaaaaaaaaaaaaaaaaaaaaaaaaaaaaaaaaaaaaaaaaaaaaaaa

SEQ ID NO: 13440 - RNA, 5785 nt, synthetic construct
  source 1..5785: mol_type = other RNA
aggaaataagagagaaaagaagagtaagaagaaatataagagccaccatggcccctaagaagaagcgtaaagtgagccggatggaacgcctcgtctacgaggtgcggcagaagtgcagaaacatcgaggacatctgcatctcctgcggatctctgaacgtgaccctggagcacccactgttcatcggcggcatgtgccagaactgtaaaaactgttttctggagtgtgcctatcaatacgacgatgacggctaccagagctactgcaccatctgttgcggcggaagagaggtgctgatgtgtggaaataacaactgctgccggtgcttctgcgtggaatgcgtggacctgctggtgggccccggcgccgcccaggccgctattaaggaagatccttggaactgctacatgtgcggccacaagggcacatacggcctgctgagacggagagaggactggcctagcagactgcagatgttcttcgccaataaccacgaccaggagttcgacccccctaaggtgtaccctcccgtccccgccgagaagagaaagcccatccgggtcctgagcctgttcgatggcatcgccaccggtctgctggtgctgaaggacctgggcatccaggtggataggtacattgcctccgaggtgtgcgaggactccatcaccgtgggaatggtgcgtcatcagggcaagatcatgtacgtgggcgacgtgcggagcgtgacacagaagcatatccaggagtggggccctttcgacctggtgatcggcggcagcccttgcaatgacctgagcatcgtgaacccagcccggaagggcctgtacgagggaaccggcagactgttcttcgagttttacagactgctgcacgacgcccggcctaaggaaggcgacgaccggcccttcttttggctgttcgagaatgtggtggccatgggagtcagcgacaagcgggatattagccggttcctggagagcaaccccgtgatgatcgatgccaaggaagtgagcgccgcccaccgggccagatacttctggggcaatctgcctggcatgaacagacccctggccagcaccgtgaacgacaagctggagctgcaggagtgcctggagcacggccggatcgccaagttcagcaaggtgagaaccatcaccacccgaagcaacagcatcaaacaaggcaaggaccagcactttcctgtgttcatgaacgagaaggaggacatcctgtggtgtaccgagatggagagagtgttcgggttcccagtccactacacagatgtcagcaacatgtctagactggccagacagagactgctgggaagaagctggtccgtccctgtgatcagacacctgttcgcccctctgaaggagtacttcgcctgcgtgagcagcggcaacagcaacgccaacagccggggccccagcttctctagcggcctggtgccactgtccctgagagggagccacatgggccccatggagatctacaaaaccgtgagcgcctggaagcggcagcctgtgcgcgtgctgagcctgtttcggaatatcgataaagtcctgaaaagcctgggattcctggagagcggctctggctccggcggtggcaccctgaagtacgtggaggatgtgacaaacgtggtcagacgggatgtggagaagtggggccccttcgatctggtgtacggcagcacccaacccctgggcagctcttgtgaccggtgccctggctggtacatgtttcagttccaccggatcctgcagtacgccctgccgagacaggagtcccagcggccattcttttggattttcatggacaacttgctgctgaccgaggatgaccaggaaactaccactcggttcctgcagaccgaagccgtgaccctgcaggacgtgagaggccgggactaccagaacgccatgcgggtgtggtccaacatccctggactgaaaagcaagcacgcacctctgacccctaaagaagaggagtacctgcaggcccaggtgcggagcagaagcaagctggacgcccctaaggtggatctgctggtgaagaattgcctcctgcccctgagagagtacttcaagtatttcagccagaatagtctgcccctgggaggcagcggcggcggcggccccctgaccttcagggacgtggccatcgagttcagccaggaggagtggaagagcctggaccccgtgcagaaggccctgtactgggacgtgatgctggagaactacaggaacctggtgttcctgggcatcctgcccaagtgcatgaccaaggagctgccccccatcggcaacagcaacaccggcgagaagttccagagggtgatgctggagaggcacgagtgctacgacatcgagaacttcggcggcccaagcagcggcgcccctcctcccagcggcggcagcccagccggctccccaacctctaccgaggagggcacctctgagtccgccacccccgagagcggccctggcacctccaccgagcccagcgagggcagcgcacccggcagccctgccggcagccccacctccacagaggagggaaccagcaccgagcccagcgaaggcagcgccccaggcaccagcaccgagcctagtgagcaggagattaaacggatcaacaagatcagaagaagacttgtgaaagacagcaacaccaagaaggccggcaagacaggccccatgaaaaccctgctggttagagtgatgacacccgatctgagagagcggctggaaaacctgagaaagaagcctgaaaatatcccccagcccatcagcaatacatctagagccaacctgaataagctgctgaccgattacaccgaaatgaagaaggcgatcctgcatgtgtactgggaagagttccagaaggaccctgtgggcctgatgagccgggtggcccagcctgccagcaagaagatcgatcagaacaagctgaaacctgagatggacgagaagggcaacctgaccaccgccggctttgcctgctctcagtgtggccagcccctgttcgtgtacaagctggagcaggtgtctgagaagggcaaggcttacaccaactacttcggacggtgcaatgtggccgagcacgaaaagctgatcctgctggcccagctgaagcccgagaaggatagcgacgaagccgtgacatatagcctgggaaagtttgggcagagggccctggatttctacagcattcatgtgaccaaggagtccacccaccccgtgaagcccctggcccagatcgccggaaacagatacgcctccggacctgtgggaaaggccctgagcgacgcatgtatgggcacaatcgcctccttcctgtctaagtaccaggacatcatcatcgaacaccagaaggtggtgaagggcaaccagaagagactggagagcctgcgggagctggccggcaaggaaaacctggaataccctagcgtgaccctgccacctcagcctcacaccaaggagggcgttgatgcctacaacgaagtgatcgcccgggtgcgaatgtgggtgaacctgaacctgtggcagaagctgaagctaagcagagatgatgccaagcctctgctgagactgaagggattcccttcctttcctctggtcgagagacaggccaacgaagtggactggtgggacatggtgtgtaacgtgaagaagctgatcaacgagaaaaaggaggatggcaaggtgttttggcagaatctggctggctacaagagacaggaagccctgagaccatacctgagcagcgaggaagatcggaagaagggaaagaaattcgctcggtaccagctgggcgacctgctgctgcacctggaaaagaagcacggcgaggactggggaaaggtgtacgacgaggcctgggagcggattgacaagaaagtggaaggcctgagcaagcacatcaagctggaagaggaacggagaagcgaggacgcccagagcaaggccgccctgaccgactggctgcgggctaaggccagcttcgtgatcgagggcctgaaggaggccgacaaggacgagttctgcagatgcgagctgaagctgcagaagtggtacggggacctgcggggaaagcccttcgccatcgaagccgagaacagcatcctggacatcagcggcttcagcaagcagtacaactgtgccttcatctggcagaaggacggcgtgaagaagctgaacctgtacctgatcatcaactacttcaagggcggcaagctgcggttcaagaagatcaaacctgaagccttcgaagccaacagattctacaccgtgatcaacaaaaagagcggcgagatcgtgcccatggaggtgaacttcaacttcgacgaccccaacctgatcatcctgcctctggcctttggcaagagacagggcagagaattcatctggaacgacctgctgtccctggaaaccggcagcctgaagctggccaacggaagagtgatcgagaagacactgtacaacagaagaacccggcaggatgagcctgccctgttcgtggccctgaccttcgagcggcgggaggtcctggactcctccaatatcaaaccaatgaacctgatcggcgtggcaagaggcgaaaacatccccgccgtgatcgccctgaccgaccccgagggctgcccactgagccggtttaaggatagcctgggaaacccaacccacatcctgagaatcggcgagagctataaggagaagcagcggaccatccaggccaagaaggaggtggagcagcggagagccggcggctacagccggaagtacgccagcaaagccaagaatctggcagacgatatggtgagaaacaccgctagagatctgctgtactacgccgtgacccaggatgccatgctgatcttcgccaacctgagccggggcttcggccggcagggcaagcggaccttcatggccgagagacagtacacacggatggaggactggctgaccgccaagctggcctacgagggcctgagcaagacctacctgtccaagacactggcccagtacacctccaagacatgcagcaactgtgggtttaccatcaccagcgccgactacgacagggtgctggagaagctgaagaagacagcaacaggctggatgaccacaattaacggcaaggagctgaaggtggagggccagattacctactacaacagatacaagagacagaacgtagtcaaggacctgtccgtcgagctggatagactgagcgaagaatctgtgaacaacgacatctcctcctggacaaagggcagaagcggagaagctctgagcctcctgaagaaaagattctcccatagacccgtgcaggagaagttcgtgtgcctgaactgcggcttcgagacacacgcagccgagcaagccgccctgaacatcgccagatcctggctgttcctgcggagccaggagtacaagaaataccagacaaacaagacaaccggcaacaccgataagagagccttcgtcgagacctggcagtccttttaccggaagaagcttaaggaggtgtggaaacctgccgtgcggtctggcggatctggcggaggctccaccagccccaagaaaaagagaaaagtctaagctgccttctgcggggcttgccttctggccatgcccttcttctctcccttgcacctgtacctcttggtctttgaataaagcctgagtaggaaggctagcaaaaaaaaaaaaaaaaaaaaaaaaaaaaaaaaaaaaaaaaaaaaaaaaaaaaaaaaaaaaaaaaaaaaaaaaaaaaaaaa

SEQ ID NO: 13441 - RNA, 5785 nt, synthetic construct
  source 1..5785: mol_type = other RNA
aggaaataagagagaaaagaagagtaagaagaaatataagagccaccatggcccctaagaagaagcgtaaagtgagccggatggaacgcctcgtctacgaggtgcggcagaagtgcagaaacatcgaggacatctgcatctcctgcggatctctgaacgtgaccctggagcacccactgttcatcggcggcatgtgccagaactgtaaaaactgttttctggagtgtgcctatcaatacgacgatgacggctaccagagctactgcaccatctgttgcggcggaagagaggtgctgatgtgtggaaataacaactgctgccggtgcttctgcgtggaatgcgtggacctgctggtgggccccggcgccgcccaggccgctattaaggaagatccttggaactgctacatgtgcggccacaagggcacatacggcctgctgagacggagagaggactggcctagcagactgcagatgttcttcgccaataaccacgaccaggagttcgacccccctaaggtgtaccctcccgtccccgccgagaagagaaagcccatccgggtcctgagcctgttcgatggcatcgccaccggtctgctggtgctgaaggacctgggcatccaggtggataggtacattgcctccgaggtgtgcgaggactccatcaccgtgggaatggtgcgtcatcagggcaagatcatgtacgtgggcgacgtgcggagcgtgacacagaagcatatccaggagtggggccctttcgacctggtgatcggcggcagcccttgcaatgacctgagcatcgtgaacccagcccggaagggcctgtacgagggaaccggcagactgttcttcgagttttacagactgctgcacgacgcccggcctaaggaaggcgacgaccggcccttcttttggctgttcgagaatgtggtggccatgggagtcagcgacaagcgggatattagccggttcctggagagcaaccccgtgatgatcgatgccaaggaagtgagcgccgcccaccgggccagatacttctggggcaatctgcctggcatgaacagacccctggccagcaccgtgaacgacaagctggagctgcaggagtgcctggagcacggccggatcgccaagttcagcaaggtgagaaccatcaccacccgaagcaacagcatcaaacaaggcaaggaccagcactttcctgtgttcatgaacgagaaggaggacatcctgtggtgtaccgagatggagagagtgttcgggttcccagtccactacacagatgtcagcaacatgtctagactggccagacagagactgctgggaagaagctggtccgtccctgtgatcagacacctgttcgcccctctgaaggagtacttcgcctgcgtgagcagcggcaacagcaacgccaacagccggggccccagcttctctagcggcctggtgccactgtccctgagagggagccacatgggccccatggagatctacaaaaccgtgagcgcctggaagcggcagcctgtgcgcgtgctgagcctgtttcggaatatcgataaagtcctgaaaagcctgggattcctggagagcggctctggctccggcggtggcaccctgaagtacgtggaggatgtgacaaacgtggtcagacgggatgtggagaagtggggccccttcgatctggtgtacggcagcacccaacccctgggcagctcttgtgaccggtgccctggctggtacatgtttcagttccaccggatcctgcagtacgccctgccgagacaggagtcccagcggccattcttttggattttcatggacaacttgctgctgaccgaggatgaccaggaaactaccactcggttcctgcagaccgaagccgtgaccctgcaggacgtgagaggccgggactaccagaacgccatgcgggtgtggtccaacatccctggactgaaaagcaagcacgcacctctgacccctaaagaagaggagtacctgcaggcccaggtgcggagcagaagcaagctggacgcccctaaggtggatctgctggtgaagaattgcctcctgcccctgagagagtacttcaagtatttcagccagaatagtctgcccctgggaggcagcggcggcggcttccagggcagcgtgaccttcagggacgtgagcatcgacttcagccaggaggagtgggagtggctgcagcccgcccagagggacctgtacaggcacgtgatgctggagaactacggccacctggtgagcctgggcctgaacatgagcaagcccgacgtggtgagcctgctggagcagggcaaggagccctggctgggcaacggcgacgtgagcagggagctgttccccgccagcaagagcaacggcggcccaagcagcggcgcccctcctcccagcggcggcagcccagccggctccccaacctctaccgaggagggcacctctgagtccgccacccccgagagcggccctggcacctccaccgagcccagcgagggcagcgcacccggcagccctgccggcagccccacctccacagaggagggaaccagcaccgagcccagcgaaggcagcgccccaggcaccagcaccgagcctagtgagcaggagattaaacggatcaacaagatcagaagaagacttgtgaaagacagcaacaccaagaaggccggcaagacaggccccatgaaaaccctgctggttagagtgatgacacccgatctgagagagcggctggaaaacctgagaaagaagcctgaaaatatcccccagcccatcagcaatacatctagagccaacctgaataagctgctgaccgattacaccgaaatgaagaaggcgatcctgcatgtgtactgggaagagttccagaaggaccctgtgggcctgatgagccgggtggcccagcctgccagcaagaagatcgatcagaacaagctgaaacctgagatggacgagaagggcaacctgaccaccgccggctttgcctgctctcagtgtggccagcccctgttcgtgtacaagctggagcaggtgtctgagaagggcaaggcttacaccaactacttcggacggtgcaatgtggccgagcacgaaaagctgatcctgctggcccagctgaagcccgagaaggatagcgacgaagccgtgacatatagcctgggaaagtttgggcagagggccctggatttctacagcattcatgtgaccaaggagtccacccaccccgtgaagcccctggcccagatcgccggaaacagatacgcctccggacctgtgggaaaggccctgagcgacgcatgtatgggcacaatcgcctccttcctgtctaagtaccaggacatcatcatcgaacaccagaaggtggtgaagggcaaccagaagagactggagagcctgcgggagctggccggcaaggaaaacctggaataccctagcgtgaccctgccacctcagcctcacaccaaggagggcgttgatgcctacaacgaagtgatcgcccgggtgcgaatgtgggtgaacctgaacctgtggcagaagctgaagctaagcagagatgatgccaagcctctgctgagactgaagggattcccttcctttcctctggtcgagagacaggccaacgaagtggactggtgggacatggtgtgtaacgtgaagaagctgatcaacgagaaaaaggaggatggcaaggtgttttggcagaatctggctggctacaagagacaggaagccctgagaccatacctgagcagcgaggaagatcggaagaagggaaagaaattcgctcggtaccagctgggcgacctgctgctgcacctggaaaagaagcacggcgaggactggggaaaggtgtacgacgaggcctgggagcggattgacaagaaagtggaaggcctgagcaagcacatcaagctggaagaggaacggagaagcgaggacgcccagagcaaggccgccctgaccgactggctgcgggctaaggccagcttcgtgatcgagggcctgaaggaggccgacaaggacgagttctgcagatgcgagctgaagctgcagaagtggtacggggacctgcggggaaagcccttcgccatcgaagccgagaacagcatcctggacatcagcggcttcagcaagcagtacaactgtgccttcatctggcagaaggacggcgtgaagaagctgaacctgtacctgatcatcaactacttcaagggcggcaagctgcggttcaagaagatcaaacctgaagccttcgaagccaacagattctacaccgtgatcaacaaaaagagcggcgagatcgtgcccatggaggtgaacttcaacttcgacgaccccaacctgatcatcctgcctctggcctttggcaagagacagggcagagaattcatctggaacgacctgctgtccctggaaaccggcagcctgaagctggccaacggaagagtgatcgagaagacactgtacaacagaagaacccggcaggatgagcctgccctgttcgtggccctgaccttcgagcggcgggaggtcctggactcctccaatatcaaaccaatgaacctgatcggcgtggcaagaggcgaaaacatccccgccgtgatcgccctgaccgaccccgagggctgcccactgagccggtttaaggatagcctgggaaacccaacccacatcctgagaatcggcgagagctataaggagaagcagcggaccatccaggccaagaaggaggtggagcagcggagagccggcggctacagccggaagtacgccagcaaagccaagaatctggcagacgatatggtgagaaacaccgctagagatctgctgtactacgccgtgacccaggatgccatgctgatcttcgccaacctgagccggggcttcggccggcagggcaagcggaccttcatggccgagagacagtacacacggatggaggactggctgaccgccaagctggcctacgagggcctgagcaagacctacctgtccaagacactggcccagtacacctccaagacatgcagcaactgtgggtttaccatcaccagcgccgactacgacagggtgctggagaagctgaagaagacagcaacaggctggatgaccacaattaacggcaaggagctgaaggtggagggccagattacctactacaacagatacaagagacagaacgtagtcaaggacctgtccgtcgagctggatagactgagcgaagaatctgtgaacaacgacatctcctcctggacaaagggcagaagcggagaagctctgagcctcctgaagaaaagattctcccatagacccgtgcaggagaagttcgtgtgcctgaactgcggcttcgagacacacgcagccgagcaagccgccctgaacatcgccagatcctggctgttcctgcggagccaggagtacaagaaataccagacaaacaagacaaccggcaacaccgataagagagccttcgtcgagacctggcagtccttttaccggaagaagcttaaggaggtgtggaaacctgccgtgcggtctggcggatctggcggaggctccaccagccccaagaaaaagagaaaagtctaagctgccttctgcggggcttgccttctggccatgcccttcttctctcccttgcacctgtacctcttggtctttgaataaagcctgagtaggaaggctagcaaaaaaaaaaaaaaaaaaaaaaaaaaaaaaaaaaaaaaaaaaaaaaaaaaaaaaaaaaaaaaaaaaaaaaaaaaaaaaaa

SEQ ID NO: 13442 - RNA, 5785 nt, synthetic construct
  source 1..5785: mol_type = other RNA
aggaaataagagagaaaagaagagtaagaagaaatataagagccaccatggcccctaagaagaagcgtaaagtgagccggatggaacgcctcgtctacgaggtgcggcagaagtgcagaaacatcgaggacatctgcatctcctgcggatctctgaacgtgaccctggagcacccactgttcatcggcggcatgtgccagaactgtaaaaactgttttctggagtgtgcctatcaatacgacgatgacggctaccagagctactgcaccatctgttgcggcggaagagaggtgctgatgtgtggaaataacaactgctgccggtgcttctgcgtggaatgcgtggacctgctggtgggccccggcgccgcccaggccgctattaaggaagatccttggaactgctacatgtgcggccacaagggcacatacggcctgctgagacggagagaggactggcctagcagactgcagatgttcttcgccaataaccacgaccaggagttcgacccccctaaggtgtaccctcccgtccccgccgagaagagaaagcccatccgggtcctgagcctgttcgatggcatcgccaccggtctgctggtgctgaaggacctgggcatccaggtggataggtacattgcctccgaggtgtgcgaggactccatcaccgtgggaatggtgcgtcatcagggcaagatcatgtacgtgggcgacgtgcggagcgtgacacagaagcatatccaggagtggggccctttcgacctggtgatcggcggcagcccttgcaatgacctgagcatcgtgaacccagcccggaagggcctgtacgagggaaccggcagactgttcttcgagttttacagactgctgcacgacgcccggcctaaggaaggcgacgaccggcccttcttttggctgttcgagaatgtggtggccatgggagtcagcgacaagcgggatattagccggttcctggagagcaaccccgtgatgatcgatgccaaggaagtgagcgccgcccaccgggccagatacttctggggcaatctgcctggcatgaacagacccctggccagcaccgtgaacgacaagctggagctgcaggagtgcctggagcacggccggatcgccaagttcagcaaggtgagaaccatcaccacccgaagcaacagcatcaaacaaggcaaggaccagcactttcctgtgttcatgaacgagaaggaggacatcctgtggtgtaccgagatggagagagtgttcgggttcccagtccactacacagatgtcagcaacatgtctagactggccagacagagactgctgggaagaagctggtccgtccctgtgatcagacacctgttcgcccctctgaaggagtacttcgcctgcgtgagcagcggcaacagcaacgccaacagccggggccccagcttctctagcggcctggtgccactgtccctgagagggagccacatgggccccatggagatctacaaaaccgtgagcgcctggaagcggcagcctgtgcgcgtgctgagcctgtttcggaatatcgataaagtcctgaaaagcctgggattcctggagagcggctctggctccggcggtggcaccctgaagtacgtggaggatgtgacaaacgtggtcagacgggatgtggagaagtggggccccttcgatctggtgtacggcagcacccaacccctgggcagctcttgtgaccggtgccctggctggtacatgtttcagttccaccggatcctgcagtacgccctgccgagacaggagtcccagcggccattcttttggattttcatggacaacttgctgctgaccgaggatgaccaggaaactaccactcggttcctgcagaccgaagccgtgaccctgcaggacgtgagaggccgggactaccagaacgccatgcgggtgtggtccaacatccctggactgaaaagcaagcacgcacctctgacccctaaagaagaggagtacctgcaggcccaggtgcggagcagaagcaagctggacgcccctaaggtggatctgctggtgaagaattgcctcctgcccctgagagagtacttcaagtatttcagccagaatagtctgcccctgggaggcagcggcggcggccagggcagcgtgaccttcgaggacgtggccgtgcacttcagctgggacgagtggcacctgctggacaaggcccagaggtgcctgtacagggacgtgatggccgagaacctggccctgatcaccagcctgggcctgtggcccggcgtgggcgacgccgaggccagcagcgagcagagcgccagcctgaagggcatgagccaggtgaggaccttcagggagggcctgagcccccagagggcccagggcggcccaagcagcggcgcccctcctcccagcggcggcagcccagccggctccccaacctctaccgaggagggcacctctgagtccgccacccccgagagcggccctggcacctccaccgagcccagcgagggcagcgcacccggcagccctgccggcagccccacctccacagaggagggaaccagcaccgagcccagcgaaggcagcgccccaggcaccagcaccgagcctagtgagcaggagattaaacggatcaacaagatcagaagaagacttgtgaaagacagcaacaccaagaaggccggcaagacaggccccatgaaaaccctgctggttagagtgatgacacccgatctgagagagcggctggaaaacctgagaaagaagcctgaaaatatcccccagcccatcagcaatacatctagagccaacctgaataagctgctgaccgattacaccgaaatgaagaaggcgatcctgcatgtgtactgggaagagttccagaaggaccctgtgggcctgatgagccgggtggcccagcctgccagcaagaagatcgatcagaacaagctgaaacctgagatggacgagaagggcaacctgaccaccgccggctttgcctgctctcagtgtggccagcccctgttcgtgtacaagctggagcaggtgtctgagaagggcaaggcttacaccaactacttcggacggtgcaatgtggccgagcacgaaaagctgatcctgctggcccagctgaagcccgagaaggatagcgacgaagccgtgacatatagcctgggaaagtttgggcagagggccctggatttctacagcattcatgtgaccaaggagtccacccaccccgtgaagcccctggcccagatcgccggaaacagatacgcctccggacctgtgggaaaggccctgagcgacgcatgtatgggcacaatcgcctccttcctgtctaagtaccaggacatcatcatcgaacaccagaaggtggtgaagggcaaccagaagagactggagagcctgcgggagctggccggcaaggaaaacctggaataccctagcgtgaccctgccacctcagcctcacaccaaggagggcgttgatgcctacaacgaagtgatcgcccgggtgcgaatgtgggtgaacctgaacctgtggcagaagctgaagctaagcagagatgatgccaagcctctgctgagactgaagggattcccttcctttcctctggtcgagagacaggccaacgaagtggactggtgggacatggtgtgtaacgtgaagaagctgatcaacgagaaaaaggaggatggcaaggtgttttggcagaatctggctggctacaagagacaggaagccctgagaccatacctgagcagcgaggaagatcggaagaagggaaagaaattcgctcggtaccagctgggcgacctgctgctgcacctggaaaagaagcacggcgaggactggggaaaggtgtacgacgaggcctgggagcggattgacaagaaagtggaaggcctgagcaagcacatcaagctggaagaggaacggagaagcgaggacgcccagagcaaggccgccctgaccgactggctgcgggctaaggccagcttcgtgatcgagggcctgaaggaggccgacaaggacgagttctgcagatgcgagctgaagctgcagaagtggtacggggacctgcggggaaagcccttcgccatcgaagccgagaacagcatcctggacatcagcggcttcagcaagcagtacaactgtgccttcatctggcagaaggacggcgtgaagaagctgaacctgtacctgatcatcaactacttcaagggcggcaagctgcggttcaagaagatcaaacctgaagccttcgaagccaacagattctacaccgtgatcaacaaaaagagcggcgagatcgtgcccatggaggtgaacttcaacttcgacgaccccaacctgatcatcctgcctctggcctttggcaagagacagggcagagaattcatctggaacgacctgctgtccctggaaaccggcagcctgaagctggccaacggaagagtgatcgagaagacactgtacaacagaagaacccggcaggatgagcctgccctgttcgtggccctgaccttcgagcggcgggaggtcctggactcctccaatatcaaaccaatgaacctgatcggcgtggcaagaggcgaaaacatccccgccgtgatcgccctgaccgaccccgagggctgcccactgagccggtttaaggatagcctgggaaacccaacccacatcctgagaatcggcgagagctataaggagaagcagcggaccatccaggccaagaaggaggtggagcagcggagagccggcggctacagccggaagtacgccagcaaagccaagaatctggcagacgatatggtgagaaacaccgctagagatctgctgtactacgccgtgacccaggatgccatgctgatcttcgccaacctgagccggggcttcggccggcagggcaagcggaccttcatggccgagagacagtacacacggatggaggactggctgaccgccaagctggcctacgagggcctgagcaagacctacctgtccaagacactggcccagtacacctccaagacatgcagcaactgtgggtttaccatcaccagcgccgactacgacagggtgctggagaagctgaagaagacagcaacaggctggatgaccacaattaacggcaaggagctgaaggtggagggccagattacctactacaacagatacaagagacagaacgtagtcaaggacctgtccgtcgagctggatagactgagcgaagaatctgtgaacaacgacatctcctcctggacaaagggcagaagcggagaagctctgagcctcctgaagaaaagattctcccatagacccgtgcaggagaagttcgtgtgcctgaactgcggcttcgagacacacgcagccgagcaagccgccctgaacatcgccagatcctggctgttcctgcggagccaggagtacaagaaataccagacaaacaagacaaccggcaacaccgataagagagccttcgtcgagacctggcagtccttttaccggaagaagcttaaggaggtgtggaaacctgccgtgcggtctggcggatctggcggaggctccaccagccccaagaaaaagagaaaagtctaagctgccttctgcggggcttgccttctggccatgcccttcttctctcccttgcacctgtacctcttggtctttgaataaagcctgagtaggaaggctagcaaaaaaaaaaaaaaaaaaaaaaaaaaaaaaaaaaaaaaaaaaaaaaaaaaaaaaaaaaaaaaaaaaaaaaaaaaaaaaaa

SEQ ID NO: 13443 - RNA, 5785 nt, synthetic construct
  source 1..5785: mol_type = other RNA
aggaaataagagagaaaagaagagtaagaagaaatataagagccaccatggcccctaagaagaagcgtaaagtgagccggatggaacgcctcgtctacgaggtgcggcagaagtgcagaaacatcgaggacatctgcatctcctgcggatctctgaacgtgaccctggagcacccactgttcatcggcggcatgtgccagaactgtaaaaactgttttctggagtgtgcctatcaatacgacgatgacggctaccagagctactgcaccatctgttgcggcggaagagaggtgctgatgtgtggaaataacaactgctgccggtgcttctgcgtggaatgcgtggacctgctggtgggccccggcgccgcccaggccgctattaaggaagatccttggaactgctacatgtgcggccacaagggcacatacggcctgctgagacggagagaggactggcctagcagactgcagatgttcttcgccaataaccacgaccaggagttcgacccccctaaggtgtaccctcccgtccccgccgagaagagaaagcccatccgggtcctgagcctgttcgatggcatcgccaccggtctgctggtgctgaaggacctgggcatccaggtggataggtacattgcctccgaggtgtgcgaggactccatcaccgtgggaatggtgcgtcatcagggcaagatcatgtacgtgggcgacgtgcggagcgtgacacagaagcatatccaggagtggggccctttcgacctggtgatcggcggcagcccttgcaatgacctgagcatcgtgaacccagcccggaagggcctgtacgagggaaccggcagactgttcttcgagttttacagactgctgcacgacgcccggcctaaggaaggcgacgaccggcccttcttttggctgttcgagaatgtggtggccatgggagtcagcgacaagcgggatattagccggttcctggagagcaaccccgtgatgatcgatgccaaggaagtgagcgccgcccaccgggccagatacttctggggcaatctgcctggcatgaacagacccctggccagcaccgtgaacgacaagctggagctgcaggagtgcctggagcacggccggatcgccaagttcagcaaggtgagaaccatcaccacccgaagcaacagcatcaaacaaggcaaggaccagcactttcctgtgttcatgaacgagaaggaggacatcctgtggtgtaccgagatggagagagtgttcgggttcccagtccactacacagatgtcagcaacatgtctagactggccagacagagactgctgggaagaagctggtccgtccctgtgatcagacacctgttcgcccctctgaaggagtacttcgcctgcgtgagcagcggcaacagcaacgccaacagccggggccccagcttctctagcggcctggtgccactgtccctgagagggagccacatgggccccatggagatctacaaaaccgtgagcgcctggaagcggcagcctgtgcgcgtgctgagcctgtttcggaatatcgataaagtcctgaaaagcctgggattcctggagagcggctctggctccggcggtggcaccctgaagtacgtggaggatgtgacaaacgtggtcagacgggatgtggagaagtggggccccttcgatctggtgtacggcagcacccaacccctgggcagctcttgtgaccggtgccctggctggtacatgtttcagttccaccggatcctgcagtacgccctgccgagacaggagtcccagcggccattcttttggattttcatggacaacttgctgctgaccgaggatgaccaggaaactaccactcggttcctgcagaccgaagccgtgaccctgcaggacgtgagaggccgggactaccagaacgccatgcgggtgtggtccaacatccctggactgaaaagcaagcacgcacctctgacccctaaagaagaggagtacctgcaggcccaggtgcggagcagaagcaagctggacgcccctaaggtggatctgctggtgaagaattgcctcctgcccctgagagagtacttcaagtatttcagccagaatagtctgcccctgggaggcagcggcggcggccaccagatcagcgtgaccttcgacgacgtggccctggacttcacccaggaggagtggatcctgctggacctgagccagaggaacctgtacaggaacgtgatgctggagaactaccagaacctggtgaccgtggagtaccagctgagcaagcccaagctgatcgcctggctggagcagcaggagctgagggccgtggagcagggcatcctgcaggagtgggagaccggcctgcagaccaagggcggcggcccaagcagcggcgcccctcctcccagcggcggcagcccagccggctccccaacctctaccgaggagggcacctctgagtccgccacccccgagagcggccctggcacctccaccgagcccagcgagggcagcgcacccggcagccctgccggcagccccacctccacagaggagggaaccagcaccgagcccagcgaaggcagcgccccaggcaccagcaccgagcctagtgagcaggagattaaacggatcaacaagatcagaagaagacttgtgaaagacagcaacaccaagaaggccggcaagacaggccccatgaaaaccctgctggttagagtgatgacacccgatctgagagagcggctggaaaacctgagaaagaagcctgaaaatatcccccagcccatcagcaatacatctagagccaacctgaataagctgctgaccgattacaccgaaatgaagaaggcgatcctgcatgtgtactgggaagagttccagaaggaccctgtgggcctgatgagccgggtggcccagcctgccagcaagaagatcgatcagaacaagctgaaacctgagatggacgagaagggcaacctgaccaccgccggctttgcctgctctcagtgtggccagcccctgttcgtgtacaagctggagcaggtgtctgagaagggcaaggcttacaccaactacttcggacggtgcaatgtggccgagcacgaaaagctgatcctgctggcccagctgaagcccgagaaggatagcgacgaagccgtgacatatagcctgggaaagtttgggcagagggccctggatttctacagcattcatgtgaccaaggagtccacccaccccgtgaagcccctggcccagatcgccggaaacagatacgcctccggacctgtgggaaaggccctgagcgacgcatgtatgggcacaatcgcctccttcctgtctaagtaccaggacatcatcatcgaacaccagaaggtggtgaagggcaaccagaagagactggagagcctgcgggagctggccggcaaggaaaacctggaataccctagcgtgaccctgccacctcagcctcacaccaaggagggcgttgatgcctacaacgaagtgatcgcccgggtgcgaatgtgggtgaacctgaacctgtggcagaagctgaagctaagcagagatgatgccaagcctctgctgagactgaagggattcccttcctttcctctggtcgagagacaggccaacgaagtggactggtgggacatggtgtgtaacgtgaagaagctgatcaacgagaaaaaggaggatggcaaggtgttttggcagaatctggctggctacaagagacaggaagccctgagaccatacctgagcagcgaggaagatcggaagaagggaaagaaattcgctcggtaccagctgggcgacctgctgctgcacctggaaaagaagcacggcgaggactggggaaaggtgtacgacgaggcctgggagcggattgacaagaaagtggaaggcctgagcaagcacatcaagctggaagaggaacggagaagcgaggacgcccagagcaaggccgccctgaccgactggctgcgggctaaggccagcttcgtgatcgagggcctgaaggaggccgacaaggacgagttctgcagatgcgagctgaagctgcagaagtggtacggggacctgcggggaaagcccttcgccatcgaagccgagaacagcatcctggacatcagcggcttcagcaagcagtacaactgtgccttcatctggcagaaggacggcgtgaagaagctgaacctgtacctgatcatcaactacttcaagggcggcaagctgcggttcaagaagatcaaacctgaagccttcgaagccaacagattctacaccgtgatcaacaaaaagagcggcgagatcgtgcccatggaggtgaacttcaacttcgacgaccccaacctgatcatcctgcctctggcctttggcaagagacagggcagagaattcatctggaacgacctgctgtccctggaaaccggcagcctgaagctggccaacggaagagtgatcgagaagacactgtacaacagaagaacccggcaggatgagcctgccctgttcgtggccctgaccttcgagcggcgggaggtcctggactcctccaatatcaaaccaatgaacctgatcggcgtggcaagaggcgaaaacatccccgccgtgatcgccctgaccgaccccgagggctgcccactgagccggtttaaggatagcctgggaaacccaacccacatcctgagaatcggcgagagctataaggagaagcagcggaccatccaggccaagaaggaggtggagcagcggagagccggcggctacagccggaagtacgccagcaaagccaagaatctggcagacgatatggtgagaaacaccgctagagatctgctgtactacgccgtgacccaggatgccatgctgatcttcgccaacctgagccggggcttcggccggcagggcaagcggaccttcatggccgagagacagtacacacggatggaggactggctgaccgccaagctggcctacgagggcctgagcaagacctacctgtccaagacactggcccagtacacctccaagacatgcagcaactgtgggtttaccatcaccagcgccgactacgacagggtgctggagaagctgaagaagacagcaacaggctggatgaccacaattaacggcaaggagctgaaggtggagggccagattacctactacaacagatacaagagacagaacgtagtcaaggacctgtccgtcgagctggatagactgagcgaagaatctgtgaacaacgacatctcctcctggacaaagggcagaagcggagaagctctgagcctcctgaagaaaagattctcccatagacccgtgcaggagaagttcgtgtgcctgaactgcggcttcgagacacacgcagccgagcaagccgccctgaacatcgccagatcctggctgttcctgcggagccaggagtacaagaaataccagacaaacaagacaaccggcaacaccgataagagagccttcgtcgagacctggcagtccttttaccggaagaagcttaaggaggtgtggaaacctgccgtgcggtctggcggatctggcggaggctccaccagccccaagaaaaagagaaaagtctaagctgccttctgcggggcttgccttctggccatgcccttcttctctcccttgcacctgtacctcttggtctttgaataaagcctgagtaggaaggctagcaaaaaaaaaaaaaaaaaaaaaaaaaaaaaaaaaaaaaaaaaaaaaaaaaaaaaaaaaaaaaaaaaaaaaaaaaaaaaaaa

SEQ ID NO: 13444 - RNA, 5785 nt, synthetic construct
  source 1..5785: mol_type = other RNA
aggaaataagagagaaaagaagagtaagaagaaatataagagccaccatggcccctaagaagaagcgtaaagtgagccggatggaacgcctcgtctacgaggtgcggcagaagtgcagaaacatcgaggacatctgcatctcctgcggatctctgaacgtgaccctggagcacccactgttcatcggcggcatgtgccagaactgtaaaaactgttttctggagtgtgcctatcaatacgacgatgacggctaccagagctactgcaccatctgttgcggcggaagagaggtgctgatgtgtggaaataacaactgctgccggtgcttctgcgtggaatgcgtggacctgctggtgggccccggcgccgcccaggccgctattaaggaagatccttggaactgctacatgtgcggccacaagggcacatacggcctgctgagacggagagaggactggcctagcagactgcagatgttcttcgccaataaccacgaccaggagttcgacccccctaaggtgtaccctcccgtccccgccgagaagagaaagcccatccgggtcctgagcctgttcgatggcatcgccaccggtctgctggtgctgaaggacctgggcatccaggtggataggtacattgcctccgaggtgtgcgaggactccatcaccgtgggaatggtgcgtcatcagggcaagatcatgtacgtgggcgacgtgcggagcgtgacacagaagcatatccaggagtggggccctttcgacctggtgatcggcggcagcccttgcaatgacctgagcatcgtgaacccagcccggaagggcctgtacgagggaaccggcagactgttcttcgagttttacagactgctgcacgacgcccggcctaaggaaggcgacgaccggcccttcttttggctgttcgagaatgtggtggccatgggagtcagcgacaagcgggatattagccggttcctggagagcaaccccgtgatgatcgatgccaaggaagtgagcgccgcccaccgggccagatacttctggggcaatctgcctggcatgaacagacccctggccagcaccgtgaacgacaagctggagctgcaggagtgcctggagcacggccggatcgccaagttcagcaaggtgagaaccatcaccacccgaagcaacagcatcaaacaaggcaaggaccagcactttcctgtgttcatgaacgagaaggaggacatcctgtggtgtaccgagatggagagagtgttcgggttcccagtccactacacagatgtcagcaacatgtctagactggccagacagagactgctgggaagaagctggtccgtccctgtgatcagacacctgttcgcccctctgaaggagtacttcgcctgcgtgagcagcggcaacagcaacgccaacagccggggccccagcttctctagcggcctggtgccactgtccctgagagggagccacatgggccccatggagatctacaaaaccgtgagcgcctggaagcggcagcctgtgcgcgtgctgagcctgtttcggaatatcgataaagtcctgaaaagcctgggattcctggagagcggctctggctccggcggtggcaccctgaagtacgtggaggatgtgacaaacgtggtcagacgggatgtggagaagtggggccccttcgatctggtgtacggcagcacccaacccctgggcagctcttgtgaccggtgccctggctggtacatgtttcagttccaccggatcctgcagtacgccctgccgagacaggagtcccagcggccattcttttggattttcatggacaacttgctgctgaccgaggatgaccaggaaactaccactcggttcctgcagaccgaagccgtgaccctgcaggacgtgagaggccgggactaccagaacgccatgcgggtgtggtccaacatccctggactgaaaagcaagcacgcacctctgacccctaaagaagaggagtacctgcaggcccaggtgcggagcagaagcaagctggacgcccctaaggtggatctgctggtgaagaattgcctcctgcccctgagagagtacttcaagtatttcagccagaatagtctgcccctgggaggcagcggcggcggcgccagctgcggcctgctgaccttcagggacgtggccatcgagttcagccaggaggagtggaggtgcctgagccacacccagagggagctgtacagggacgtgatgctggagaactacggccacctgctgttcctgggcctgatcgtgagcaagcccgacctggtgagcttcctggagctgaggaaggacccctgggacgtgaagaggaggaagaccgccggcttcgaccccggcaggtggcagggcggcccaagcagcggcgcccctcctcccagcggcggcagcccagccggctccccaacctctaccgaggagggcacctctgagtccgccacccccgagagcggccctggcacctccaccgagcccagcgagggcagcgcacccggcagccctgccggcagccccacctccacagaggagggaaccagcaccgagcccagcgaaggcagcgccccaggcaccagcaccgagcctagtgagcaggagattaaacggatcaacaagatcagaagaagacttgtgaaagacagcaacaccaagaaggccggcaagacaggccccatgaaaaccctgctggttagagtgatgacacccgatctgagagagcggctggaaaacctgagaaagaagcctgaaaatatcccccagcccatcagcaatacatctagagccaacctgaataagctgctgaccgattacaccgaaatgaagaaggcgatcctgcatgtgtactgggaagagttccagaaggaccctgtgggcctgatgagccgggtggcccagcctgccagcaagaagatcgatcagaacaagctgaaacctgagatggacgagaagggcaacctgaccaccgccggctttgcctgctctcagtgtggccagcccctgttcgtgtacaagctggagcaggtgtctgagaagggcaaggcttacaccaactacttcggacggtgcaatgtggccgagcacgaaaagctgatcctgctggcccagctgaagcccgagaaggatagcgacgaagccgtgacatatagcctgggaaagtttgggcagagggccctggatttctacagcattcatgtgaccaaggagtccacccaccccgtgaagcccctggcccagatcgccggaaacagatacgcctccggacctgtgggaaaggccctgagcgacgcatgtatgggcacaatcgcctccttcctgtctaagtaccaggacatcatcatcgaacaccagaaggtggtgaagggcaaccagaagagactggagagcctgcgggagctggccggcaaggaaaacctggaataccctagcgtgaccctgccacctcagcctcacaccaaggagggcgttgatgcctacaacgaagtgatcgcccgggtgcgaatgtgggtgaacctgaacctgtggcagaagctgaagctaagcagagatgatgccaagcctctgctgagactgaagggattcccttcctttcctctggtcgagagacaggccaacgaagtggactggtgggacatggtgtgtaacgtgaagaagctgatcaacgagaaaaaggaggatggcaaggtgttttggcagaatctggctggctacaagagacaggaagccctgagaccatacctgagcagcgaggaagatcggaagaagggaaagaaattcgctcggtaccagctgggcgacctgctgctgcacctggaaaagaagcacggcgaggactggggaaaggtgtacgacgaggcctgggagcggattgacaagaaagtggaaggcctgagcaagcacatcaagctggaagaggaacggagaagcgaggacgcccagagcaaggccgccctgaccgactggctgcgggctaaggccagcttcgtgatcgagggcctgaaggaggccgacaaggacgagttctgcagatgcgagctgaagctgcagaagtggtacggggacctgcggggaaagcccttcgccatcgaagccgagaacagcatcctggacatcagcggcttcagcaagcagtacaactgtgccttcatctggcagaaggacggcgtgaagaagctgaacctgtacctgatcatcaactacttcaagggcggcaagctgcggttcaagaagatcaaacctgaagccttcgaagccaacagattctacaccgtgatcaacaaaaagagcggcgagatcgtgcccatggaggtgaacttcaacttcgacgaccccaacctgatcatcctgcctctggcctttggcaagagacagggcagagaattcatctggaacgacctgctgtccctggaaaccggcagcctgaagctggccaacggaagagtgatcgagaagacactgtacaacagaagaacccggcaggatgagcctgccctgttcgtggccctgaccttcgagcggcgggaggtcctggactcctccaatatcaaaccaatgaacctgatcggcgtggcaagaggcgaaaacatccccgccgtgatcgccctgaccgaccccgagggctgcccactgagccggtttaaggatagcctgggaaacccaacccacatcctgagaatcggcgagagctataaggagaagcagcggaccatccaggccaagaaggaggtggagcagcggagagccggcggctacagccggaagtacgccagcaaagccaagaatctggcagacgatatggtgagaaacaccgctagagatctgctgtactacgccgtgacccaggatgccatgctgatcttcgccaacctgagccggggcttcggccggcagggcaagcggaccttcatggccgagagacagtacacacggatggaggactggctgaccgccaagctggcctacgagggcctgagcaagacctacctgtccaagacactggcccagtacacctccaagacatgcagcaactgtgggtttaccatcaccagcgccgactacgacagggtgctggagaagctgaagaagacagcaacaggctggatgaccacaattaacggcaaggagctgaaggtggagggccagattacctactacaacagatacaagagacagaacgtagtcaaggacctgtccgtcgagctggatagactgagcgaagaatctgtgaacaacgacatctcctcctggacaaagggcagaagcggagaagctctgagcctcctgaagaaaagattctcccatagacccgtgcaggagaagttcgtgtgcctgaactgcggcttcgagacacacgcagccgagcaagccgccctgaacatcgccagatcctggctgttcctgcggagccaggagtacaagaaataccagacaaacaagacaaccggcaacaccgataagagagccttcgtcgagacctggcagtccttttaccggaagaagcttaaggaggtgtggaaacctgccgtgcggtctggcggatctggcggaggctccaccagccccaagaaaaagagaaaagtctaagctgccttctgcggggcttgccttctggccatgcccttcttctctcccttgcacctgtacctcttggtctttgaataaagcctgagtaggaaggctagcaaaaaaaaaaaaaaaaaaaaaaaaaaaaaaaaaaaaaaaaaaaaaaaaaaaaaaaaaaaaaaaaaaaaaaaaaaaaaaaa

SEQ ID NO: 13445 - RNA, 5821 nt, synthetic construct
  source 1..5821: mol_type = other RNA
aggaaataagagagaaaagaagagtaagaagaaatataagagccaccatggcccctaagaagaagcgtaaagtgagccggatggaacgcctcgtctacgaggtgcggcagaagtgcagaaacatcgaggacatctgcatctcctgcggatctctgaacgtgaccctggagcacccactgttcatcggcggcatgtgccagaactgtaaaaactgttttctggagtgtgcctatcaatacgacgatgacggctaccagagctactgcaccatctgttgcggcggaagagaggtgctgatgtgtggaaataacaactgctgccggtgcttctgcgtggaatgcgtggacctgctggtgggccccggcgccgcccaggccgctattaaggaagatccttggaactgctacatgtgcggccacaagggcacatacggcctgctgagacggagagaggactggcctagcagactgcagatgttcttcgccaataaccacgaccaggagttcgacccccctaaggtgtaccctcccgtccccgccgagaagagaaagcccatccgggtcctgagcctgttcgatggcatcgccaccggtctgctggtgctgaaggacctgggcatccaggtggataggtacattgcctccgaggtgtgcgaggactccatcaccgtgggaatggtgcgtcatcagggcaagatcatgtacgtgggcgacgtgcggagcgtgacacagaagcatatccaggagtggggccctttcgacctggtgatcggcggcagcccttgcaatgacctgagcatcgtgaacccagcccggaagggcctgtacgagggaaccggcagactgttcttcgagttttacagactgctgcacgacgcccggcctaaggaaggcgacgaccggcccttcttttggctgttcgagaatgtggtggccatgggagtcagcgacaagcgggatattagccggttcctggagagcaaccccgtgatgatcgatgccaaggaagtgagcgccgcccaccgggccagatacttctggggcaatctgcctggcatgaacagacccctggccagcaccgtgaacgacaagctggagctgcaggagtgcctggagcacggccggatcgccaagttcagcaaggtgagaaccatcaccacccgaagcaacagcatcaaacaaggcaaggaccagcactttcctgtgttcatgaacgagaaggaggacatcctgtggtgtaccgagatggagagagtgttcgggttcccagtccactacacagatgtcagcaacatgtctagactggccagacagagactgctgggaagaagctggtccgtccctgtgatcagacacctgttcgcccctctgaaggagtacttcgcctgcgtgagcagcggcaacagcaacgccaacagccggggccccagcttctctagcggcctggtgccactgtccctgagagggagccacatgggccccatggagatctacaaaaccgtgagcgcctggaagcggcagcctgtgcgcgtgctgagcctgtttcggaatatcgataaagtcctgaaaagcctgggattcctggagagcggctctggctccggcggtggcaccctgaagtacgtggaggatgtgacaaacgtggtcagacgggatgtggagaagtggggccccttcgatctggtgtacggcagcacccaacccctgggcagctcttgtgaccggtgccctggctggtacatgtttcagttccaccggatcctgcagtacgccctgccgagacaggagtcccagcggccattcttttggattttcatggacaacttgctgctgaccgaggatgaccaggaaactaccactcggttcctgcagaccgaagccgtgaccctgcaggacgtgagaggccgggactaccagaacgccatgcgggtgtggtccaacatccctggactgaaaagcaagcacgcacctctgacccctaaagaagaggagtacctgcaggcccaggtgcggagcagaagcaagctggacgcccctaaggtggatctgctggtgaagaattgcctcctgcccctgagagagtacttcaagtatttcagccagaatagtctgcccctgggaggcagcggcggcggcgtgaccttccaggaggtggccgtgtgcttcaccgaggaggagtgggccctgctggaccccggccagagggccctgtacagggtggtgatgcaggagaactacgaggccgtgaccagcctggtggccaagggcaacaagaacagcctgtgccagaccttctgcctgtgctggggcagccccagcagcatgctgttctgcagccccagcctgctgcagggcctgcagaagccccaggactgcaggggcctgtacggcggcgccccccagtgccagaccgtgggcggcccaagcagcggcgcccctcctcccagcggcggcagcccagccggctccccaacctctaccgaggagggcacctctgagtccgccacccccgagagcggccctggcacctccaccgagcccagcgagggcagcgcacccggcagccctgccggcagccccacctccacagaggagggaaccagcaccgagcccagcgaaggcagcgccccaggcaccagcaccgagcctagtgagcaggagattaaacggatcaacaagatcagaagaagacttgtgaaagacagcaacaccaagaaggccggcaagacaggccccatgaaaaccctgctggttagagtgatgacacccgatctgagagagcggctggaaaacctgagaaagaagcctgaaaatatcccccagcccatcagcaatacatctagagccaacctgaataagctgctgaccgattacaccgaaatgaagaaggcgatcctgcatgtgtactgggaagagttccagaaggaccctgtgggcctgatgagccgggtggcccagcctgccagcaagaagatcgatcagaacaagctgaaacctgagatggacgagaagggcaacctgaccaccgccggctttgcctgctctcagtgtggccagcccctgttcgtgtacaagctggagcaggtgtctgagaagggcaaggcttacaccaactacttcggacggtgcaatgtggccgagcacgaaaagctgatcctgctggcccagctgaagcccgagaaggatagcgacgaagccgtgacatatagcctgggaaagtttgggcagagggccctggatttctacagcattcatgtgaccaaggagtccacccaccccgtgaagcccctggcccagatcgccggaaacagatacgcctccggacctgtgggaaaggccctgagcgacgcatgtatgggcacaatcgcctccttcctgtctaagtaccaggacatcatcatcgaacaccagaaggtggtgaagggcaaccagaagagactggagagcctgcgggagctggccggcaaggaaaacctggaataccctagcgtgaccctgccacctcagcctcacaccaaggagggcgttgatgcctacaacgaagtgatcgcccgggtgcgaatgtgggtgaacctgaacctgtggcagaagctgaagctaagcagagatgatgccaagcctctgctgagactgaagggattcccttcctttcctctggtcgagagacaggccaacgaagtggactggtgggacatggtgtgtaacgtgaagaagctgatcaacgagaaaaaggaggatggcaaggtgttttggcagaatctggctggctacaagagacaggaagccctgagaccatacctgagcagcgaggaagatcggaagaagggaaagaaattcgctcggtaccagctgggcgacctgctgctgcacctggaaaagaagcacggcgaggactggggaaaggtgtacgacgaggcctgggagcggattgacaagaaagtggaaggcctgagcaagcacatcaagctggaagaggaacggagaagcgaggacgcccagagcaaggccgccctgaccgactggctgcgggctaaggccagcttcgtgatcgagggcctgaaggaggccgacaaggacgagttctgcagatgcgagctgaagctgcagaagtggtacggggacctgcggggaaagcccttcgccatcgaagccgagaacagcatcctggacatcagcggcttcagcaagcagtacaactgtgccttcatctggcagaaggacggcgtgaagaagctgaacctgtacctgatcatcaactacttcaagggcggcaagctgcggttcaagaagatcaaacctgaagccttcgaagccaacagattctacaccgtgatcaacaaaaagagcggcgagatcgtgcccatggaggtgaacttcaacttcgacgaccccaacctgatcatcctgcctctggcctttggcaagagacagggcagagaattcatctggaacgacctgctgtccctggaaaccggcagcctgaagctggccaacggaagagtgatcgagaagacactgtacaacagaagaacccggcaggatgagcctgccctgttcgtggccctgaccttcgagcggcgggaggtcctggactcctccaatatcaaaccaatgaacctgatcggcgtggcaagaggcgaaaacatccccgccgtgatcgccctgaccgaccccgagggctgcccactgagccggtttaaggatagcctgggaaacccaacccacatcctgagaatcggcgagagctataaggagaagcagcggaccatccaggccaagaaggaggtggagcagcggagagccggcggctacagccggaagtacgccagcaaagccaagaatctggcagacgatatggtgagaaacaccgctagagatctgctgtactacgccgtgacccaggatgccatgctgatcttcgccaacctgagccggggcttcggccggcagggcaagcggaccttcatggccgagagacagtacacacggatggaggactggctgaccgccaagctggcctacgagggcctgagcaagacctacctgtccaagacactggcccagtacacctccaagacatgcagcaactgtgggtttaccatcaccagcgccgactacgacagggtgctggagaagctgaagaagacagcaacaggctggatgaccacaattaacggcaaggagctgaaggtggagggccagattacctactacaacagatacaagagacagaacgtagtcaaggacctgtccgtcgagctggatagactgagcgaagaatctgtgaacaacgacatctcctcctggacaaagggcagaagcggagaagctctgagcctcctgaagaaaagattctcccatagacccgtgcaggagaagttcgtgtgcctgaactgcggcttcgagacacacgcagccgagcaagccgccctgaacatcgccagatcctggctgttcctgcggagccaggagtacaagaaataccagacaaacaagacaaccggcaacaccgataagagagccttcgtcgagacctggcagtccttttaccggaagaagcttaaggaggtgtggaaacctgccgtgcggtctggcggatctggcggaggctccaccagccccaagaaaaagagaaaagtctaagctgccttctgcggggcttgccttctggccatgcccttcttctctcccttgcacctgtacctcttggtctttgaataaagcctgagtaggaaggctagcaaaaaaaaaaaaaaaaaaaaaaaaaaaaaaaaaaaaaaaaaaaaaaaaaaaaaaaaaaaaaaaaaaaaaaaaaaaaaaaa

SEQ ID NO: 13446 - RNA, 5785 nt, synthetic construct
  source 1..5785: mol_type = other RNA
aggaaataagagagaaaagaagagtaagaagaaatataagagccaccatggcccctaagaagaagcgtaaagtgagccggatggaacgcctcgtctacgaggtgcggcagaagtgcagaaacatcgaggacatctgcatctcctgcggatctctgaacgtgaccctggagcacccactgttcatcggcggcatgtgccagaactgtaaaaactgttttctggagtgtgcctatcaatacgacgatgacggctaccagagctactgcaccatctgttgcggcggaagagaggtgctgatgtgtggaaataacaactgctgccggtgcttctgcgtggaatgcgtggacctgctggtgggccccggcgccgcccaggccgctattaaggaagatccttggaactgctacatgtgcggccacaagggcacatacggcctgctgagacggagagaggactggcctagcagactgcagatgttcttcgccaataaccacgaccaggagttcgacccccctaaggtgtaccctcccgtccccgccgagaagagaaagcccatccgggtcctgagcctgttcgatggcatcgccaccggtctgctggtgctgaaggacctgggcatccaggtggataggtacattgcctccgaggtgtgcgaggactccatcaccgtgggaatggtgcgtcatcagggcaagatcatgtacgtgggcgacgtgcggagcgtgacacagaagcatatccaggagtggggccctttcgacctggtgatcggcggcagcccttgcaatgacctgagcatcgtgaacccagcccggaagggcctgtacgagggaaccggcagactgttcttcgagttttacagactgctgcacgacgcccggcctaaggaaggcgacgaccggcccttcttttggctgttcgagaatgtggtggccatgggagtcagcgacaagcgggatattagccggttcctggagagcaaccccgtgatgatcgatgccaaggaagtgagcgccgcccaccgggccagatacttctggggcaatctgcctggcatgaacagacccctggccagcaccgtgaacgacaagctggagctgcaggagtgcctggagcacggccggatcgccaagttcagcaaggtgagaaccatcaccacccgaagcaacagcatcaaacaaggcaaggaccagcactttcctgtgttcatgaacgagaaggaggacatcctgtggtgtaccgagatggagagagtgttcgggttcccagtccactacacagatgtcagcaacatgtctagactggccagacagagactgctgggaagaagctggtccgtccctgtgatcagacacctgttcgcccctctgaaggagtacttcgcctgcgtgagcagcggcaacagcaacgccaacagccggggccccagcttctctagcggcctggtgccactgtccctgagagggagccacatgggccccatggagatctacaaaaccgtgagcgcctggaagcggcagcctgtgcgcgtgctgagcctgtttcggaatatcgataaagtcctgaaaagcctgggattcctggagagcggctctggctccggcggtggcaccctgaagtacgtggaggatgtgacaaacgtggtcagacgggatgtggagaagtggggccccttcgatctggtgtacggcagcacccaacccctgggcagctcttgtgaccggtgccctggctggtacatgtttcagttccaccggatcctgcagtacgccctgccgagacaggagtcccagcggccattcttttggattttcatggacaacttgctgctgaccgaggatgaccaggaaactaccactcggttcctgcagaccgaagccgtgaccctgcaggacgtgagaggccgggactaccagaacgccatgcgggtgtggtccaacatccctggactgaaaagcaagcacgcacctctgacccctaaagaagaggagtacctgcaggcccaggtgcggagcagaagcaagctggacgcccctaaggtggatctgctggtgaagaattgcctcctgcccctgagagagtacttcaagtatttcagccagaatagtctgcccctgggaggcagcggcggcggcagccacggccccctgagcttcgaggacgtggccatcgccttcaccaaggaggagtggcagcagctggaccccgcccagaggaccctgtacagggacgtgatgctggagaacttcagccacctggtgagcctgggccaccccgtgagcaagcccgacatcatcagcaagctggagcagggcgaggagccctggatcatcaagaggcacatcagcgactggatctgccccgagagggagaccaggggcggcccaagcagcggcgcccctcctcccagcggcggcagcccagccggctccccaacctctaccgaggagggcacctctgagtccgccacccccgagagcggccctggcacctccaccgagcccagcgagggcagcgcacccggcagccctgccggcagccccacctccacagaggagggaaccagcaccgagcccagcgaaggcagcgccccaggcaccagcaccgagcctagtgagcaggagattaaacggatcaacaagatcagaagaagacttgtgaaagacagcaacaccaagaaggccggcaagacaggccccatgaaaaccctgctggttagagtgatgacacccgatctgagagagcggctggaaaacctgagaaagaagcctgaaaatatcccccagcccatcagcaatacatctagagccaacctgaataagctgctgaccgattacaccgaaatgaagaaggcgatcctgcatgtgtactgggaagagttccagaaggaccctgtgggcctgatgagccgggtggcccagcctgccagcaagaagatcgatcagaacaagctgaaacctgagatggacgagaagggcaacctgaccaccgccggctttgcctgctctcagtgtggccagcccctgttcgtgtacaagctggagcaggtgtctgagaagggcaaggcttacaccaactacttcggacggtgcaatgtggccgagcacgaaaagctgatcctgctggcccagctgaagcccgagaaggatagcgacgaagccgtgacatatagcctgggaaagtttgggcagagggccctggatttctacagcattcatgtgaccaaggagtccacccaccccgtgaagcccctggcccagatcgccggaaacagatacgcctccggacctgtgggaaaggccctgagcgacgcatgtatgggcacaatcgcctccttcctgtctaagtaccaggacatcatcatcgaacaccagaaggtggtgaagggcaaccagaagagactggagagcctgcgggagctggccggcaaggaaaacctggaataccctagcgtgaccctgccacctcagcctcacaccaaggagggcgttgatgcctacaacgaagtgatcgcccgggtgcgaatgtgggtgaacctgaacctgtggcagaagctgaagctaagcagagatgatgccaagcctctgctgagactgaagggattcccttcctttcctctggtcgagagacaggccaacgaagtggactggtgggacatggtgtgtaacgtgaagaagctgatcaacgagaaaaaggaggatggcaaggtgttttggcagaatctggctggctacaagagacaggaagccctgagaccatacctgagcagcgaggaagatcggaagaagggaaagaaattcgctcggtaccagctgggcgacctgctgctgcacctggaaaagaagcacggcgaggactggggaaaggtgtacgacgaggcctgggagcggattgacaagaaagtggaaggcctgagcaagcacatcaagctggaagaggaacggagaagcgaggacgcccagagcaaggccgccctgaccgactggctgcgggctaaggccagcttcgtgatcgagggcctgaaggaggccgacaaggacgagttctgcagatgcgagctgaagctgcagaagtggtacggggacctgcggggaaagcccttcgccatcgaagccgagaacagcatcctggacatcagcggcttcagcaagcagtacaactgtgccttcatctggcagaaggacggcgtgaagaagctgaacctgtacctgatcatcaactacttcaagggcggcaagctgcggttcaagaagatcaaacctgaagccttcgaagccaacagattctacaccgtgatcaacaaaaagagcggcgagatcgtgcccatggaggtgaacttcaacttcgacgaccccaacctgatcatcctgcctctggcctttggcaagagacagggcagagaattcatctggaacgacctgctgtccctggaaaccggcagcctgaagctggccaacggaagagtgatcgagaagacactgtacaacagaagaacccggcaggatgagcctgccctgttcgtggccctgaccttcgagcggcgggaggtcctggactcctccaatatcaaaccaatgaacctgatcggcgtggcaagaggcgaaaacatccccgccgtgatcgccctgaccgaccccgagggctgcccactgagccggtttaaggatagcctgggaaacccaacccacatcctgagaatcggcgagagctataaggagaagcagcggaccatccaggccaagaaggaggtggagcagcggagagccggcggctacagccggaagtacgccagcaaagccaagaatctggcagacgatatggtgagaaacaccgctagagatctgctgtactacgccgtgacccaggatgccatgctgatcttcgccaacctgagccggggcttcggccggcagggcaagcggaccttcatggccgagagacagtacacacggatggaggactggctgaccgccaagctggcctacgagggcctgagcaagacctacctgtccaagacactggcccagtacacctccaagacatgcagcaactgtgggtttaccatcaccagcgccgactacgacagggtgctggagaagctgaagaagacagcaacaggctggatgaccacaattaacggcaaggagctgaaggtggagggccagattacctactacaacagatacaagagacagaacgtagtcaaggacctgtccgtcgagctggatagactgagcgaagaatctgtgaacaacgacatctcctcctggacaaagggcagaagcggagaagctctgagcctcctgaagaaaagattctcccatagacccgtgcaggagaagttcgtgtgcctgaactgcggcttcgagacacacgcagccgagcaagccgccctgaacatcgccagatcctggctgttcctgcggagccaggagtacaagaaataccagacaaacaagacaaccggcaacaccgataagagagccttcgtcgagacctggcagtccttttaccggaagaagcttaaggaggtgtggaaacctgccgtgcggtctggcggatctggcggaggctccaccagccccaagaaaaagagaaaagtctaagctgccttctgcggggcttgccttctggccatgcccttcttctctcccttgcacctgtacctcttggtctttgaataaagcctgagtaggaaggctagcaaaaaaaaaaaaaaaaaaaaaaaaaaaaaaaaaaaaaaaaaaaaaaaaaaaaaaaaaaaaaaaaaaaaaaaaaaaaaaaa

SEQ ID NO: 13447 - RNA, 5785 nt, synthetic construct
  source 1..5785: mol_type = other RNA
aggaaataagagagaaaagaagagtaagaagaaatataagagccaccatggcccctaagaagaagcgtaaagtgagccggatggaacgcctcgtctacgaggtgcggcagaagtgcagaaacatcgaggacatctgcatctcctgcggatctctgaacgtgaccctggagcacccactgttcatcggcggcatgtgccagaactgtaaaaactgttttctggagtgtgcctatcaatacgacgatgacggctaccagagctactgcaccatctgttgcggcggaagagaggtgctgatgtgtggaaataacaactgctgccggtgcttctgcgtggaatgcgtggacctgctggtgggccccggcgccgcccaggccgctattaaggaagatccttggaactgctacatgtgcggccacaagggcacatacggcctgctgagacggagagaggactggcctagcagactgcagatgttcttcgccaataaccacgaccaggagttcgacccccctaaggtgtaccctcccgtccccgccgagaagagaaagcccatccgggtcctgagcctgttcgatggcatcgccaccggtctgctggtgctgaaggacctgggcatccaggtggataggtacattgcctccgaggtgtgcgaggactccatcaccgtgggaatggtgcgtcatcagggcaagatcatgtacgtgggcgacgtgcggagcgtgacacagaagcatatccaggagtggggccctttcgacctggtgatcggcggcagcccttgcaatgacctgagcatcgtgaacccagcccggaagggcctgtacgagggaaccggcagactgttcttcgagttttacagactgctgcacgacgcccggcctaaggaaggcgacgaccggcccttcttttggctgttcgagaatgtggtggccatgggagtcagcgacaagcgggatattagccggttcctggagagcaaccccgtgatgatcgatgccaaggaagtgagcgccgcccaccgggccagatacttctggggcaatctgcctggcatgaacagacccctggccagcaccgtgaacgacaagctggagctgcaggagtgcctggagcacggccggatcgccaagttcagcaaggtgagaaccatcaccacccgaagcaacagcatcaaacaaggcaaggaccagcactttcctgtgttcatgaacgagaaggaggacatcctgtggtgtaccgagatggagagagtgttcgggttcccagtccactacacagatgtcagcaacatgtctagactggccagacagagactgctgggaagaagctggtccgtccctgtgatcagacacctgttcgcccctctgaaggagtacttcgcctgcgtgagcagcggcaacagcaacgccaacagccggggccccagcttctctagcggcctggtgccactgtccctgagagggagccacatgggccccatggagatctacaaaaccgtgagcgcctggaagcggcagcctgtgcgcgtgctgagcctgtttcggaatatcgataaagtcctgaaaagcctgggattcctggagagcggctctggctccggcggtggcaccctgaagtacgtggaggatgtgacaaacgtggtcagacgggatgtggagaagtggggccccttcgatctggtgtacggcagcacccaacccctgggcagctcttgtgaccggtgccctggctggtacatgtttcagttccaccggatcctgcagtacgccctgccgagacaggagtcccagcggccattcttttggattttcatggacaacttgctgctgaccgaggatgaccaggaaactaccactcggttcctgcagaccgaagccgtgaccctgcaggacgtgagaggccgggactaccagaacgccatgcgggtgtggtccaacatccctggactgaaaagcaagcacgcacctctgacccctaaagaagaggagtacctgcaggcccaggtgcggagcagaagcaagctggacgcccctaaggtggatctgctggtgaagaattgcctcctgcccctgagagagtacttcaagtatttcagccagaatagtctgcccctgggaggcagcggcggcggcatgagccagggcagcgtgaccttcagggacgtggccatcgacttcagccaggaggagtggaagtggctgcagcccgcccagagggacctgtacaggtgcgtgatgctggagaactacggccacctggtgagcctgggcctgagcatcagcaagcccgacgtggtgagcctgctggagcagggcaaggagccctggctgggcaagagggaggtgaagagggacctgttcagcgtgagcgagagcggcggcccaagcagcggcgcccctcctcccagcggcggcagcccagccggctccccaacctctaccgaggagggcacctctgagtccgccacccccgagagcggccctggcacctccaccgagcccagcgagggcagcgcacccggcagccctgccggcagccccacctccacagaggagggaaccagcaccgagcccagcgaaggcagcgccccaggcaccagcaccgagcctagtgagcaggagattaaacggatcaacaagatcagaagaagacttgtgaaagacagcaacaccaagaaggccggcaagacaggccccatgaaaaccctgctggttagagtgatgacacccgatctgagagagcggctggaaaacctgagaaagaagcctgaaaatatcccccagcccatcagcaatacatctagagccaacctgaataagctgctgaccgattacaccgaaatgaagaaggcgatcctgcatgtgtactgggaagagttccagaaggaccctgtgggcctgatgagccgggtggcccagcctgccagcaagaagatcgatcagaacaagctgaaacctgagatggacgagaagggcaacctgaccaccgccggctttgcctgctctcagtgtggccagcccctgttcgtgtacaagctggagcaggtgtctgagaagggcaaggcttacaccaactacttcggacggtgcaatgtggccgagcacgaaaagctgatcctgctggcccagctgaagcccgagaaggatagcgacgaagccgtgacatatagcctgggaaagtttgggcagagggccctggatttctacagcattcatgtgaccaaggagtccacccaccccgtgaagcccctggcccagatcgccggaaacagatacgcctccggacctgtgggaaaggccctgagcgacgcatgtatgggcacaatcgcctccttcctgtctaagtaccaggacatcatcatcgaacaccagaaggtggtgaagggcaaccagaagagactggagagcctgcgggagctggccggcaaggaaaacctggaataccctagcgtgaccctgccacctcagcctcacaccaaggagggcgttgatgcctacaacgaagtgatcgcccgggtgcgaatgtgggtgaacctgaacctgtggcagaagctgaagctaagcagagatgatgccaagcctctgctgagactgaagggattcccttcctttcctctggtcgagagacaggccaacgaagtggactggtgggacatggtgtgtaacgtgaagaagctgatcaacgagaaaaaggaggatggcaaggtgttttggcagaatctggctggctacaagagacaggaagccctgagaccatacctgagcagcgaggaagatcggaagaagggaaagaaattcgctcggtaccagctgggcgacctgctgctgcacctggaaaagaagcacggcgaggactggggaaaggtgtacgacgaggcctgggagcggattgacaagaaagtggaaggcctgagcaagcacatcaagctggaagaggaacggagaagcgaggacgcccagagcaaggccgccctgaccgactggctgcgggctaaggccagcttcgtgatcgagggcctgaaggaggccgacaaggacgagttctgcagatgcgagctgaagctgcagaagtggtacggggacctgcggggaaagcccttcgccatcgaagccgagaacagcatcctggacatcagcggcttcagcaagcagtacaactgtgccttcatctggcagaaggacggcgtgaagaagctgaacctgtacctgatcatcaactacttcaagggcggcaagctgcggttcaagaagatcaaacctgaagccttcgaagccaacagattctacaccgtgatcaacaaaaagagcggcgagatcgtgcccatggaggtgaacttcaacttcgacgaccccaacctgatcatcctgcctctggcctttggcaagagacagggcagagaattcatctggaacgacctgctgtccctggaaaccggcagcctgaagctggccaacggaagagtgatcgagaagacactgtacaacagaagaacccggcaggatgagcctgccctgttcgtggccctgaccttcgagcggcgggaggtcctggactcctccaatatcaaaccaatgaacctgatcggcgtggcaagaggcgaaaacatccccgccgtgatcgccctgaccgaccccgagggctgcccactgagccggtttaaggatagcctgggaaacccaacccacatcctgagaatcggcgagagctataaggagaagcagcggaccatccaggccaagaaggaggtggagcagcggagagccggcggctacagccggaagtacgccagcaaagccaagaatctggcagacgatatggtgagaaacaccgctagagatctgctgtactacgccgtgacccaggatgccatgctgatcttcgccaacctgagccggggcttcggccggcagggcaagcggaccttcatggccgagagacagtacacacggatggaggactggctgaccgccaagctggcctacgagggcctgagcaagacctacctgtccaagacactggcccagtacacctccaagacatgcagcaactgtgggtttaccatcaccagcgccgactacgacagggtgctggagaagctgaagaagacagcaacaggctggatgaccacaattaacggcaaggagctgaaggtggagggccagattacctactacaacagatacaagagacagaacgtagtcaaggacctgtccgtcgagctggatagactgagcgaagaatctgtgaacaacgacatctcctcctggacaaagggcagaagcggagaagctctgagcctcctgaagaaaagattctcccatagacccgtgcaggagaagttcgtgtgcctgaactgcggcttcgagacacacgcagccgagcaagccgccctgaacatcgccagatcctggctgttcctgcggagccaggagtacaagaaataccagacaaacaagacaaccggcaacaccgataagagagccttcgtcgagacctggcagtccttttaccggaagaagcttaaggaggtgtggaaacctgccgtgcggtctggcggatctggcggaggctccaccagccccaagaaaaagagaaaagtctaagctgccttctgcggggcttgccttctggccatgcccttcttctctcccttgcacctgtacctcttggtctttgaataaagcctgagtaggaaggctagcaaaaaaaaaaaaaaaaaaaaaaaaaaaaaaaaaaaaaaaaaaaaaaaaaaaaaaaaaaaaaaaaaaaaaaaaaaaaaaaa

SEQ ID NO: 13448 - RNA, 5785 nt, synthetic construct
  source 1..5785: mol_type = other RNA
aggaaataagagagaaaagaagagtaagaagaaatataagagccaccatggcccctaagaagaagcgtaaagtgagccggatggaacgcctcgtctacgaggtgcggcagaagtgcagaaacatcgaggacatctgcatctcctgcggatctctgaacgtgaccctggagcacccactgttcatcggcggcatgtgccagaactgtaaaaactgttttctggagtgtgcctatcaatacgacgatgacggctaccagagctactgcaccatctgttgcggcggaagagaggtgctgatgtgtggaaataacaactgctgccggtgcttctgcgtggaatgcgtggacctgctggtgggccccggcgccgcccaggccgctattaaggaagatccttggaactgctacatgtgcggccacaagggcacatacggcctgctgagacggagagaggactggcctagcagactgcagatgttcttcgccaataaccacgaccaggagttcgacccccctaaggtgtaccctcccgtccccgccgagaagagaaagcccatccgggtcctgagcctgttcgatggcatcgccaccggtctgctggtgctgaaggacctgggcatccaggtggataggtacattgcctccgaggtgtgcgaggactccatcaccgtgggaatggtgcgtcatcagggcaagatcatgtacgtgggcgacgtgcggagcgtgacacagaagcatatccaggagtggggccctttcgacctggtgatcggcggcagcccttgcaatgacctgagcatcgtgaacccagcccggaagggcctgtacgagggaaccggcagactgttcttcgagttttacagactgctgcacgacgcccggcctaaggaaggcgacgaccggcccttcttttggctgttcgagaatgtggtggccatgggagtcagcgacaagcgggatattagccggttcctggagagcaaccccgtgatgatcgatgccaaggaagtgagcgccgcccaccgggccagatacttctggggcaatctgcctggcatgaacagacccctggccagcaccgtgaacgacaagctggagctgcaggagtgcctggagcacggccggatcgccaagttcagcaaggtgagaaccatcaccacccgaagcaacagcatcaaacaaggcaaggaccagcactttcctgtgttcatgaacgagaaggaggacatcctgtggtgtaccgagatggagagagtgttcgggttcccagtccactacacagatgtcagcaacatgtctagactggccagacagagactgctgggaagaagctggtccgtccctgtgatcagacacctgttcgcccctctgaaggagtacttcgcctgcgtgagcagcggcaacagcaacgccaacagccggggccccagcttctctagcggcctggtgccactgtccctgagagggagccacatgggccccatggagatctacaaaaccgtgagcgcctggaagcggcagcctgtgcgcgtgctgagcctgtttcggaatatcgataaagtcctgaaaagcctgggattcctggagagcggctctggctccggcggtggcaccctgaagtacgtggaggatgtgacaaacgtggtcagacgggatgtggagaagtggggccccttcgatctggtgtacggcagcacccaacccctgggcagctcttgtgaccggtgccctggctggtacatgtttcagttccaccggatcctgcagtacgccctgccgagacaggagtcccagcggccattcttttggattttcatggacaacttgctgctgaccgaggatgaccaggaaactaccactcggttcctgcagaccgaagccgtgaccctgcaggacgtgagaggccgggactaccagaacgccatgcgggtgtggtccaacatccctggactgaaaagcaagcacgcacctctgacccctaaagaagaggagtacctgcaggcccaggtgcggagcagaagcaagctggacgcccctaaggtggatctgctggtgaagaattgcctcctgcccctgagagagtacttcaagtatttcagccagaatagtctgcccctgggaggcagcggcggcggcccccagggcagcgtgaccttcagggacgtggccgtgaacttcagccaggacgagtggggcaggctggaccccagccagaaggagctgtacagggaggtgatgctggagaactaccacaacctggtgtgcctgggcctggccgccagcaagcccgacgtgatcgaccagctggagaggggcgaggccccctggatgcccggcatcggctgccccgaccagaagatcaggagcgacacccaggagggcggcccaagcagcggcgcccctcctcccagcggcggcagcccagccggctccccaacctctaccgaggagggcacctctgagtccgccacccccgagagcggccctggcacctccaccgagcccagcgagggcagcgcacccggcagccctgccggcagccccacctccacagaggagggaaccagcaccgagcccagcgaaggcagcgccccaggcaccagcaccgagcctagtgagcaggagattaaacggatcaacaagatcagaagaagacttgtgaaagacagcaacaccaagaaggccggcaagacaggccccatgaaaaccctgctggttagagtgatgacacccgatctgagagagcggctggaaaacctgagaaagaagcctgaaaatatcccccagcccatcagcaatacatctagagccaacctgaataagctgctgaccgattacaccgaaatgaagaaggcgatcctgcatgtgtactgggaagagttccagaaggaccctgtgggcctgatgagccgggtggcccagcctgccagcaagaagatcgatcagaacaagctgaaacctgagatggacgagaagggcaacctgaccaccgccggctttgcctgctctcagtgtggccagcccctgttcgtgtacaagctggagcaggtgtctgagaagggcaaggcttacaccaactacttcggacggtgcaatgtggccgagcacgaaaagctgatcctgctggcccagctgaagcccgagaaggatagcgacgaagccgtgacatatagcctgggaaagtttgggcagagggccctggatttctacagcattcatgtgaccaaggagtccacccaccccgtgaagcccctggcccagatcgccggaaacagatacgcctccggacctgtgggaaaggccctgagcgacgcatgtatgggcacaatcgcctccttcctgtctaagtaccaggacatcatcatcgaacaccagaaggtggtgaagggcaaccagaagagactggagagcctgcgggagctggccggcaaggaaaacctggaataccctagcgtgaccctgccacctcagcctcacaccaaggagggcgttgatgcctacaacgaagtgatcgcccgggtgcgaatgtgggtgaacctgaacctgtggcagaagctgaagctaagcagagatgatgccaagcctctgctgagactgaagggattcccttcctttcctctggtcgagagacaggccaacgaagtggactggtgggacatggtgtgtaacgtgaagaagctgatcaacgagaaaaaggaggatggcaaggtgttttggcagaatctggctggctacaagagacaggaagccctgagaccatacctgagcagcgaggaagatcggaagaagggaaagaaattcgctcggtaccagctgggcgacctgctgctgcacctggaaaagaagcacggcgaggactggggaaaggtgtacgacgaggcctgggagcggattgacaagaaagtggaaggcctgagcaagcacatcaagctggaagaggaacggagaagcgaggacgcccagagcaaggccgccctgaccgactggctgcgggctaaggccagcttcgtgatcgagggcctgaaggaggccgacaaggacgagttctgcagatgcgagctgaagctgcagaagtggtacggggacctgcggggaaagcccttcgccatcgaagccgagaacagcatcctggacatcagcggcttcagcaagcagtacaactgtgccttcatctggcagaaggacggcgtgaagaagctgaacctgtacctgatcatcaactacttcaagggcggcaagctgcggttcaagaagatcaaacctgaagccttcgaagccaacagattctacaccgtgatcaacaaaaagagcggcgagatcgtgcccatggaggtgaacttcaacttcgacgaccccaacctgatcatcctgcctctggcctttggcaagagacagggcagagaattcatctggaacgacctgctgtccctggaaaccggcagcctgaagctggccaacggaagagtgatcgagaagacactgtacaacagaagaacccggcaggatgagcctgccctgttcgtggccctgaccttcgagcggcgggaggtcctggactcctccaatatcaaaccaatgaacctgatcggcgtggcaagaggcgaaaacatccccgccgtgatcgccctgaccgaccccgagggctgcccactgagccggtttaaggatagcctgggaaacccaacccacatcctgagaatcggcgagagctataaggagaagcagcggaccatccaggccaagaaggaggtggagcagcggagagccggcggctacagccggaagtacgccagcaaagccaagaatctggcagacgatatggtgagaaacaccgctagagatctgctgtactacgccgtgacccaggatgccatgctgatcttcgccaacctgagccggggcttcggccggcagggcaagcggaccttcatggccgagagacagtacacacggatggaggactggctgaccgccaagctggcctacgagggcctgagcaagacctacctgtccaagacactggcccagtacacctccaagacatgcagcaactgtgggtttaccatcaccagcgccgactacgacagggtgctggagaagctgaagaagacagcaacaggctggatgaccacaattaacggcaaggagctgaaggtggagggccagattacctactacaacagatacaagagacagaacgtagtcaaggacctgtccgtcgagctggatagactgagcgaagaatctgtgaacaacgacatctcctcctggacaaagggcagaagcggagaagctctgagcctcctgaagaaaagattctcccatagacccgtgcaggagaagttcgtgtgcctgaactgcggcttcgagacacacgcagccgagcaagccgccctgaacatcgccagatcctggctgttcctgcggagccaggagtacaagaaataccagacaaacaagacaaccggcaacaccgataagagagccttcgtcgagacctggcagtccttttaccggaagaagcttaaggaggtgtggaaacctgccgtgcggtctggcggatctggcggaggctccaccagccccaagaaaaagagaaaagtctaagctgccttctgcggggcttgccttctggccatgcccttcttctctcccttgcacctgtacctcttggtctttgaataaagcctgagtaggaaggctagcaaaaaaaaaaaaaaaaaaaaaaaaaaaaaaaaaaaaaaaaaaaaaaaaaaaaaaaaaaaaaaaaaaaaaaaaaaaaaaaa

SEQ ID NO: 13449 - RNA, 5785 nt, synthetic construct
  source 1..5785: mol_type = other RNA
aggaaataagagagaaaagaagagtaagaagaaatataagagccaccatggcccctaagaagaagcgtaaagtgagccggatggaacgcctcgtctacgaggtgcggcagaagtgcagaaacatcgaggacatctgcatctcctgcggatctctgaacgtgaccctggagcacccactgttcatcggcggcatgtgccagaactgtaaaaactgttttctggagtgtgcctatcaatacgacgatgacggctaccagagctactgcaccatctgttgcggcggaagagaggtgctgatgtgtggaaataacaactgctgccggtgcttctgcgtggaatgcgtggacctgctggtgggccccggcgccgcccaggccgctattaaggaagatccttggaactgctacatgtgcggccacaagggcacatacggcctgctgagacggagagaggactggcctagcagactgcagatgttcttcgccaataaccacgaccaggagttcgacccccctaaggtgtaccctcccgtccccgccgagaagagaaagcccatccgggtcctgagcctgttcgatggcatcgccaccggtctgctggtgctgaaggacctgggcatccaggtggataggtacattgcctccgaggtgtgcgaggactccatcaccgtgggaatggtgcgtcatcagggcaagatcatgtacgtgggcgacgtgcggagcgtgacacagaagcatatccaggagtggggccctttcgacctggtgatcggcggcagcccttgcaatgacctgagcatcgtgaacccagcccggaagggcctgtacgagggaaccggcagactgttcttcgagttttacagactgctgcacgacgcccggcctaaggaaggcgacgaccggcccttcttttggctgttcgagaatgtggtggccatgggagtcagcgacaagcgggatattagccggttcctggagagcaaccccgtgatgatcgatgccaaggaagtgagcgccgcccaccgggccagatacttctggggcaatctgcctggcatgaacagacccctggccagcaccgtgaacgacaagctggagctgcaggagtgcctggagcacggccggatcgccaagttcagcaaggtgagaaccatcaccacccgaagcaacagcatcaaacaaggcaaggaccagcactttcctgtgttcatgaacgagaaggaggacatcctgtggtgtaccgagatggagagagtgttcgggttcccagtccactacacagatgtcagcaacatgtctagactggccagacagagactgctgggaagaagctggtccgtccctgtgatcagacacctgttcgcccctctgaaggagtacttcgcctgcgtgagcagcggcaacagcaacgccaacagccggggccccagcttctctagcggcctggtgccactgtccctgagagggagccacatgggccccatggagatctacaaaaccgtgagcgcctggaagcggcagcctgtgcgcgtgctgagcctgtttcggaatatcgataaagtcctgaaaagcctgggattcctggagagcggctctggctccggcggtggcaccctgaagtacgtggaggatgtgacaaacgtggtcagacgggatgtggagaagtggggccccttcgatctggtgtacggcagcacccaacccctgggcagctcttgtgaccggtgccctggctggtacatgtttcagttccaccggatcctgcagtacgccctgccgagacaggagtcccagcggccattcttttggattttcatggacaacttgctgctgaccgaggatgaccaggaaactaccactcggttcctgcagaccgaagccgtgaccctgcaggacgtgagaggccgggactaccagaacgccatgcgggtgtggtccaacatccctggactgaaaagcaagcacgcacctctgacccctaaagaagaggagtacctgcaggcccaggtgcggagcagaagcaagctggacgcccctaaggtggatctgctggtgaagaattgcctcctgcccctgagagagtacttcaagtatttcagccagaatagtctgcccctgggaggcagcggcggcggcatggacctggtgatgttcagggacgtggccgtggacttcagccaggaggagtgggagtgcctgaacagctaccagaggaacctgtacagggacgtgatcctggagaactacagcaacctggtgagcctggccggctgcagcatcagcaagcccgacgtgatcaccctgctggagcagggcaaggagccctggctggtggtgaggaacgagaagaggaggtggagcctggacctggagagcaggggcggcccaagcagcggcgcccctcctcccagcggcggcagcccagccggctccccaacctctaccgaggagggcacctctgagtccgccacccccgagagcggccctggcacctccaccgagcccagcgagggcagcgcacccggcagccctgccggcagccccacctccacagaggagggaaccagcaccgagcccagcgaaggcagcgccccaggcaccagcaccgagcctagtgagcaggagattaaacggatcaacaagatcagaagaagacttgtgaaagacagcaacaccaagaaggccggcaagacaggccccatgaaaaccctgctggttagagtgatgacacccgatctgagagagcggctggaaaacctgagaaagaagcctgaaaatatcccccagcccatcagcaatacatctagagccaacctgaataagctgctgaccgattacaccgaaatgaagaaggcgatcctgcatgtgtactgggaagagttccagaaggaccctgtgggcctgatgagccgggtggcccagcctgccagcaagaagatcgatcagaacaagctgaaacctgagatggacgagaagggcaacctgaccaccgccggctttgcctgctctcagtgtggccagcccctgttcgtgtacaagctggagcaggtgtctgagaagggcaaggcttacaccaactacttcggacggtgcaatgtggccgagcacgaaaagctgatcctgctggcccagctgaagcccgagaaggatagcgacgaagccgtgacatatagcctgggaaagtttgggcagagggccctggatttctacagcattcatgtgaccaaggagtccacccaccccgtgaagcccctggcccagatcgccggaaacagatacgcctccggacctgtgggaaaggccctgagcgacgcatgtatgggcacaatcgcctccttcctgtctaagtaccaggacatcatcatcgaacaccagaaggtggtgaagggcaaccagaagagactggagagcctgcgggagctggccggcaaggaaaacctggaataccctagcgtgaccctgccacctcagcctcacaccaaggagggcgttgatgcctacaacgaagtgatcgcccgggtgcgaatgtgggtgaacctgaacctgtggcagaagctgaagctaagcagagatgatgccaagcctctgctgagactgaagggattcccttcctttcctctggtcgagagacaggccaacgaagtggactggtgggacatggtgtgtaacgtgaagaagctgatcaacgagaaaaaggaggatggcaaggtgttttggcagaatctggctggctacaagagacaggaagccctgagaccatacctgagcagcgaggaagatcggaagaagggaaagaaattcgctcggtaccagctgggcgacctgctgctgcacctggaaaagaagcacggcgaggactggggaaaggtgtacgacgaggcctgggagcggattgacaagaaagtggaaggcctgagcaagcacatcaagctggaagaggaacggagaagcgaggacgcccagagcaaggccgccctgaccgactggctgcgggctaaggccagcttcgtgatcgagggcctgaaggaggccgacaaggacgagttctgcagatgcgagctgaagctgcagaagtggtacggggacctgcggggaaagcccttcgccatcgaagccgagaacagcatcctggacatcagcggcttcagcaagcagtacaactgtgccttcatctggcagaaggacggcgtgaagaagctgaacctgtacctgatcatcaactacttcaagggcggcaagctgcggttcaagaagatcaaacctgaagccttcgaagccaacagattctacaccgtgatcaacaaaaagagcggcgagatcgtgcccatggaggtgaacttcaacttcgacgaccccaacctgatcatcctgcctctggcctttggcaagagacagggcagagaattcatctggaacgacctgctgtccctggaaaccggcagcctgaagctggccaacggaagagtgatcgagaagacactgtacaacagaagaacccggcaggatgagcctgccctgttcgtggccctgaccttcgagcggcgggaggtcctggactcctccaatatcaaaccaatgaacctgatcggcgtggcaagaggcgaaaacatccccgccgtgatcgccctgaccgaccccgagggctgcccactgagccggtttaaggatagcctgggaaacccaacccacatcctgagaatcggcgagagctataaggagaagcagcggaccatccaggccaagaaggaggtggagcagcggagagccggcggctacagccggaagtacgccagcaaagccaagaatctggcagacgatatggtgagaaacaccgctagagatctgctgtactacgccgtgacccaggatgccatgctgatcttcgccaacctgagccggggcttcggccggcagggcaagcggaccttcatggccgagagacagtacacacggatggaggactggctgaccgccaagctggcctacgagggcctgagcaagacctacctgtccaagacactggcccagtacacctccaagacatgcagcaactgtgggtttaccatcaccagcgccgactacgacagggtgctggagaagctgaagaagacagcaacaggctggatgaccacaattaacggcaaggagctgaaggtggagggccagattacctactacaacagatacaagagacagaacgtagtcaaggacctgtccgtcgagctggatagactgagcgaagaatctgtgaacaacgacatctcctcctggacaaagggcagaagcggagaagctctgagcctcctgaagaaaagattctcccatagacccgtgcaggagaagttcgtgtgcctgaactgcggcttcgagacacacgcagccgagcaagccgccctgaacatcgccagatcctggctgttcctgcggagccaggagtacaagaaataccagacaaacaagacaaccggcaacaccgataagagagccttcgtcgagacctggcagtccttttaccggaagaagcttaaggaggtgtggaaacctgccgtgcggtctggcggatctggcggaggctccaccagccccaagaaaaagagaaaagtctaagctgccttctgcggggcttgccttctggccatgcccttcttctctcccttgcacctgtacctcttggtctttgaataaagcctgagtaggaaggctagcaaaaaaaaaaaaaaaaaaaaaaaaaaaaaaaaaaaaaaaaaaaaaaaaaaaaaaaaaaaaaaaaaaaaaaaaaaaaaaaa

SEQ ID NO: 13450 - RNA, 5785 nt, synthetic construct
  source 1..5785: mol_type = other RNA
aggaaataagagagaaaagaagagtaagaagaaatataagagccaccatggcccctaagaagaagcgtaaagtgagccggatggaacgcctcgtctacgaggtgcggcagaagtgcagaaacatcgaggacatctgcatctcctgcggatctctgaacgtgaccctggagcacccactgttcatcggcggcatgtgccagaactgtaaaaactgttttctggagtgtgcctatcaatacgacgatgacggctaccagagctactgcaccatctgttgcggcggaagagaggtgctgatgtgtggaaataacaactgctgccggtgcttctgcgtggaatgcgtggacctgctggtgggccccggcgccgcccaggccgctattaaggaagatccttggaactgctacatgtgcggccacaagggcacatacggcctgctgagacggagagaggactggcctagcagactgcagatgttcttcgccaataaccacgaccaggagttcgacccccctaaggtgtaccctcccgtccccgccgagaagagaaagcccatccgggtcctgagcctgttcgatggcatcgccaccggtctgctggtgctgaaggacctgggcatccaggtggataggtacattgcctccgaggtgtgcgaggactccatcaccgtgggaatggtgcgtcatcagggcaagatcatgtacgtgggcgacgtgcggagcgtgacacagaagcatatccaggagtggggccctttcgacctggtgatcggcggcagcccttgcaatgacctgagcatcgtgaacccagcccggaagggcctgtacgagggaaccggcagactgttcttcgagttttacagactgctgcacgacgcccggcctaaggaaggcgacgaccggcccttcttttggctgttcgagaatgtggtggccatgggagtcagcgacaagcgggatattagccggttcctggagagcaaccccgtgatgatcgatgccaaggaagtgagcgccgcccaccgggccagatacttctggggcaatctgcctggcatgaacagacccctggccagcaccgtgaacgacaagctggagctgcaggagtgcctggagcacggccggatcgccaagttcagcaaggtgagaaccatcaccacccgaagcaacagcatcaaacaaggcaaggaccagcactttcctgtgttcatgaacgagaaggaggacatcctgtggtgtaccgagatggagagagtgttcgggttcccagtccactacacagatgtcagcaacatgtctagactggccagacagagactgctgggaagaagctggtccgtccctgtgatcagacacctgttcgcccctctgaaggagtacttcgcctgcgtgagcagcggcaacagcaacgccaacagccggggccccagcttctctagcggcctggtgccactgtccctgagagggagccacatgggccccatggagatctacaaaaccgtgagcgcctggaagcggcagcctgtgcgcgtgctgagcctgtttcggaatatcgataaagtcctgaaaagcctgggattcctggagagcggctctggctccggcggtggcaccctgaagtacgtggaggatgtgacaaacgtggtcagacgggatgtggagaagtggggccccttcgatctggtgtacggcagcacccaacccctgggcagctcttgtgaccggtgccctggctggtacatgtttcagttccaccggatcctgcagtacgccctgccgagacaggagtcccagcggccattcttttggattttcatggacaacttgctgctgaccgaggatgaccaggaaactaccactcggttcctgcagaccgaagccgtgaccctgcaggacgtgagaggccgggactaccagaacgccatgcgggtgtggtccaacatccctggactgaaaagcaagcacgcacctctgacccctaaagaagaggagtacctgcaggcccaggtgcggagcagaagcaagctggacgcccctaaggtggatctgctggtgaagaattgcctcctgcccctgagagagtacttcaagtatttcagccagaatagtctgcccctgggaggcagcggcggcggcagcgtgaccttcgaggacgtggccgtgaacttcagcctggaggagtggaacctgctgaacgaggcccagaggtgcctgtacagggacgtgatgctggagaccctgaccctgatcagcagcctgggcgcccccccccacaccctgttccccgccagggcctgcggccccgaggccccccccagcaggcactgccccaggcccagcctgtgcctgagcctgagccccctgcaccccaccggcgtgggcggcccaagcagcggcgcccctcctcccagcggcggcagcccagccggctccccaacctctaccgaggagggcacctctgagtccgccacccccgagagcggccctggcacctccaccgagcccagcgagggcagcgcacccggcagccctgccggcagccccacctccacagaggagggaaccagcaccgagcccagcgaaggcagcgccccaggcaccagcaccgagcctagtgagcaggagattaaacggatcaacaagatcagaagaagacttgtgaaagacagcaacaccaagaaggccggcaagacaggccccatgaaaaccctgctggttagagtgatgacacccgatctgagagagcggctggaaaacctgagaaagaagcctgaaaatatcccccagcccatcagcaatacatctagagccaacctgaataagctgctgaccgattacaccgaaatgaagaaggcgatcctgcatgtgtactgggaagagttccagaaggaccctgtgggcctgatgagccgggtggcccagcctgccagcaagaagatcgatcagaacaagctgaaacctgagatggacgagaagggcaacctgaccaccgccggctttgcctgctctcagtgtggccagcccctgttcgtgtacaagctggagcaggtgtctgagaagggcaaggcttacaccaactacttcggacggtgcaatgtggccgagcacgaaaagctgatcctgctggcccagctgaagcccgagaaggatagcgacgaagccgtgacatatagcctgggaaagtttgggcagagggccctggatttctacagcattcatgtgaccaaggagtccacccaccccgtgaagcccctggcccagatcgccggaaacagatacgcctccggacctgtgggaaaggccctgagcgacgcatgtatgggcacaatcgcctccttcctgtctaagtaccaggacatcatcatcgaacaccagaaggtggtgaagggcaaccagaagagactggagagcctgcgggagctggccggcaaggaaaacctggaataccctagcgtgaccctgccacctcagcctcacaccaaggagggcgttgatgcctacaacgaagtgatcgcccgggtgcgaatgtgggtgaacctgaacctgtggcagaagctgaagctaagcagagatgatgccaagcctctgctgagactgaagggattcccttcctttcctctggtcgagagacaggccaacgaagtggactggtgggacatggtgtgtaacgtgaagaagctgatcaacgagaaaaaggaggatggcaaggtgttttggcagaatctggctggctacaagagacaggaagccctgagaccatacctgagcagcgaggaagatcggaagaagggaaagaaattcgctcggtaccagctgggcgacctgctgctgcacctggaaaagaagcacggcgaggactggggaaaggtgtacgacgaggcctgggagcggattgacaagaaagtggaaggcctgagcaagcacatcaagctggaagaggaacggagaagcgaggacgcccagagcaaggccgccctgaccgactggctgcgggctaaggccagcttcgtgatcgagggcctgaaggaggccgacaaggacgagttctgcagatgcgagctgaagctgcagaagtggtacggggacctgcggggaaagcccttcgccatcgaagccgagaacagcatcctggacatcagcggcttcagcaagcagtacaactgtgccttcatctggcagaaggacggcgtgaagaagctgaacctgtacctgatcatcaactacttcaagggcggcaagctgcggttcaagaagatcaaacctgaagccttcgaagccaacagattctacaccgtgatcaacaaaaagagcggcgagatcgtgcccatggaggtgaacttcaacttcgacgaccccaacctgatcatcctgcctctggcctttggcaagagacagggcagagaattcatctggaacgacctgctgtccctggaaaccggcagcctgaagctggccaacggaagagtgatcgagaagacactgtacaacagaagaacccggcaggatgagcctgccctgttcgtggccctgaccttcgagcggcgggaggtcctggactcctccaatatcaaaccaatgaacctgatcggcgtggcaagaggcgaaaacatccccgccgtgatcgccctgaccgaccccgagggctgcccactgagccggtttaaggatagcctgggaaacccaacccacatcctgagaatcggcgagagctataaggagaagcagcggaccatccaggccaagaaggaggtggagcagcggagagccggcggctacagccggaagtacgccagcaaagccaagaatctggcagacgatatggtgagaaacaccgctagagatctgctgtactacgccgtgacccaggatgccatgctgatcttcgccaacctgagccggggcttcggccggcagggcaagcggaccttcatggccgagagacagtacacacggatggaggactggctgaccgccaagctggcctacgagggcctgagcaagacctacctgtccaagacactggcccagtacacctccaagacatgcagcaactgtgggtttaccatcaccagcgccgactacgacagggtgctggagaagctgaagaagacagcaacaggctggatgaccacaattaacggcaaggagctgaaggtggagggccagattacctactacaacagatacaagagacagaacgtagtcaaggacctgtccgtcgagctggatagactgagcgaagaatctgtgaacaacgacatctcctcctggacaaagggcagaagcggagaagctctgagcctcctgaagaaaagattctcccatagacccgtgcaggagaagttcgtgtgcctgaactgcggcttcgagacacacgcagccgagcaagccgccctgaacatcgccagatcctggctgttcctgcggagccaggagtacaagaaataccagacaaacaagacaaccggcaacaccgataagagagccttcgtcgagacctggcagtccttttaccggaagaagcttaaggaggtgtggaaacctgccgtgcggtctggcggatctggcggaggctccaccagccccaagaaaaagagaaaagtctaagctgccttctgcggggcttgccttctggccatgcccttcttctctcccttgcacctgtacctcttggtctttgaataaagcctgagtaggaaggctagcaaaaaaaaaaaaaaaaaaaaaaaaaaaaaaaaaaaaaaaaaaaaaaaaaaaaaaaaaaaaaaaaaaaaaaaaaaaaaaaa

SEQ ID NO: 13451 - RNA, 5785 nt, synthetic construct
  source 1..5785: mol_type = other RNA
aggaaataagagagaaaagaagagtaagaagaaatataagagccaccatggcccctaagaagaagcgtaaagtgagccggatggaacgcctcgtctacgaggtgcggcagaagtgcagaaacatcgaggacatctgcatctcctgcggatctctgaacgtgaccctggagcacccactgttcatcggcggcatgtgccagaactgtaaaaactgttttctggagtgtgcctatcaatacgacgatgacggctaccagagctactgcaccatctgttgcggcggaagagaggtgctgatgtgtggaaataacaactgctgccggtgcttctgcgtggaatgcgtggacctgctggtgggccccggcgccgcccaggccgctattaaggaagatccttggaactgctacatgtgcggccacaagggcacatacggcctgctgagacggagagaggactggcctagcagactgcagatgttcttcgccaataaccacgaccaggagttcgacccccctaaggtgtaccctcccgtccccgccgagaagagaaagcccatccgggtcctgagcctgttcgatggcatcgccaccggtctgctggtgctgaaggacctgggcatccaggtggataggtacattgcctccgaggtgtgcgaggactccatcaccgtgggaatggtgcgtcatcagggcaagatcatgtacgtgggcgacgtgcggagcgtgacacagaagcatatccaggagtggggccctttcgacctggtgatcggcggcagcccttgcaatgacctgagcatcgtgaacccagcccggaagggcctgtacgagggaaccggcagactgttcttcgagttttacagactgctgcacgacgcccggcctaaggaaggcgacgaccggcccttcttttggctgttcgagaatgtggtggccatgggagtcagcgacaagcgggatattagccggttcctggagagcaaccccgtgatgatcgatgccaaggaagtgagcgccgcccaccgggccagatacttctggggcaatctgcctggcatgaacagacccctggccagcaccgtgaacgacaagctggagctgcaggagtgcctggagcacggccggatcgccaagttcagcaaggtgagaaccatcaccacccgaagcaacagcatcaaacaaggcaaggaccagcactttcctgtgttcatgaacgagaaggaggacatcctgtggtgtaccgagatggagagagtgttcgggttcccagtccactacacagatgtcagcaacatgtctagactggccagacagagactgctgggaagaagctggtccgtccctgtgatcagacacctgttcgcccctctgaaggagtacttcgcctgcgtgagcagcggcaacagcaacgccaacagccggggccccagcttctctagcggcctggtgccactgtccctgagagggagccacatgggccccatggagatctacaaaaccgtgagcgcctggaagcggcagcctgtgcgcgtgctgagcctgtttcggaatatcgataaagtcctgaaaagcctgggattcctggagagcggctctggctccggcggtggcaccctgaagtacgtggaggatgtgacaaacgtggtcagacgggatgtggagaagtggggccccttcgatctggtgtacggcagcacccaacccctgggcagctcttgtgaccggtgccctggctggtacatgtttcagttccaccggatcctgcagtacgccctgccgagacaggagtcccagcggccattcttttggattttcatggacaacttgctgctgaccgaggatgaccaggaaactaccactcggttcctgcagaccgaagccgtgaccctgcaggacgtgagaggccgggactaccagaacgccatgcgggtgtggtccaacatccctggactgaaaagcaagcacgcacctctgacccctaaagaagaggagtacctgcaggcccaggtgcggagcagaagcaagctggacgcccctaaggtggatctgctggtgaagaattgcctcctgcccctgagagagtacttcaagtatttcagccagaatagtctgcccctgggaggcagcggcggcggctgcagcaaggagcccctgtgcctgcaggagcccgtgagcttcgccgacgtggccgtgtacttcagcagggaggagtgggccctgctggaccccgcccagagggccctgtactgggacgtgatgctggagacctacgagtgcatcgccagcctgggcggcgaggacccctggatccccgacgtgcacggcctgaaggacatggccggcgacacctgccccggcgacggcatcgccgacctgaagggcggcccaagcagcggcgcccctcctcccagcggcggcagcccagccggctccccaacctctaccgaggagggcacctctgagtccgccacccccgagagcggccctggcacctccaccgagcccagcgagggcagcgcacccggcagccctgccggcagccccacctccacagaggagggaaccagcaccgagcccagcgaaggcagcgccccaggcaccagcaccgagcctagtgagcaggagattaaacggatcaacaagatcagaagaagacttgtgaaagacagcaacaccaagaaggccggcaagacaggccccatgaaaaccctgctggttagagtgatgacacccgatctgagagagcggctggaaaacctgagaaagaagcctgaaaatatcccccagcccatcagcaatacatctagagccaacctgaataagctgctgaccgattacaccgaaatgaagaaggcgatcctgcatgtgtactgggaagagttccagaaggaccctgtgggcctgatgagccgggtggcccagcctgccagcaagaagatcgatcagaacaagctgaaacctgagatggacgagaagggcaacctgaccaccgccggctttgcctgctctcagtgtggccagcccctgttcgtgtacaagctggagcaggtgtctgagaagggcaaggcttacaccaactacttcggacggtgcaatgtggccgagcacgaaaagctgatcctgctggcccagctgaagcccgagaaggatagcgacgaagccgtgacatatagcctgggaaagtttgggcagagggccctggatttctacagcattcatgtgaccaaggagtccacccaccccgtgaagcccctggcccagatcgccggaaacagatacgcctccggacctgtgggaaaggccctgagcgacgcatgtatgggcacaatcgcctccttcctgtctaagtaccaggacatcatcatcgaacaccagaaggtggtgaagggcaaccagaagagactggagagcctgcgggagctggccggcaaggaaaacctggaataccctagcgtgaccctgccacctcagcctcacaccaaggagggcgttgatgcctacaacgaagtgatcgcccgggtgcgaatgtgggtgaacctgaacctgtggcagaagctgaagctaagcagagatgatgccaagcctctgctgagactgaagggattcccttcctttcctctggtcgagagacaggccaacgaagtggactggtgggacatggtgtgtaacgtgaagaagctgatcaacgagaaaaaggaggatggcaaggtgttttggcagaatctggctggctacaagagacaggaagccctgagaccatacctgagcagcgaggaagatcggaagaagggaaagaaattcgctcggtaccagctgggcgacctgctgctgcacctggaaaagaagcacggcgaggactggggaaaggtgtacgacgaggcctgggagcggattgacaagaaagtggaaggcctgagcaagcacatcaagctggaagaggaacggagaagcgaggacgcccagagcaaggccgccctgaccgactggctgcgggctaaggccagcttcgtgatcgagggcctgaaggaggccgacaaggacgagttctgcagatgcgagctgaagctgcagaagtggtacggggacctgcggggaaagcccttcgccatcgaagccgagaacagcatcctggacatcagcggcttcagcaagcagtacaactgtgccttcatctggcagaaggacggcgtgaagaagctgaacctgtacctgatcatcaactacttcaagggcggcaagctgcggttcaagaagatcaaacctgaagccttcgaagccaacagattctacaccgtgatcaacaaaaagagcggcgagatcgtgcccatggaggtgaacttcaacttcgacgaccccaacctgatcatcctgcctctggcctttggcaagagacagggcagagaattcatctggaacgacctgctgtccctggaaaccggcagcctgaagctggccaacggaagagtgatcgagaagacactgtacaacagaagaacccggcaggatgagcctgccctgttcgtggccctgaccttcgagcggcgggaggtcctggactcctccaatatcaaaccaatgaacctgatcggcgtggcaagaggcgaaaacatccccgccgtgatcgccctgaccgaccccgagggctgcccactgagccggtttaaggatagcctgggaaacccaacccacatcctgagaatcggcgagagctataaggagaagcagcggaccatccaggccaagaaggaggtggagcagcggagagccggcggctacagccggaagtacgccagcaaagccaagaatctggcagacgatatggtgagaaacaccgctagagatctgctgtactacgccgtgacccaggatgccatgctgatcttcgccaacctgagccggggcttcggccggcagggcaagcggaccttcatggccgagagacagtacacacggatggaggactggctgaccgccaagctggcctacgagggcctgagcaagacctacctgtccaagacactggcccagtacacctccaagacatgcagcaactgtgggtttaccatcaccagcgccgactacgacagggtgctggagaagctgaagaagacagcaacaggctggatgaccacaattaacggcaaggagctgaaggtggagggccagattacctactacaacagatacaagagacagaacgtagtcaaggacctgtccgtcgagctggatagactgagcgaagaatctgtgaacaacgacatctcctcctggacaaagggcagaagcggagaagctctgagcctcctgaagaaaagattctcccatagacccgtgcaggagaagttcgtgtgcctgaactgcggcttcgagacacacgcagccgagcaagccgccctgaacatcgccagatcctggctgttcctgcggagccaggagtacaagaaataccagacaaacaagacaaccggcaacaccgataagagagccttcgtcgagacctggcagtccttttaccggaagaagcttaaggaggtgtggaaacctgccgtgcggtctggcggatctggcggaggctccaccagccccaagaaaaagagaaaagtctaagctgccttctgcggggcttgccttctggccatgcccttcttctctcccttgcacctgtacctcttggtctttgaataaagcctgagtaggaaggctagcaaaaaaaaaaaaaaaaaaaaaaaaaaaaaaaaaaaaaaaaaaaaaaaaaaaaaaaaaaaaaaaaaaaaaaaaaaaaaaaa

SEQ ID NO: 13452 - RNA, 5785 nt, synthetic construct
  source 1..5785: mol_type = other RNA
aggaaataagagagaaaagaagagtaagaagaaatataagagccaccatggcccctaagaagaagcgtaaagtgagccggatggaacgcctcgtctacgaggtgcggcagaagtgcagaaacatcgaggacatctgcatctcctgcggatctctgaacgtgaccctggagcacccactgttcatcggcggcatgtgccagaactgtaaaaactgttttctggagtgtgcctatcaatacgacgatgacggctaccagagctactgcaccatctgttgcggcggaagagaggtgctgatgtgtggaaataacaactgctgccggtgcttctgcgtggaatgcgtggacctgctggtgggccccggcgccgcccaggccgctattaaggaagatccttggaactgctacatgtgcggccacaagggcacatacggcctgctgagacggagagaggactggcctagcagactgcagatgttcttcgccaataaccacgaccaggagttcgacccccctaaggtgtaccctcccgtccccgccgagaagagaaagcccatccgggtcctgagcctgttcgatggcatcgccaccggtctgctggtgctgaaggacctgggcatccaggtggataggtacattgcctccgaggtgtgcgaggactccatcaccgtgggaatggtgcgtcatcagggcaagatcatgtacgtgggcgacgtgcggagcgtgacacagaagcatatccaggagtggggccctttcgacctggtgatcggcggcagcccttgcaatgacctgagcatcgtgaacccagcccggaagggcctgtacgagggaaccggcagactgttcttcgagttttacagactgctgcacgacgcccggcctaaggaaggcgacgaccggcccttcttttggctgttcgagaatgtggtggccatgggagtcagcgacaagcgggatattagccggttcctggagagcaaccccgtgatgatcgatgccaaggaagtgagcgccgcccaccgggccagatacttctggggcaatctgcctggcatgaacagacccctggccagcaccgtgaacgacaagctggagctgcaggagtgcctggagcacggccggatcgccaagttcagcaaggtgagaaccatcaccacccgaagcaacagcatcaaacaaggcaaggaccagcactttcctgtgttcatgaacgagaaggaggacatcctgtggtgtaccgagatggagagagtgttcgggttcccagtccactacacagatgtcagcaacatgtctagactggccagacagagactgctgggaagaagctggtccgtccctgtgatcagacacctgttcgcccctctgaaggagtacttcgcctgcgtgagcagcggcaacagcaacgccaacagccggggccccagcttctctagcggcctggtgccactgtccctgagagggagccacatgggccccatggagatctacaaaaccgtgagcgcctggaagcggcagcctgtgcgcgtgctgagcctgtttcggaatatcgataaagtcctgaaaagcctgggattcctggagagcggctctggctccggcggtggcaccctgaagtacgtggaggatgtgacaaacgtggtcagacgggatgtggagaagtggggccccttcgatctggtgtacggcagcacccaacccctgggcagctcttgtgaccggtgccctggctggtacatgtttcagttccaccggatcctgcagtacgccctgccgagacaggagtcccagcggccattcttttggattttcatggacaacttgctgctgaccgaggatgaccaggaaactaccactcggttcctgcagaccgaagccgtgaccctgcaggacgtgagaggccgggactaccagaacgccatgcgggtgtggtccaacatccctggactgaaaagcaagcacgcacctctgacccctaaagaagaggagtacctgcaggcccaggtgcggagcagaagcaagctggacgcccctaaggtggatctgctggtgaagaattgcctcctgcccctgagagagtacttcaagtatttcagccagaatagtctgcccctgggaggcagcggcggcggctacaggggccccgtgaccttcaaggacatcaccgtggagttcaccagggaggagtggaagctgctggacaccgcccagaggaccctgtacagggaggtgatgcaggagaactacagccacctgatcagcgtgggctactgcgccaacaggcccaacgccatcttcaagctgaagcagggcaaggagccctggatcctggaggtgcagttccccaggcagaagaaccccgaggacctgtgcaacggcggcccaagcagcggcgcccctcctcccagcggcggcagcccagccggctccccaacctctaccgaggagggcacctctgagtccgccacccccgagagcggccctggcacctccaccgagcccagcgagggcagcgcacccggcagccctgccggcagccccacctccacagaggagggaaccagcaccgagcccagcgaaggcagcgccccaggcaccagcaccgagcctagtgagcaggagattaaacggatcaacaagatcagaagaagacttgtgaaagacagcaacaccaagaaggccggcaagacaggccccatgaaaaccctgctggttagagtgatgacacccgatctgagagagcggctggaaaacctgagaaagaagcctgaaaatatcccccagcccatcagcaatacatctagagccaacctgaataagctgctgaccgattacaccgaaatgaagaaggcgatcctgcatgtgtactgggaagagttccagaaggaccctgtgggcctgatgagccgggtggcccagcctgccagcaagaagatcgatcagaacaagctgaaacctgagatggacgagaagggcaacctgaccaccgccggctttgcctgctctcagtgtggccagcccctgttcgtgtacaagctggagcaggtgtctgagaagggcaaggcttacaccaactacttcggacggtgcaatgtggccgagcacgaaaagctgatcctgctggcccagctgaagcccgagaaggatagcgacgaagccgtgacatatagcctgggaaagtttgggcagagggccctggatttctacagcattcatgtgaccaaggagtccacccaccccgtgaagcccctggcccagatcgccggaaacagatacgcctccggacctgtgggaaaggccctgagcgacgcatgtatgggcacaatcgcctccttcctgtctaagtaccaggacatcatcatcgaacaccagaaggtggtgaagggcaaccagaagagactggagagcctgcgggagctggccggcaaggaaaacctggaataccctagcgtgaccctgccacctcagcctcacaccaaggagggcgttgatgcctacaacgaagtgatcgcccgggtgcgaatgtgggtgaacctgaacctgtggcagaagctgaagctaagcagagatgatgccaagcctctgctgagactgaagggattcccttcctttcctctggtcgagagacaggccaacgaagtggactggtgggacatggtgtgtaacgtgaagaagctgatcaacgagaaaaaggaggatggcaaggtgttttggcagaatctggctggctacaagagacaggaagccctgagaccatacctgagcagcgaggaagatcggaagaagggaaagaaattcgctcggtaccagctgggcgacctgctgctgcacctggaaaagaagcacggcgaggactggggaaaggtgtacgacgaggcctgggagcggattgacaagaaagtggaaggcctgagcaagcacatcaagctggaagaggaacggagaagcgaggacgcccagagcaaggccgccctgaccgactggctgcgggctaaggccagcttcgtgatcgagggcctgaaggaggccgacaaggacgagttctgcagatgcgagctgaagctgcagaagtggtacggggacctgcggggaaagcccttcgccatcgaagccgagaacagcatcctggacatcagcggcttcagcaagcagtacaactgtgccttcatctggcagaaggacggcgtgaagaagctgaacctgtacctgatcatcaactacttcaagggcggcaagctgcggttcaagaagatcaaacctgaagccttcgaagccaacagattctacaccgtgatcaacaaaaagagcggcgagatcgtgcccatggaggtgaacttcaacttcgacgaccccaacctgatcatcctgcctctggcctttggcaagagacagggcagagaattcatctggaacgacctgctgtccctggaaaccggcagcctgaagctggccaacggaagagtgatcgagaagacactgtacaacagaagaacccggcaggatgagcctgccctgttcgtggccctgaccttcgagcggcgggaggtcctggactcctccaatatcaaaccaatgaacctgatcggcgtggcaagaggcgaaaacatccccgccgtgatcgccctgaccgaccccgagggctgcccactgagccggtttaaggatagcctgggaaacccaacccacatcctgagaatcggcgagagctataaggagaagcagcggaccatccaggccaagaaggaggtggagcagcggagagccggcggctacagccggaagtacgccagcaaagccaagaatctggcagacgatatggtgagaaacaccgctagagatctgctgtactacgccgtgacccaggatgccatgctgatcttcgccaacctgagccggggcttcggccggcagggcaagcggaccttcatggccgagagacagtacacacggatggaggactggctgaccgccaagctggcctacgagggcctgagcaagacctacctgtccaagacactggcccagtacacctccaagacatgcagcaactgtgggtttaccatcaccagcgccgactacgacagggtgctggagaagctgaagaagacagcaacaggctggatgaccacaattaacggcaaggagctgaaggtggagggccagattacctactacaacagatacaagagacagaacgtagtcaaggacctgtccgtcgagctggatagactgagcgaagaatctgtgaacaacgacatctcctcctggacaaagggcagaagcggagaagctctgagcctcctgaagaaaagattctcccatagacccgtgcaggagaagttcgtgtgcctgaactgcggcttcgagacacacgcagccgagcaagccgccctgaacatcgccagatcctggctgttcctgcggagccaggagtacaagaaataccagacaaacaagacaaccggcaacaccgataagagagccttcgtcgagacctggcagtccttttaccggaagaagcttaaggaggtgtggaaacctgccgtgcggtctggcggatctggcggaggctccaccagccccaagaaaaagagaaaagtctaagctgccttctgcggggcttgccttctggccatgcccttcttctctcccttgcacctgtacctcttggtctttgaataaagcctgagtaggaaggctagcaaaaaaaaaaaaaaaaaaaaaaaaaaaaaaaaaaaaaaaaaaaaaaaaaaaaaaaaaaaaaaaaaaaaaaaaaaaaaaaa

SEQ ID NO: 13453 - RNA, 5785 nt, synthetic construct
  source 1..5785: mol_type = other RNA
aggaaataagagagaaaagaagagtaagaagaaatataagagccaccatggcccctaagaagaagcgtaaagtgagccggatggaacgcctcgtctacgaggtgcggcagaagtgcagaaacatcgaggacatctgcatctcctgcggatctctgaacgtgaccctggagcacccactgttcatcggcggcatgtgccagaactgtaaaaactgttttctggagtgtgcctatcaatacgacgatgacggctaccagagctactgcaccatctgttgcggcggaagagaggtgctgatgtgtggaaataacaactgctgccggtgcttctgcgtggaatgcgtggacctgctggtgggccccggcgccgcccaggccgctattaaggaagatccttggaactgctacatgtgcggccacaagggcacatacggcctgctgagacggagagaggactggcctagcagactgcagatgttcttcgccaataaccacgaccaggagttcgacccccctaaggtgtaccctcccgtccccgccgagaagagaaagcccatccgggtcctgagcctgttcgatggcatcgccaccggtctgctggtgctgaaggacctgggcatccaggtggataggtacattgcctccgaggtgtgcgaggactccatcaccgtgggaatggtgcgtcatcagggcaagatcatgtacgtgggcgacgtgcggagcgtgacacagaagcatatccaggagtggggccctttcgacctggtgatcggcggcagcccttgcaatgacctgagcatcgtgaacccagcccggaagggcctgtacgagggaaccggcagactgttcttcgagttttacagactgctgcacgacgcccggcctaaggaaggcgacgaccggcccttcttttggctgttcgagaatgtggtggccatgggagtcagcgacaagcgggatattagccggttcctggagagcaaccccgtgatgatcgatgccaaggaagtgagcgccgcccaccgggccagatacttctggggcaatctgcctggcatgaacagacccctggccagcaccgtgaacgacaagctggagctgcaggagtgcctggagcacggccggatcgccaagttcagcaaggtgagaaccatcaccacccgaagcaacagcatcaaacaaggcaaggaccagcactttcctgtgttcatgaacgagaaggaggacatcctgtggtgtaccgagatggagagagtgttcgggttcccagtccactacacagatgtcagcaacatgtctagactggccagacagagactgctgggaagaagctggtccgtccctgtgatcagacacctgttcgcccctctgaaggagtacttcgcctgcgtgagcagcggcaacagcaacgccaacagccggggccccagcttctctagcggcctggtgccactgtccctgagagggagccacatgggccccatggagatctacaaaaccgtgagcgcctggaagcggcagcctgtgcgcgtgctgagcctgtttcggaatatcgataaagtcctgaaaagcctgggattcctggagagcggctctggctccggcggtggcaccctgaagtacgtggaggatgtgacaaacgtggtcagacgggatgtggagaagtggggccccttcgatctggtgtacggcagcacccaacccctgggcagctcttgtgaccggtgccctggctggtacatgtttcagttccaccggatcctgcagtacgccctgccgagacaggagtcccagcggccattcttttggattttcatggacaacttgctgctgaccgaggatgaccaggaaactaccactcggttcctgcagaccgaagccgtgaccctgcaggacgtgagaggccgggactaccagaacgccatgcgggtgtggtccaacatccctggactgaaaagcaagcacgcacctctgacccctaaagaagaggagtacctgcaggcccaggtgcggagcagaagcaagctggacgcccctaaggtggatctgctggtgaagaattgcctcctgcccctgagagagtacttcaagtatttcagccagaatagtctgcccctgggaggcagcggcggcggcaacagcggcctgctgaccttcagggacgtggccatcgagttcagcctggaggagtggcagtgcctggacaccgcccagaagaacctgtacaggaacgtgatgctggagaactacaggaacctggccttcctgggcgtggccgtgagcaagcccgacctgatcacctgcctggagaaggacaaggagccctggaacatgaagaggcacgagatggtggacgagccccccggcatctgcccccacggcggcccaagcagcggcgcccctcctcccagcggcggcagcccagccggctccccaacctctaccgaggagggcacctctgagtccgccacccccgagagcggccctggcacctccaccgagcccagcgagggcagcgcacccggcagccctgccggcagccccacctccacagaggagggaaccagcaccgagcccagcgaaggcagcgccccaggcaccagcaccgagcctagtgagcaggagattaaacggatcaacaagatcagaagaagacttgtgaaagacagcaacaccaagaaggccggcaagacaggccccatgaaaaccctgctggttagagtgatgacacccgatctgagagagcggctggaaaacctgagaaagaagcctgaaaatatcccccagcccatcagcaatacatctagagccaacctgaataagctgctgaccgattacaccgaaatgaagaaggcgatcctgcatgtgtactgggaagagttccagaaggaccctgtgggcctgatgagccgggtggcccagcctgccagcaagaagatcgatcagaacaagctgaaacctgagatggacgagaagggcaacctgaccaccgccggctttgcctgctctcagtgtggccagcccctgttcgtgtacaagctggagcaggtgtctgagaagggcaaggcttacaccaactacttcggacggtgcaatgtggccgagcacgaaaagctgatcctgctggcccagctgaagcccgagaaggatagcgacgaagccgtgacatatagcctgggaaagtttgggcagagggccctggatttctacagcattcatgtgaccaaggagtccacccaccccgtgaagcccctggcccagatcgccggaaacagatacgcctccggacctgtgggaaaggccctgagcgacgcatgtatgggcacaatcgcctccttcctgtctaagtaccaggacatcatcatcgaacaccagaaggtggtgaagggcaaccagaagagactggagagcctgcgggagctggccggcaaggaaaacctggaataccctagcgtgaccctgccacctcagcctcacaccaaggagggcgttgatgcctacaacgaagtgatcgcccgggtgcgaatgtgggtgaacctgaacctgtggcagaagctgaagctaagcagagatgatgccaagcctctgctgagactgaagggattcccttcctttcctctggtcgagagacaggccaacgaagtggactggtgggacatggtgtgtaacgtgaagaagctgatcaacgagaaaaaggaggatggcaaggtgttttggcagaatctggctggctacaagagacaggaagccctgagaccatacctgagcagcgaggaagatcggaagaagggaaagaaattcgctcggtaccagctgggcgacctgctgctgcacctggaaaagaagcacggcgaggactggggaaaggtgtacgacgaggcctgggagcggattgacaagaaagtggaaggcctgagcaagcacatcaagctggaagaggaacggagaagcgaggacgcccagagcaaggccgccctgaccgactggctgcgggctaaggccagcttcgtgatcgagggcctgaaggaggccgacaaggacgagttctgcagatgcgagctgaagctgcagaagtggtacggggacctgcggggaaagcccttcgccatcgaagccgagaacagcatcctggacatcagcggcttcagcaagcagtacaactgtgccttcatctggcagaaggacggcgtgaagaagctgaacctgtacctgatcatcaactacttcaagggcggcaagctgcggttcaagaagatcaaacctgaagccttcgaagccaacagattctacaccgtgatcaacaaaaagagcggcgagatcgtgcccatggaggtgaacttcaacttcgacgaccccaacctgatcatcctgcctctggcctttggcaagagacagggcagagaattcatctggaacgacctgctgtccctggaaaccggcagcctgaagctggccaacggaagagtgatcgagaagacactgtacaacagaagaacccggcaggatgagcctgccctgttcgtggccctgaccttcgagcggcgggaggtcctggactcctccaatatcaaaccaatgaacctgatcggcgtggcaagaggcgaaaacatccccgccgtgatcgccctgaccgaccccgagggctgcccactgagccggtttaaggatagcctgggaaacccaacccacatcctgagaatcggcgagagctataaggagaagcagcggaccatccaggccaagaaggaggtggagcagcggagagccggcggctacagccggaagtacgccagcaaagccaagaatctggcagacgatatggtgagaaacaccgctagagatctgctgtactacgccgtgacccaggatgccatgctgatcttcgccaacctgagccggggcttcggccggcagggcaagcggaccttcatggccgagagacagtacacacggatggaggactggctgaccgccaagctggcctacgagggcctgagcaagacctacctgtccaagacactggcccagtacacctccaagacatgcagcaactgtgggtttaccatcaccagcgccgactacgacagggtgctggagaagctgaagaagacagcaacaggctggatgaccacaattaacggcaaggagctgaaggtggagggccagattacctactacaacagatacaagagacagaacgtagtcaaggacctgtccgtcgagctggatagactgagcgaagaatctgtgaacaacgacatctcctcctggacaaagggcagaagcggagaagctctgagcctcctgaagaaaagattctcccatagacccgtgcaggagaagttcgtgtgcctgaactgcggcttcgagacacacgcagccgagcaagccgccctgaacatcgccagatcctggctgttcctgcggagccaggagtacaagaaataccagacaaacaagacaaccggcaacaccgataagagagccttcgtcgagacctggcagtccttttaccggaagaagcttaaggaggtgtggaaacctgccgtgcggtctggcggatctggcggaggctccaccagccccaagaaaaagagaaaagtctaagctgccttctgcggggcttgccttctggccatgcccttcttctctcccttgcacctgtacctcttggtctttgaataaagcctgagtaggaaggctagcaaaaaaaaaaaaaaaaaaaaaaaaaaaaaaaaaaaaaaaaaaaaaaaaaaaaaaaaaaaaaaaaaaaaaaaaaaaaaaaa

SEQ ID NO: 13454 - RNA, 5785 nt, synthetic construct
  source 1..5785: mol_type = other RNA
aggaaataagagagaaaagaagagtaagaagaaatataagagccaccatggcccctaagaagaagcgtaaagtgagccggatggaacgcctcgtctacgaggtgcggcagaagtgcagaaacatcgaggacatctgcatctcctgcggatctctgaacgtgaccctggagcacccactgttcatcggcggcatgtgccagaactgtaaaaactgttttctggagtgtgcctatcaatacgacgatgacggctaccagagctactgcaccatctgttgcggcggaagagaggtgctgatgtgtggaaataacaactgctgccggtgcttctgcgtggaatgcgtggacctgctggtgggccccggcgccgcccaggccgctattaaggaagatccttggaactgctacatgtgcggccacaagggcacatacggcctgctgagacggagagaggactggcctagcagactgcagatgttcttcgccaataaccacgaccaggagttcgacccccctaaggtgtaccctcccgtccccgccgagaagagaaagcccatccgggtcctgagcctgttcgatggcatcgccaccggtctgctggtgctgaaggacctgggcatccaggtggataggtacattgcctccgaggtgtgcgaggactccatcaccgtgggaatggtgcgtcatcagggcaagatcatgtacgtgggcgacgtgcggagcgtgacacagaagcatatccaggagtggggccctttcgacctggtgatcggcggcagcccttgcaatgacctgagcatcgtgaacccagcccggaagggcctgtacgagggaaccggcagactgttcttcgagttttacagactgctgcacgacgcccggcctaaggaaggcgacgaccggcccttcttttggctgttcgagaatgtggtggccatgggagtcagcgacaagcgggatattagccggttcctggagagcaaccccgtgatgatcgatgccaaggaagtgagcgccgcccaccgggccagatacttctggggcaatctgcctggcatgaacagacccctggccagcaccgtgaacgacaagctggagctgcaggagtgcctggagcacggccggatcgccaagttcagcaaggtgagaaccatcaccacccgaagcaacagcatcaaacaaggcaaggaccagcactttcctgtgttcatgaacgagaaggaggacatcctgtggtgtaccgagatggagagagtgttcgggttcccagtccactacacagatgtcagcaacatgtctagactggccagacagagactgctgggaagaagctggtccgtccctgtgatcagacacctgttcgcccctctgaaggagtacttcgcctgcgtgagcagcggcaacagcaacgccaacagccggggccccagcttctctagcggcctggtgccactgtccctgagagggagccacatgggccccatggagatctacaaaaccgtgagcgcctggaagcggcagcctgtgcgcgtgctgagcctgtttcggaatatcgataaagtcctgaaaagcctgggattcctggagagcggctctggctccggcggtggcaccctgaagtacgtggaggatgtgacaaacgtggtcagacgggatgtggagaagtggggccccttcgatctggtgtacggcagcacccaacccctgggcagctcttgtgaccggtgccctggctggtacatgtttcagttccaccggatcctgcagtacgccctgccgagacaggagtcccagcggccattcttttggattttcatggacaacttgctgctgaccgaggatgaccaggaaactaccactcggttcctgcagaccgaagccgtgaccctgcaggacgtgagaggccgggactaccagaacgccatgcgggtgtggtccaacatccctggactgaaaagcaagcacgcacctctgacccctaaagaagaggagtacctgcaggcccaggtgcggagcagaagcaagctggacgcccctaaggtggatctgctggtgaagaattgcctcctgcccctgagagagtacttcaagtatttcagccagaatagtctgcccctgggaggcagcggcggcggcagccacggccccctgagcttcgaggacgtggccgtggccttcaccaaggaggagtggcagcagctggaccccgcccagaggaccctgtacagggacgtgatgctggagaacttcagccacgtgatcagcctgggccaccccgtgagcaagcccgacgtgatcagcaagctggagcagggcgaggagccctggatcatcaagagggacgtgagcgactggatctaccccgagagggagaccaggggcggcccaagcagcggcgcccctcctcccagcggcggcagcccagccggctccccaacctctaccgaggagggcacctctgagtccgccacccccgagagcggccctggcacctccaccgagcccagcgagggcagcgcacccggcagccctgccggcagccccacctccacagaggagggaaccagcaccgagcccagcgaaggcagcgccccaggcaccagcaccgagcctagtgagcaggagattaaacggatcaacaagatcagaagaagacttgtgaaagacagcaacaccaagaaggccggcaagacaggccccatgaaaaccctgctggttagagtgatgacacccgatctgagagagcggctggaaaacctgagaaagaagcctgaaaatatcccccagcccatcagcaatacatctagagccaacctgaataagctgctgaccgattacaccgaaatgaagaaggcgatcctgcatgtgtactgggaagagttccagaaggaccctgtgggcctgatgagccgggtggcccagcctgccagcaagaagatcgatcagaacaagctgaaacctgagatggacgagaagggcaacctgaccaccgccggctttgcctgctctcagtgtggccagcccctgttcgtgtacaagctggagcaggtgtctgagaagggcaaggcttacaccaactacttcggacggtgcaatgtggccgagcacgaaaagctgatcctgctggcccagctgaagcccgagaaggatagcgacgaagccgtgacatatagcctgggaaagtttgggcagagggccctggatttctacagcattcatgtgaccaaggagtccacccaccccgtgaagcccctggcccagatcgccggaaacagatacgcctccggacctgtgggaaaggccctgagcgacgcatgtatgggcacaatcgcctccttcctgtctaagtaccaggacatcatcatcgaacaccagaaggtggtgaagggcaaccagaagagactggagagcctgcgggagctggccggcaaggaaaacctggaataccctagcgtgaccctgccacctcagcctcacaccaaggagggcgttgatgcctacaacgaagtgatcgcccgggtgcgaatgtgggtgaacctgaacctgtggcagaagctgaagctaagcagagatgatgccaagcctctgctgagactgaagggattcccttcctttcctctggtcgagagacaggccaacgaagtggactggtgggacatggtgtgtaacgtgaagaagctgatcaacgagaaaaaggaggatggcaaggtgttttggcagaatctggctggctacaagagacaggaagccctgagaccatacctgagcagcgaggaagatcggaagaagggaaagaaattcgctcggtaccagctgggcgacctgctgctgcacctggaaaagaagcacggcgaggactggggaaaggtgtacgacgaggcctgggagcggattgacaagaaagtggaaggcctgagcaagcacatcaagctggaagaggaacggagaagcgaggacgcccagagcaaggccgccctgaccgactggctgcgggctaaggccagcttcgtgatcgagggcctgaaggaggccgacaaggacgagttctgcagatgcgagctgaagctgcagaagtggtacggggacctgcggggaaagcccttcgccatcgaagccgagaacagcatcctggacatcagcggcttcagcaagcagtacaactgtgccttcatctggcagaaggacggcgtgaagaagctgaacctgtacctgatcatcaactacttcaagggcggcaagctgcggttcaagaagatcaaacctgaagccttcgaagccaacagattctacaccgtgatcaacaaaaagagcggcgagatcgtgcccatggaggtgaacttcaacttcgacgaccccaacctgatcatcctgcctctggcctttggcaagagacagggcagagaattcatctggaacgacctgctgtccctggaaaccggcagcctgaagctggccaacggaagagtgatcgagaagacactgtacaacagaagaacccggcaggatgagcctgccctgttcgtggccctgaccttcgagcggcgggaggtcctggactcctccaatatcaaaccaatgaacctgatcggcgtggcaagaggcgaaaacatccccgccgtgatcgccctgaccgaccccgagggctgcccactgagccggtttaaggatagcctgggaaacccaacccacatcctgagaatcggcgagagctataaggagaagcagcggaccatccaggccaagaaggaggtggagcagcggagagccggcggctacagccggaagtacgccagcaaagccaagaatctggcagacgatatggtgagaaacaccgctagagatctgctgtactacgccgtgacccaggatgccatgctgatcttcgccaacctgagccggggcttcggccggcagggcaagcggaccttcatggccgagagacagtacacacggatggaggactggctgaccgccaagctggcctacgagggcctgagcaagacctacctgtccaagacactggcccagtacacctccaagacatgcagcaactgtgggtttaccatcaccagcgccgactacgacagggtgctggagaagctgaagaagacagcaacaggctggatgaccacaattaacggcaaggagctgaaggtggagggccagattacctactacaacagatacaagagacagaacgtagtcaaggacctgtccgtcgagctggatagactgagcgaagaatctgtgaacaacgacatctcctcctggacaaagggcagaagcggagaagctctgagcctcctgaagaaaagattctcccatagacccgtgcaggagaagttcgtgtgcctgaactgcggcttcgagacacacgcagccgagcaagccgccctgaacatcgccagatcctggctgttcctgcggagccaggagtacaagaaataccagacaaacaagacaaccggcaacaccgataagagagccttcgtcgagacctggcagtccttttaccggaagaagcttaaggaggtgtggaaacctgccgtgcggtctggcggatctggcggaggctccaccagccccaagaaaaagagaaaagtctaagctgccttctgcggggcttgccttctggccatgcccttcttctctcccttgcacctgtacctcttggtctttgaataaagcctgagtaggaaggctagcaaaaaaaaaaaaaaaaaaaaaaaaaaaaaaaaaaaaaaaaaaaaaaaaaaaaaaaaaaaaaaaaaaaaaaaaaaaaaaaa

SEQ ID NO: 13455 - RNA, 5785 nt, synthetic construct
  source 1..5785: mol_type = other RNA
aggaaataagagagaaaagaagagtaagaagaaatataagagccaccatggcccctaagaagaagcgtaaagtgagccggatggaacgcctcgtctacgaggtgcggcagaagtgcagaaacatcgaggacatctgcatctcctgcggatctctgaacgtgaccctggagcacccactgttcatcggcggcatgtgccagaactgtaaaaactgttttctggagtgtgcctatcaatacgacgatgacggctaccagagctactgcaccatctgttgcggcggaagagaggtgctgatgtgtggaaataacaactgctgccggtgcttctgcgtggaatgcgtggacctgctggtgggccccggcgccgcccaggccgctattaaggaagatccttggaactgctacatgtgcggccacaagggcacatacggcctgctgagacggagagaggactggcctagcagactgcagatgttcttcgccaataaccacgaccaggagttcgacccccctaaggtgtaccctcccgtccccgccgagaagagaaagcccatccgggtcctgagcctgttcgatggcatcgccaccggtctgctggtgctgaaggacctgggcatccaggtggataggtacattgcctccgaggtgtgcgaggactccatcaccgtgggaatggtgcgtcatcagggcaagatcatgtacgtgggcgacgtgcggagcgtgacacagaagcatatccaggagtggggccctttcgacctggtgatcggcggcagcccttgcaatgacctgagcatcgtgaacccagcccggaagggcctgtacgagggaaccggcagactgttcttcgagttttacagactgctgcacgacgcccggcctaaggaaggcgacgaccggcccttcttttggctgttcgagaatgtggtggccatgggagtcagcgacaagcgggatattagccggttcctggagagcaaccccgtgatgatcgatgccaaggaagtgagcgccgcccaccgggccagatacttctggggcaatctgcctggcatgaacagacccctggccagcaccgtgaacgacaagctggagctgcaggagtgcctggagcacggccggatcgccaagttcagcaaggtgagaaccatcaccacccgaagcaacagcatcaaacaaggcaaggaccagcactttcctgtgttcatgaacgagaaggaggacatcctgtggtgtaccgagatggagagagtgttcgggttcccagtccactacacagatgtcagcaacatgtctagactggccagacagagactgctgggaagaagctggtccgtccctgtgatcagacacctgttcgcccctctgaaggagtacttcgcctgcgtgagcagcggcaacagcaacgccaacagccggggccccagcttctctagcggcctggtgccactgtccctgagagggagccacatgggccccatggagatctacaaaaccgtgagcgcctggaagcggcagcctgtgcgcgtgctgagcctgtttcggaatatcgataaagtcctgaaaagcctgggattcctggagagcggctctggctccggcggtggcaccctgaagtacgtggaggatgtgacaaacgtggtcagacgggatgtggagaagtggggccccttcgatctggtgtacggcagcacccaacccctgggcagctcttgtgaccggtgccctggctggtacatgtttcagttccaccggatcctgcagtacgccctgccgagacaggagtcccagcggccattcttttggattttcatggacaacttgctgctgaccgaggatgaccaggaaactaccactcggttcctgcagaccgaagccgtgaccctgcaggacgtgagaggccgggactaccagaacgccatgcgggtgtggtccaacatccctggactgaaaagcaagcacgcacctctgacccctaaagaagaggagtacctgcaggcccaggtgcggagcagaagcaagctggacgcccctaaggtggatctgctggtgaagaattgcctcctgcccctgagagagtacttcaagtatttcagccagaatagtctgcccctgggaggcagcggcggcggccagcagggcagcgtgaccttcagggacgtggccgtggacttcaccctggaggagtggggccacctggaccccttccagaaggagctgtacagggacgtgatgctggagaacttcaggaacctggtgtgcctgggcctgaccgtgagcaagcccgacgtgatccaccagctggagcagggcgaggccccctggatccccgagggcgagagccccaggaacagcttcgccggctgcgccagcgacggcggcccaagcagcggcgcccctcctcccagcggcggcagcccagccggctccccaacctctaccgaggagggcacctctgagtccgccacccccgagagcggccctggcacctccaccgagcccagcgagggcagcgcacccggcagccctgccggcagccccacctccacagaggagggaaccagcaccgagcccagcgaaggcagcgccccaggcaccagcaccgagcctagtgagcaggagattaaacggatcaacaagatcagaagaagacttgtgaaagacagcaacaccaagaaggccggcaagacaggccccatgaaaaccctgctggttagagtgatgacacccgatctgagagagcggctggaaaacctgagaaagaagcctgaaaatatcccccagcccatcagcaatacatctagagccaacctgaataagctgctgaccgattacaccgaaatgaagaaggcgatcctgcatgtgtactgggaagagttccagaaggaccctgtgggcctgatgagccgggtggcccagcctgccagcaagaagatcgatcagaacaagctgaaacctgagatggacgagaagggcaacctgaccaccgccggctttgcctgctctcagtgtggccagcccctgttcgtgtacaagctggagcaggtgtctgagaagggcaaggcttacaccaactacttcggacggtgcaatgtggccgagcacgaaaagctgatcctgctggcccagctgaagcccgagaaggatagcgacgaagccgtgacatatagcctgggaaagtttgggcagagggccctggatttctacagcattcatgtgaccaaggagtccacccaccccgtgaagcccctggcccagatcgccggaaacagatacgcctccggacctgtgggaaaggccctgagcgacgcatgtatgggcacaatcgcctccttcctgtctaagtaccaggacatcatcatcgaacaccagaaggtggtgaagggcaaccagaagagactggagagcctgcgggagctggccggcaaggaaaacctggaataccctagcgtgaccctgccacctcagcctcacaccaaggagggcgttgatgcctacaacgaagtgatcgcccgggtgcgaatgtgggtgaacctgaacctgtggcagaagctgaagctaagcagagatgatgccaagcctctgctgagactgaagggattcccttcctttcctctggtcgagagacaggccaacgaagtggactggtgggacatggtgtgtaacgtgaagaagctgatcaacgagaaaaaggaggatggcaaggtgttttggcagaatctggctggctacaagagacaggaagccctgagaccatacctgagcagcgaggaagatcggaagaagggaaagaaattcgctcggtaccagctgggcgacctgctgctgcacctggaaaagaagcacggcgaggactggggaaaggtgtacgacgaggcctgggagcggattgacaagaaagtggaaggcctgagcaagcacatcaagctggaagaggaacggagaagcgaggacgcccagagcaaggccgccctgaccgactggctgcgggctaaggccagcttcgtgatcgagggcctgaaggaggccgacaaggacgagttctgcagatgcgagctgaagctgcagaagtggtacggggacctgcggggaaagcccttcgccatcgaagccgagaacagcatcctggacatcagcggcttcagcaagcagtacaactgtgccttcatctggcagaaggacggcgtgaagaagctgaacctgtacctgatcatcaactacttcaagggcggcaagctgcggttcaagaagatcaaacctgaagccttcgaagccaacagattctacaccgtgatcaacaaaaagagcggcgagatcgtgcccatggaggtgaacttcaacttcgacgaccccaacctgatcatcctgcctctggcctttggcaagagacagggcagagaattcatctggaacgacctgctgtccctggaaaccggcagcctgaagctggccaacggaagagtgatcgagaagacactgtacaacagaagaacccggcaggatgagcctgccctgttcgtggccctgaccttcgagcggcgggaggtcctggactcctccaatatcaaaccaatgaacctgatcggcgtggcaagaggcgaaaacatccccgccgtgatcgccctgaccgaccccgagggctgcccactgagccggtttaaggatagcctgggaaacccaacccacatcctgagaatcggcgagagctataaggagaagcagcggaccatccaggccaagaaggaggtggagcagcggagagccggcggctacagccggaagtacgccagcaaagccaagaatctggcagacgatatggtgagaaacaccgctagagatctgctgtactacgccgtgacccaggatgccatgctgatcttcgccaacctgagccggggcttcggccggcagggcaagcggaccttcatggccgagagacagtacacacggatggaggactggctgaccgccaagctggcctacgagggcctgagcaagacctacctgtccaagacactggcccagtacacctccaagacatgcagcaactgtgggtttaccatcaccagcgccgactacgacagggtgctggagaagctgaagaagacagcaacaggctggatgaccacaattaacggcaaggagctgaaggtggagggccagattacctactacaacagatacaagagacagaacgtagtcaaggacctgtccgtcgagctggatagactgagcgaagaatctgtgaacaacgacatctcctcctggacaaagggcagaagcggagaagctctgagcctcctgaagaaaagattctcccatagacccgtgcaggagaagttcgtgtgcctgaactgcggcttcgagacacacgcagccgagcaagccgccctgaacatcgccagatcctggctgttcctgcggagccaggagtacaagaaataccagacaaacaagacaaccggcaacaccgataagagagccttcgtcgagacctggcagtccttttaccggaagaagcttaaggaggtgtggaaacctgccgtgcggtctggcggatctggcggaggctccaccagccccaagaaaaagagaaaagtctaagctgccttctgcggggcttgccttctggccatgcccttcttctctcccttgcacctgtacctcttggtctttgaataaagcctgagtaggaaggctagcaaaaaaaaaaaaaaaaaaaaaaaaaaaaaaaaaaaaaaaaaaaaaaaaaaaaaaaaaaaaaaaaaaaaaaaaaaaaaaaa

SEQ ID NO: 13456 - RNA, 5884 nt, synthetic construct
  source 1..5884: mol_type = other RNA
aggaaataagagagaaaagaagagtaagaagaaatataagagccaccatggcccctaagaagaagcgtaaagtgagccggatggaacgcctcgtctacgaggtgcggcagaagtgcagaaacatcgaggacatctgcatctcctgcggatctctgaacgtgaccctggagcacccactgttcatcggcggcatgtgccagaactgtaaaaactgttttctggagtgtgcctatcaatacgacgatgacggctaccagagctactgcaccatctgttgcggcggaagagaggtgctgatgtgtggaaataacaactgctgccggtgcttctgcgtggaatgcgtggacctgctggtgggccccggcgccgcccaggccgctattaaggaagatccttggaactgctacatgtgcggccacaagggcacatacggcctgctgagacggagagaggactggcctagcagactgcagatgttcttcgccaataaccacgaccaggagttcgacccccctaaggtgtaccctcccgtccccgccgagaagagaaagcccatccgggtcctgagcctgttcgatggcatcgccaccggtctgctggtgctgaaggacctgggcatccaggtggataggtacattgcctccgaggtgtgcgaggactccatcaccgtgggaatggtgcgtcatcagggcaagatcatgtacgtgggcgacgtgcggagcgtgacacagaagcatatccaggagtggggccctttcgacctggtgatcggcggcagcccttgcaatgacctgagcatcgtgaacccagcccggaagggcctgtacgagggaaccggcagactgttcttcgagttttacagactgctgcacgacgcccggcctaaggaaggcgacgaccggcccttcttttggctgttcgagaatgtggtggccatgggagtcagcgacaagcgggatattagccggttcctggagagcaaccccgtgatgatcgatgccaaggaagtgagcgccgcccaccgggccagatacttctggggcaatctgcctggcatgaacagacccctggccagcaccgtgaacgacaagctggagctgcaggagtgcctggagcacggccggatcgccaagttcagcaaggtgagaaccatcaccacccgaagcaacagcatcaaacaaggcaaggaccagcactttcctgtgttcatgaacgagaaggaggacatcctgtggtgtaccgagatggagagagtgttcgggttcccagtccactacacagatgtcagcaacatgtctagactggccagacagagactgctgggaagaagctggtccgtccctgtgatcagacacctgttcgcccctctgaaggagtacttcgcctgcgtgagcagcggcaacagcaacgccaacagccggggccccagcttctctagcggcctggtgccactgtccctgagagggagccacatgggccccatggagatctacaaaaccgtgagcgcctggaagcggcagcctgtgcgcgtgctgagcctgtttcggaatatcgataaagtcctgaaaagcctgggattcctggagagcggctctggctccggcggtggcaccctgaagtacgtggaggatgtgacaaacgtggtcagacgggatgtggagaagtggggccccttcgatctggtgtacggcagcacccaacccctgggcagctcttgtgaccggtgccctggctggtacatgtttcagttccaccggatcctgcagtacgccctgccgagacaggagtcccagcggccattcttttggattttcatggacaacttgctgctgaccgaggatgaccaggaaactaccactcggttcctgcagaccgaagccgtgaccctgcaggacgtgagaggccgggactaccagaacgccatgcgggtgtggtccaacatccctggactgaaaagcaagcacgcacctctgacccctaaagaagaggagtacctgcaggcccaggtgcggagcagaagcaagctggacgcccctaaggtggatctgctggtgaagaattgcctcctgcccctgagagagtacttcaagtatttcagccagaatagtctgcccctgggaggcagcggcggcggcgtgaccttcgaggacatcgccgtgtacttcagcagggaggagtggggcctgctggacgaggcccagaggtgcctgtaccacgacgtgatgctggagaacttcagcctgatgaccagcgtgggctgcctgcacggcatcggcgccgaggaggcccccagcgagcagatcgtgagcgtggagaccgtgagccaggccaggacccccaagcccagcagcagcatccccaacgcccacagctgcgagatgtgcatcctggtgatgaaggacatcctgtacctgaccgagcaccagggcaccctgccctggcagaagccctacaccagcgccgccagcggcaagtggggcggcccaagcagcggcgcccctcctcccagcggcggcagcccagccggctccccaacctctaccgaggagggcacctctgagtccgccacccccgagagcggccctggcacctccaccgagcccagcgagggcagcgcacccggcagccctgccggcagccccacctccacagaggagggaaccagcaccgagcccagcgaaggcagcgccccaggcaccagcaccgagcctagtgagcaggagattaaacggatcaacaagatcagaagaagacttgtgaaagacagcaacaccaagaaggccggcaagacaggccccatgaaaaccctgctggttagagtgatgacacccgatctgagagagcggctggaaaacctgagaaagaagcctgaaaatatcccccagcccatcagcaatacatctagagccaacctgaataagctgctgaccgattacaccgaaatgaagaaggcgatcctgcatgtgtactgggaagagttccagaaggaccctgtgggcctgatgagccgggtggcccagcctgccagcaagaagatcgatcagaacaagctgaaacctgagatggacgagaagggcaacctgaccaccgccggctttgcctgctctcagtgtggccagcccctgttcgtgtacaagctggagcaggtgtctgagaagggcaaggcttacaccaactacttcggacggtgcaatgtggccgagcacgaaaagctgatcctgctggcccagctgaagcccgagaaggatagcgacgaagccgtgacatatagcctgggaaagtttgggcagagggccctggatttctacagcattcatgtgaccaaggagtccacccaccccgtgaagcccctggcccagatcgccggaaacagatacgcctccggacctgtgggaaaggccctgagcgacgcatgtatgggcacaatcgcctccttcctgtctaagtaccaggacatcatcatcgaacaccagaaggtggtgaagggcaaccagaagagactggagagcctgcgggagctggccggcaaggaaaacctggaataccctagcgtgaccctgccacctcagcctcacaccaaggagggcgttgatgcctacaacgaagtgatcgcccgggtgcgaatgtgggtgaacctgaacctgtggcagaagctgaagctaagcagagatgatgccaagcctctgctgagactgaagggattcccttcctttcctctggtcgagagacaggccaacgaagtggactggtgggacatggtgtgtaacgtgaagaagctgatcaacgagaaaaaggaggatggcaaggtgttttggcagaatctggctggctacaagagacaggaagccctgagaccatacctgagcagcgaggaagatcggaagaagggaaagaaattcgctcggtaccagctgggcgacctgctgctgcacctggaaaagaagcacggcgaggactggggaaaggtgtacgacgaggcctgggagcggattgacaagaaagtggaaggcctgagcaagcacatcaagctggaagaggaacggagaagcgaggacgcccagagcaaggccgccctgaccgactggctgcgggctaaggccagcttcgtgatcgagggcctgaaggaggccgacaaggacgagttctgcagatgcgagctgaagctgcagaagtggtacggggacctgcggggaaagcccttcgccatcgaagccgagaacagcatcctggacatcagcggcttcagcaagcagtacaactgtgccttcatctggcagaaggacggcgtgaagaagctgaacctgtacctgatcatcaactacttcaagggcggcaagctgcggttcaagaagatcaaacctgaagccttcgaagccaacagattctacaccgtgatcaacaaaaagagcggcgagatcgtgcccatggaggtgaacttcaacttcgacgaccccaacctgatcatcctgcctctggcctttggcaagagacagggcagagaattcatctggaacgacctgctgtccctggaaaccggcagcctgaagctggccaacggaagagtgatcgagaagacactgtacaacagaagaacccggcaggatgagcctgccctgttcgtggccctgaccttcgagcggcgggaggtcctggactcctccaatatcaaaccaatgaacctgatcggcgtggcaagaggcgaaaacatccccgccgtgatcgccctgaccgaccccgagggctgcccactgagccggtttaaggatagcctgggaaacccaacccacatcctgagaatcggcgagagctataaggagaagcagcggaccatccaggccaagaaggaggtggagcagcggagagccggcggctacagccggaagtacgccagcaaagccaagaatctggcagacgatatggtgagaaacaccgctagagatctgctgtactacgccgtgacccaggatgccatgctgatcttcgccaacctgagccggggcttcggccggcagggcaagcggaccttcatggccgagagacagtacacacggatggaggactggctgaccgccaagctggcctacgagggcctgagcaagacctacctgtccaagacactggcccagtacacctccaagacatgcagcaactgtgggtttaccatcaccagcgccgactacgacagggtgctggagaagctgaagaagacagcaacaggctggatgaccacaattaacggcaaggagctgaaggtggagggccagattacctactacaacagatacaagagacagaacgtagtcaaggacctgtccgtcgagctggatagactgagcgaagaatctgtgaacaacgacatctcctcctggacaaagggcagaagcggagaagctctgagcctcctgaagaaaagattctcccatagacccgtgcaggagaagttcgtgtgcctgaactgcggcttcgagacacacgcagccgagcaagccgccctgaacatcgccagatcctggctgttcctgcggagccaggagtacaagaaataccagacaaacaagacaaccggcaacaccgataagagagccttcgtcgagacctggcagtccttttaccggaagaagcttaaggaggtgtggaaacctgccgtgcggtctggcggatctggcggaggctccaccagccccaagaaaaagagaaaagtctaagctgccttctgcggggcttgccttctggccatgcccttcttctctcccttgcacctgtacctcttggtctttgaataaagcctgagtaggaaggctagcaaaaaaaaaaaaaaaaaaaaaaaaaaaaaaaaaaaaaaaaaaaaaaaaaaaaaaaaaaaaaaaaaaaaaaaaaaaaaaaa

SEQ ID NO: 13457 - RNA, 5785 nt, synthetic construct
  source 1..5785: mol_type = other RNA
aggaaataagagagaaaagaagagtaagaagaaatataagagccaccatggcccctaagaagaagcgtaaagtgagccggatggaacgcctcgtctacgaggtgcggcagaagtgcagaaacatcgaggacatctgcatctcctgcggatctctgaacgtgaccctggagcacccactgttcatcggcggcatgtgccagaactgtaaaaactgttttctggagtgtgcctatcaatacgacgatgacggctaccagagctactgcaccatctgttgcggcggaagagaggtgctgatgtgtggaaataacaactgctgccggtgcttctgcgtggaatgcgtggacctgctggtgggccccggcgccgcccaggccgctattaaggaagatccttggaactgctacatgtgcggccacaagggcacatacggcctgctgagacggagagaggactggcctagcagactgcagatgttcttcgccaataaccacgaccaggagttcgacccccctaaggtgtaccctcccgtccccgccgagaagagaaagcccatccgggtcctgagcctgttcgatggcatcgccaccggtctgctggtgctgaaggacctgggcatccaggtggataggtacattgcctccgaggtgtgcgaggactccatcaccgtgggaatggtgcgtcatcagggcaagatcatgtacgtgggcgacgtgcggagcgtgacacagaagcatatccaggagtggggccctttcgacctggtgatcggcggcagcccttgcaatgacctgagcatcgtgaacccagcccggaagggcctgtacgagggaaccggcagactgttcttcgagttttacagactgctgcacgacgcccggcctaaggaaggcgacgaccggcccttcttttggctgttcgagaatgtggtggccatgggagtcagcgacaagcgggatattagccggttcctggagagcaaccccgtgatgatcgatgccaaggaagtgagcgccgcccaccgggccagatacttctggggcaatctgcctggcatgaacagacccctggccagcaccgtgaacgacaagctggagctgcaggagtgcctggagcacggccggatcgccaagttcagcaaggtgagaaccatcaccacccgaagcaacagcatcaaacaaggcaaggaccagcactttcctgtgttcatgaacgagaaggaggacatcctgtggtgtaccgagatggagagagtgttcgggttcccagtccactacacagatgtcagcaacatgtctagactggccagacagagactgctgggaagaagctggtccgtccctgtgatcagacacctgttcgcccctctgaaggagtacttcgcctgcgtgagcagcggcaacagcaacgccaacagccggggccccagcttctctagcggcctggtgccactgtccctgagagggagccacatgggccccatggagatctacaaaaccgtgagcgcctggaagcggcagcctgtgcgcgtgctgagcctgtttcggaatatcgataaagtcctgaaaagcctgggattcctggagagcggctctggctccggcggtggcaccctgaagtacgtggaggatgtgacaaacgtggtcagacgggatgtggagaagtggggccccttcgatctggtgtacggcagcacccaacccctgggcagctcttgtgaccggtgccctggctggtacatgtttcagttccaccggatcctgcagtacgccctgccgagacaggagtcccagcggccattcttttggattttcatggacaacttgctgctgaccgaggatgaccaggaaactaccactcggttcctgcagaccgaagccgtgaccctgcaggacgtgagaggccgggactaccagaacgccatgcgggtgtggtccaacatccctggactgaaaagcaagcacgcacctctgacccctaaagaagaggagtacctgcaggcccaggtgcggagcagaagcaagctggacgcccctaaggtggatctgctggtgaagaattgcctcctgcccctgagagagtacttcaagtatttcagccagaatagtctgcccctgggaggcagcggcggcggctggcaggagagcctgaccttcaaggacgtggccgtggacttcacccaggaggagtggggcctgctggaccacagccagaagaggctgtacaaggaggtgatgctggagaacagccagaacctgctgagcctgggcatcccccccctgagggaggacctgatcagccacctggaggagggcgaggccagctggatcctggacaggaagggccccaggaagagctgccccgacgccgagaccaggggcggcccaagcagcggcgcccctcctcccagcggcggcagcccagccggctccccaacctctaccgaggagggcacctctgagtccgccacccccgagagcggccctggcacctccaccgagcccagcgagggcagcgcacccggcagccctgccggcagccccacctccacagaggagggaaccagcaccgagcccagcgaaggcagcgccccaggcaccagcaccgagcctagtgagcaggagattaaacggatcaacaagatcagaagaagacttgtgaaagacagcaacaccaagaaggccggcaagacaggccccatgaaaaccctgctggttagagtgatgacacccgatctgagagagcggctggaaaacctgagaaagaagcctgaaaatatcccccagcccatcagcaatacatctagagccaacctgaataagctgctgaccgattacaccgaaatgaagaaggcgatcctgcatgtgtactgggaagagttccagaaggaccctgtgggcctgatgagccgggtggcccagcctgccagcaagaagatcgatcagaacaagctgaaacctgagatggacgagaagggcaacctgaccaccgccggctttgcctgctctcagtgtggccagcccctgttcgtgtacaagctggagcaggtgtctgagaagggcaaggcttacaccaactacttcggacggtgcaatgtggccgagcacgaaaagctgatcctgctggcccagctgaagcccgagaaggatagcgacgaagccgtgacatatagcctgggaaagtttgggcagagggccctggatttctacagcattcatgtgaccaaggagtccacccaccccgtgaagcccctggcccagatcgccggaaacagatacgcctccggacctgtgggaaaggccctgagcgacgcatgtatgggcacaatcgcctccttcctgtctaagtaccaggacatcatcatcgaacaccagaaggtggtgaagggcaaccagaagagactggagagcctgcgggagctggccggcaaggaaaacctggaataccctagcgtgaccctgccacctcagcctcacaccaaggagggcgttgatgcctacaacgaagtgatcgcccgggtgcgaatgtgggtgaacctgaacctgtggcagaagctgaagctaagcagagatgatgccaagcctctgctgagactgaagggattcccttcctttcctctggtcgagagacaggccaacgaagtggactggtgggacatggtgtgtaacgtgaagaagctgatcaacgagaaaaaggaggatggcaaggtgttttggcagaatctggctggctacaagagacaggaagccctgagaccatacctgagcagcgaggaagatcggaagaagggaaagaaattcgctcggtaccagctgggcgacctgctgctgcacctggaaaagaagcacggcgaggactggggaaaggtgtacgacgaggcctgggagcggattgacaagaaagtggaaggcctgagcaagcacatcaagctggaagaggaacggagaagcgaggacgcccagagcaaggccgccctgaccgactggctgcgggctaaggccagcttcgtgatcgagggcctgaaggaggccgacaaggacgagttctgcagatgcgagctgaagctgcagaagtggtacggggacctgcggggaaagcccttcgccatcgaagccgagaacagcatcctggacatcagcggcttcagcaagcagtacaactgtgccttcatctggcagaaggacggcgtgaagaagctgaacctgtacctgatcatcaactacttcaagggcggcaagctgcggttcaagaagatcaaacctgaagccttcgaagccaacagattctacaccgtgatcaacaaaaagagcggcgagatcgtgcccatggaggtgaacttcaacttcgacgaccccaacctgatcatcctgcctctggcctttggcaagagacagggcagagaattcatctggaacgacctgctgtccctggaaaccggcagcctgaagctggccaacggaagagtgatcgagaagacactgtacaacagaagaacccggcaggatgagcctgccctgttcgtggccctgaccttcgagcggcgggaggtcctggactcctccaatatcaaaccaatgaacctgatcggcgtggcaagaggcgaaaacatccccgccgtgatcgccctgaccgaccccgagggctgcccactgagccggtttaaggatagcctgggaaacccaacccacatcctgagaatcggcgagagctataaggagaagcagcggaccatccaggccaagaaggaggtggagcagcggagagccggcggctacagccggaagtacgccagcaaagccaagaatctggcagacgatatggtgagaaacaccgctagagatctgctgtactacgccgtgacccaggatgccatgctgatcttcgccaacctgagccggggcttcggccggcagggcaagcggaccttcatggccgagagacagtacacacggatggaggactggctgaccgccaagctggcctacgagggcctgagcaagacctacctgtccaagacactggcccagtacacctccaagacatgcagcaactgtgggtttaccatcaccagcgccgactacgacagggtgctggagaagctgaagaagacagcaacaggctggatgaccacaattaacggcaaggagctgaaggtggagggccagattacctactacaacagatacaagagacagaacgtagtcaaggacctgtccgtcgagctggatagactgagcgaagaatctgtgaacaacgacatctcctcctggacaaagggcagaagcggagaagctctgagcctcctgaagaaaagattctcccatagacccgtgcaggagaagttcgtgtgcctgaactgcggcttcgagacacacgcagccgagcaagccgccctgaacatcgccagatcctggctgttcctgcggagccaggagtacaagaaataccagacaaacaagacaaccggcaacaccgataagagagccttcgtcgagacctggcagtccttttaccggaagaagcttaaggaggtgtggaaacctgccgtgcggtctggcggatctggcggaggctccaccagccccaagaaaaagagaaaagtctaagctgccttctgcggggcttgccttctggccatgcccttcttctctcccttgcacctgtacctcttggtctttgaataaagcctgagtaggaaggctagcaaaaaaaaaaaaaaaaaaaaaaaaaaaaaaaaaaaaaaaaaaaaaaaaaaaaaaaaaaaaaaaaaaaaaaaaaaaaaaaa

SEQ ID NO: 13458 - RNA, 5785 nt, synthetic construct
  source 1..5785: mol_type = other RNA
aggaaataagagagaaaagaagagtaagaagaaatataagagccaccatggcccctaagaagaagcgtaaagtgagccggatggaacgcctcgtctacgaggtgcggcagaagtgcagaaacatcgaggacatctgcatctcctgcggatctctgaacgtgaccctggagcacccactgttcatcggcggcatgtgccagaactgtaaaaactgttttctggagtgtgcctatcaatacgacgatgacggctaccagagctactgcaccatctgttgcggcggaagagaggtgctgatgtgtggaaataacaactgctgccggtgcttctgcgtggaatgcgtggacctgctggtgggccccggcgccgcccaggccgctattaaggaagatccttggaactgctacatgtgcggccacaagggcacatacggcctgctgagacggagagaggactggcctagcagactgcagatgttcttcgccaataaccacgaccaggagttcgacccccctaaggtgtaccctcccgtccccgccgagaagagaaagcccatccgggtcctgagcctgttcgatggcatcgccaccggtctgctggtgctgaaggacctgggcatccaggtggataggtacattgcctccgaggtgtgcgaggactccatcaccgtgggaatggtgcgtcatcagggcaagatcatgtacgtgggcgacgtgcggagcgtgacacagaagcatatccaggagtggggccctttcgacctggtgatcggcggcagcccttgcaatgacctgagcatcgtgaacccagcccggaagggcctgtacgagggaaccggcagactgttcttcgagttttacagactgctgcacgacgcccggcctaaggaaggcgacgaccggcccttcttttggctgttcgagaatgtggtggccatgggagtcagcgacaagcgggatattagccggttcctggagagcaaccccgtgatgatcgatgccaaggaagtgagcgccgcccaccgggccagatacttctggggcaatctgcctggcatgaacagacccctggccagcaccgtgaacgacaagctggagctgcaggagtgcctggagcacggccggatcgccaagttcagcaaggtgagaaccatcaccacccgaagcaacagcatcaaacaaggcaaggaccagcactttcctgtgttcatgaacgagaaggaggacatcctgtggtgtaccgagatggagagagtgttcgggttcccagtccactacacagatgtcagcaacatgtctagactggccagacagagactgctgggaagaagctggtccgtccctgtgatcagacacctgttcgcccctctgaaggagtacttcgcctgcgtgagcagcggcaacagcaacgccaacagccggggccccagcttctctagcggcctggtgccactgtccctgagagggagccacatgggccccatggagatctacaaaaccgtgagcgcctggaagcggcagcctgtgcgcgtgctgagcctgtttcggaatatcgataaagtcctgaaaagcctgggattcctggagagcggctctggctccggcggtggcaccctgaagtacgtggaggatgtgacaaacgtggtcagacgggatgtggagaagtggggccccttcgatctggtgtacggcagcacccaacccctgggcagctcttgtgaccggtgccctggctggtacatgtttcagttccaccggatcctgcagtacgccctgccgagacaggagtcccagcggccattcttttggattttcatggacaacttgctgctgaccgaggatgaccaggaaactaccactcggttcctgcagaccgaagccgtgaccctgcaggacgtgagaggccgggactaccagaacgccatgcgggtgtggtccaacatccctggactgaaaagcaagcacgcacctctgacccctaaagaagaggagtacctgcaggcccaggtgcggagcagaagcaagctggacgcccctaaggtggatctgctggtgaagaattgcctcctgcccctgagagagtacttcaagtatttcagccagaatagtctgcccctgggaggcagcggcggcggcagccagggcagcctgagcttcagggacgtgaccgtgggcttcacctgggaggagtggcagcagctggaccccgcccagagggccctgtacagggacgtgatgctggagacctacagccacctgctgagcgtgggctactgcatccccaagcccgaggtgatcctgaagctggagcagggcgaggagccctggatcctggaggaggagagcagcagccagagcgtgcccgagctgatcaacagcggcggcccaagcagcggcgcccctcctcccagcggcggcagcccagccggctccccaacctctaccgaggagggcacctctgagtccgccacccccgagagcggccctggcacctccaccgagcccagcgagggcagcgcacccggcagccctgccggcagccccacctccacagaggagggaaccagcaccgagcccagcgaaggcagcgccccaggcaccagcaccgagcctagtgagcaggagattaaacggatcaacaagatcagaagaagacttgtgaaagacagcaacaccaagaaggccggcaagacaggccccatgaaaaccctgctggttagagtgatgacacccgatctgagagagcggctggaaaacctgagaaagaagcctgaaaatatcccccagcccatcagcaatacatctagagccaacctgaataagctgctgaccgattacaccgaaatgaagaaggcgatcctgcatgtgtactgggaagagttccagaaggaccctgtgggcctgatgagccgggtggcccagcctgccagcaagaagatcgatcagaacaagctgaaacctgagatggacgagaagggcaacctgaccaccgccggctttgcctgctctcagtgtggccagcccctgttcgtgtacaagctggagcaggtgtctgagaagggcaaggcttacaccaactacttcggacggtgcaatgtggccgagcacgaaaagctgatcctgctggcccagctgaagcccgagaaggatagcgacgaagccgtgacatatagcctgggaaagtttgggcagagggccctggatttctacagcattcatgtgaccaaggagtccacccaccccgtgaagcccctggcccagatcgccggaaacagatacgcctccggacctgtgggaaaggccctgagcgacgcatgtatgggcacaatcgcctccttcctgtctaagtaccaggacatcatcatcgaacaccagaaggtggtgaagggcaaccagaagagactggagagcctgcgggagctggccggcaaggaaaacctggaataccctagcgtgaccctgccacctcagcctcacaccaaggagggcgttgatgcctacaacgaagtgatcgcccgggtgcgaatgtgggtgaacctgaacctgtggcagaagctgaagctaagcagagatgatgccaagcctctgctgagactgaagggattcccttcctttcctctggtcgagagacaggccaacgaagtggactggtgggacatggtgtgtaacgtgaagaagctgatcaacgagaaaaaggaggatggcaaggtgttttggcagaatctggctggctacaagagacaggaagccctgagaccatacctgagcagcgaggaagatcggaagaagggaaagaaattcgctcggtaccagctgggcgacctgctgctgcacctggaaaagaagcacggcgaggactggggaaaggtgtacgacgaggcctgggagcggattgacaagaaagtggaaggcctgagcaagcacatcaagctggaagaggaacggagaagcgaggacgcccagagcaaggccgccctgaccgactggctgcgggctaaggccagcttcgtgatcgagggcctgaaggaggccgacaaggacgagttctgcagatgcgagctgaagctgcagaagtggtacggggacctgcggggaaagcccttcgccatcgaagccgagaacagcatcctggacatcagcggcttcagcaagcagtacaactgtgccttcatctggcagaaggacggcgtgaagaagctgaacctgtacctgatcatcaactacttcaagggcggcaagctgcggttcaagaagatcaaacctgaagccttcgaagccaacagattctacaccgtgatcaacaaaaagagcggcgagatcgtgcccatggaggtgaacttcaacttcgacgaccccaacctgatcatcctgcctctggcctttggcaagagacagggcagagaattcatctggaacgacctgctgtccctggaaaccggcagcctgaagctggccaacggaagagtgatcgagaagacactgtacaacagaagaacccggcaggatgagcctgccctgttcgtggccctgaccttcgagcggcgggaggtcctggactcctccaatatcaaaccaatgaacctgatcggcgtggcaagaggcgaaaacatccccgccgtgatcgccctgaccgaccccgagggctgcccactgagccggtttaaggatagcctgggaaacccaacccacatcctgagaatcggcgagagctataaggagaagcagcggaccatccaggccaagaaggaggtggagcagcggagagccggcggctacagccggaagtacgccagcaaagccaagaatctggcagacgatatggtgagaaacaccgctagagatctgctgtactacgccgtgacccaggatgccatgctgatcttcgccaacctgagccggggcttcggccggcagggcaagcggaccttcatggccgagagacagtacacacggatggaggactggctgaccgccaagctggcctacgagggcctgagcaagacctacctgtccaagacactggcccagtacacctccaagacatgcagcaactgtgggtttaccatcaccagcgccgactacgacagggtgctggagaagctgaagaagacagcaacaggctggatgaccacaattaacggcaaggagctgaaggtggagggccagattacctactacaacagatacaagagacagaacgtagtcaaggacctgtccgtcgagctggatagactgagcgaagaatctgtgaacaacgacatctcctcctggacaaagggcagaagcggagaagctctgagcctcctgaagaaaagattctcccatagacccgtgcaggagaagttcgtgtgcctgaactgcggcttcgagacacacgcagccgagcaagccgccctgaacatcgccagatcctggctgttcctgcggagccaggagtacaagaaataccagacaaacaagacaaccggcaacaccgataagagagccttcgtcgagacctggcagtccttttaccggaagaagcttaaggaggtgtggaaacctgccgtgcggtctggcggatctggcggaggctccaccagccccaagaaaaagagaaaagtctaagctgccttctgcggggcttgccttctggccatgcccttcttctctcccttgcacctgtacctcttggtctttgaataaagcctgagtaggaaggctagcaaaaaaaaaaaaaaaaaaaaaaaaaaaaaaaaaaaaaaaaaaaaaaaaaaaaaaaaaaaaaaaaaaaaaaaaaaaaaaaa

SEQ ID NO: 13459 - RNA, 5785 nt, synthetic construct
  source 1..5785: mol_type = other RNA
aggaaataagagagaaaagaagagtaagaagaaatataagagccaccatggcccctaagaagaagcgtaaagtgagccggatggaacgcctcgtctacgaggtgcggcagaagtgcagaaacatcgaggacatctgcatctcctgcggatctctgaacgtgaccctggagcacccactgttcatcggcggcatgtgccagaactgtaaaaactgttttctggagtgtgcctatcaatacgacgatgacggctaccagagctactgcaccatctgttgcggcggaagagaggtgctgatgtgtggaaataacaactgctgccggtgcttctgcgtggaatgcgtggacctgctggtgggccccggcgccgcccaggccgctattaaggaagatccttggaactgctacatgtgcggccacaagggcacatacggcctgctgagacggagagaggactggcctagcagactgcagatgttcttcgccaataaccacgaccaggagttcgacccccctaaggtgtaccctcccgtccccgccgagaagagaaagcccatccgggtcctgagcctgttcgatggcatcgccaccggtctgctggtgctgaaggacctgggcatccaggtggataggtacattgcctccgaggtgtgcgaggactccatcaccgtgggaatggtgcgtcatcagggcaagatcatgtacgtgggcgacgtgcggagcgtgacacagaagcatatccaggagtggggccctttcgacctggtgatcggcggcagcccttgcaatgacctgagcatcgtgaacccagcccggaagggcctgtacgagggaaccggcagactgttcttcgagttttacagactgctgcacgacgcccggcctaaggaaggcgacgaccggcccttcttttggctgttcgagaatgtggtggccatgggagtcagcgacaagcgggatattagccggttcctggagagcaaccccgtgatgatcgatgccaaggaagtgagcgccgcccaccgggccagatacttctggggcaatctgcctggcatgaacagacccctggccagcaccgtgaacgacaagctggagctgcaggagtgcctggagcacggccggatcgccaagttcagcaaggtgagaaccatcaccacccgaagcaacagcatcaaacaaggcaaggaccagcactttcctgtgttcatgaacgagaaggaggacatcctgtggtgtaccgagatggagagagtgttcgggttcccagtccactacacagatgtcagcaacatgtctagactggccagacagagactgctgggaagaagctggtccgtccctgtgatcagacacctgttcgcccctctgaaggagtacttcgcctgcgtgagcagcggcaacagcaacgccaacagccggggccccagcttctctagcggcctggtgccactgtccctgagagggagccacatgggccccatggagatctacaaaaccgtgagcgcctggaagcggcagcctgtgcgcgtgctgagcctgtttcggaatatcgataaagtcctgaaaagcctgggattcctggagagcggctctggctccggcggtggcaccctgaagtacgtggaggatgtgacaaacgtggtcagacgggatgtggagaagtggggccccttcgatctggtgtacggcagcacccaacccctgggcagctcttgtgaccggtgccctggctggtacatgtttcagttccaccggatcctgcagtacgccctgccgagacaggagtcccagcggccattcttttggattttcatggacaacttgctgctgaccgaggatgaccaggaaactaccactcggttcctgcagaccgaagccgtgaccctgcaggacgtgagaggccgggactaccagaacgccatgcgggtgtggtccaacatccctggactgaaaagcaagcacgcacctctgacccctaaagaagaggagtacctgcaggcccaggtgcggagcagaagcaagctggacgcccctaaggtggatctgctggtgaagaattgcctcctgcccctgagagagtacttcaagtatttcagccagaatagtctgcccctgggaggcagcggcggcggcatggccggcgaggccgaggcccagctggaccccagcctgcagggcctggtgatgttcgaggacgtgaccgtgtacttcagcagggaggagtggggcctgctgaacgtgacccagaagggcctgtacagggacgtgatgctggagaacttcgccctggtgagcagcctgggcctggcccccagcaggagccccgtgttcacccagctggaggacgacgagcagagctgggtgcccagctgggtgggcggcccaagcagcggcgcccctcctcccagcggcggcagcccagccggctccccaacctctaccgaggagggcacctctgagtccgccacccccgagagcggccctggcacctccaccgagcccagcgagggcagcgcacccggcagccctgccggcagccccacctccacagaggagggaaccagcaccgagcccagcgaaggcagcgccccaggcaccagcaccgagcctagtgagcaggagattaaacggatcaacaagatcagaagaagacttgtgaaagacagcaacaccaagaaggccggcaagacaggccccatgaaaaccctgctggttagagtgatgacacccgatctgagagagcggctggaaaacctgagaaagaagcctgaaaatatcccccagcccatcagcaatacatctagagccaacctgaataagctgctgaccgattacaccgaaatgaagaaggcgatcctgcatgtgtactgggaagagttccagaaggaccctgtgggcctgatgagccgggtggcccagcctgccagcaagaagatcgatcagaacaagctgaaacctgagatggacgagaagggcaacctgaccaccgccggctttgcctgctctcagtgtggccagcccctgttcgtgtacaagctggagcaggtgtctgagaagggcaaggcttacaccaactacttcggacggtgcaatgtggccgagcacgaaaagctgatcctgctggcccagctgaagcccgagaaggatagcgacgaagccgtgacatatagcctgggaaagtttgggcagagggccctggatttctacagcattcatgtgaccaaggagtccacccaccccgtgaagcccctggcccagatcgccggaaacagatacgcctccggacctgtgggaaaggccctgagcgacgcatgtatgggcacaatcgcctccttcctgtctaagtaccaggacatcatcatcgaacaccagaaggtggtgaagggcaaccagaagagactggagagcctgcgggagctggccggcaaggaaaacctggaataccctagcgtgaccctgccacctcagcctcacaccaaggagggcgttgatgcctacaacgaagtgatcgcccgggtgcgaatgtgggtgaacctgaacctgtggcagaagctgaagctaagcagagatgatgccaagcctctgctgagactgaagggattcccttcctttcctctggtcgagagacaggccaacgaagtggactggtgggacatggtgtgtaacgtgaagaagctgatcaacgagaaaaaggaggatggcaaggtgttttggcagaatctggctggctacaagagacaggaagccctgagaccatacctgagcagcgaggaagatcggaagaagggaaagaaattcgctcggtaccagctgggcgacctgctgctgcacctggaaaagaagcacggcgaggactggggaaaggtgtacgacgaggcctgggagcggattgacaagaaagtggaaggcctgagcaagcacatcaagctggaagaggaacggagaagcgaggacgcccagagcaaggccgccctgaccgactggctgcgggctaaggccagcttcgtgatcgagggcctgaaggaggccgacaaggacgagttctgcagatgcgagctgaagctgcagaagtggtacggggacctgcggggaaagcccttcgccatcgaagccgagaacagcatcctggacatcagcggcttcagcaagcagtacaactgtgccttcatctggcagaaggacggcgtgaagaagctgaacctgtacctgatcatcaactacttcaagggcggcaagctgcggttcaagaagatcaaacctgaagccttcgaagccaacagattctacaccgtgatcaacaaaaagagcggcgagatcgtgcccatggaggtgaacttcaacttcgacgaccccaacctgatcatcctgcctctggcctttggcaagagacagggcagagaattcatctggaacgacctgctgtccctggaaaccggcagcctgaagctggccaacggaagagtgatcgagaagacactgtacaacagaagaacccggcaggatgagcctgccctgttcgtggccctgaccttcgagcggcgggaggtcctggactcctccaatatcaaaccaatgaacctgatcggcgtggcaagaggcgaaaacatccccgccgtgatcgccctgaccgaccccgagggctgcccactgagccggtttaaggatagcctgggaaacccaacccacatcctgagaatcggcgagagctataaggagaagcagcggaccatccaggccaagaaggaggtggagcagcggagagccggcggctacagccggaagtacgccagcaaagccaagaatctggcagacgatatggtgagaaacaccgctagagatctgctgtactacgccgtgacccaggatgccatgctgatcttcgccaacctgagccggggcttcggccggcagggcaagcggaccttcatggccgagagacagtacacacggatggaggactggctgaccgccaagctggcctacgagggcctgagcaagacctacctgtccaagacactggcccagtacacctccaagacatgcagcaactgtgggtttaccatcaccagcgccgactacgacagggtgctggagaagctgaagaagacagcaacaggctggatgaccacaattaacggcaaggagctgaaggtggagggccagattacctactacaacagatacaagagacagaacgtagtcaaggacctgtccgtcgagctggatagactgagcgaagaatctgtgaacaacgacatctcctcctggacaaagggcagaagcggagaagctctgagcctcctgaagaaaagattctcccatagacccgtgcaggagaagttcgtgtgcctgaactgcggcttcgagacacacgcagccgagcaagccgccctgaacatcgccagatcctggctgttcctgcggagccaggagtacaagaaataccagacaaacaagacaaccggcaacaccgataagagagccttcgtcgagacctggcagtccttttaccggaagaagcttaaggaggtgtggaaacctgccgtgcggtctggcggatctggcggaggctccaccagccccaagaaaaagagaaaagtctaagctgccttctgcggggcttgccttctggccatgcccttcttctctcccttgcacctgtacctcttggtctttgaataaagcctgagtaggaaggctagcaaaaaaaaaaaaaaaaaaaaaaaaaaaaaaaaaaaaaaaaaaaaaaaaaaaaaaaaaaaaaaaaaaaaaaaaaaaaaaaa

SEQ ID NO: 13460 - RNA, 5785 nt, synthetic construct
  source 1..5785: mol_type = other RNA
aggaaataagagagaaaagaagagtaagaagaaatataagagccaccatggcccctaagaagaagcgtaaagtgagccggatggaacgcctcgtctacgaggtgcggcagaagtgcagaaacatcgaggacatctgcatctcctgcggatctctgaacgtgaccctggagcacccactgttcatcggcggcatgtgccagaactgtaaaaactgttttctggagtgtgcctatcaatacgacgatgacggctaccagagctactgcaccatctgttgcggcggaagagaggtgctgatgtgtggaaataacaactgctgccggtgcttctgcgtggaatgcgtggacctgctggtgggccccggcgccgcccaggccgctattaaggaagatccttggaactgctacatgtgcggccacaagggcacatacggcctgctgagacggagagaggactggcctagcagactgcagatgttcttcgccaataaccacgaccaggagttcgacccccctaaggtgtaccctcccgtccccgccgagaagagaaagcccatccgggtcctgagcctgttcgatggcatcgccaccggtctgctggtgctgaaggacctgggcatccaggtggataggtacattgcctccgaggtgtgcgaggactccatcaccgtgggaatggtgcgtcatcagggcaagatcatgtacgtgggcgacgtgcggagcgtgacacagaagcatatccaggagtggggccctttcgacctggtgatcggcggcagcccttgcaatgacctgagcatcgtgaacccagcccggaagggcctgtacgagggaaccggcagactgttcttcgagttttacagactgctgcacgacgcccggcctaaggaaggcgacgaccggcccttcttttggctgttcgagaatgtggtggccatgggagtcagcgacaagcgggatattagccggttcctggagagcaaccccgtgatgatcgatgccaaggaagtgagcgccgcccaccgggccagatacttctggggcaatctgcctggcatgaacagacccctggccagcaccgtgaacgacaagctggagctgcaggagtgcctggagcacggccggatcgccaagttcagcaaggtgagaaccatcaccacccgaagcaacagcatcaaacaaggcaaggaccagcactttcctgtgttcatgaacgagaaggaggacatcctgtggtgtaccgagatggagagagtgttcgggttcccagtccactacacagatgtcagcaacatgtctagactggccagacagagactgctgggaagaagctggtccgtccctgtgatcagacacctgttcgcccctctgaaggagtacttcgcctgcgtgagcagcggcaacagcaacgccaacagccggggccccagcttctctagcggcctggtgccactgtccctgagagggagccacatgggccccatggagatctacaaaaccgtgagcgcctggaagcggcagcctgtgcgcgtgctgagcctgtttcggaatatcgataaagtcctgaaaagcctgggattcctggagagcggctctggctccggcggtggcaccctgaagtacgtggaggatgtgacaaacgtggtcagacgggatgtggagaagtggggccccttcgatctggtgtacggcagcacccaacccctgggcagctcttgtgaccggtgccctggctggtacatgtttcagttccaccggatcctgcagtacgccctgccgagacaggagtcccagcggccattcttttggattttcatggacaacttgctgctgaccgaggatgaccaggaaactaccactcggttcctgcagaccgaagccgtgaccctgcaggacgtgagaggccgggactaccagaacgccatgcgggtgtggtccaacatccctggactgaaaagcaagcacgcacctctgacccctaaagaagaggagtacctgcaggcccaggtgcggagcagaagcaagctggacgcccctaaggtggatctgctggtgaagaattgcctcctgcccctgagagagtacttcaagtatttcagccagaatagtctgcccctgggaggcagcggcggcggcatggagctgctgagcttcgaggacgtggccatgtacttcaccagggaggagtggggccacctggactggggccagaaggacctgtacagggacgtgatgctggagaactacaggaacatggtgctgctgggcttccagttccccaagcccgaggtgatctgccagctggagaactgggacgagcagtggatcctggacctgcccagggccggcagcaggaaggccagcggcagcgcctgccccggcggcccaagcagcggcgcccctcctcccagcggcggcagcccagccggctccccaacctctaccgaggagggcacctctgagtccgccacccccgagagcggccctggcacctccaccgagcccagcgagggcagcgcacccggcagccctgccggcagccccacctccacagaggagggaaccagcaccgagcccagcgaaggcagcgccccaggcaccagcaccgagcctagtgagcaggagattaaacggatcaacaagatcagaagaagacttgtgaaagacagcaacaccaagaaggccggcaagacaggccccatgaaaaccctgctggttagagtgatgacacccgatctgagagagcggctggaaaacctgagaaagaagcctgaaaatatcccccagcccatcagcaatacatctagagccaacctgaataagctgctgaccgattacaccgaaatgaagaaggcgatcctgcatgtgtactgggaagagttccagaaggaccctgtgggcctgatgagccgggtggcccagcctgccagcaagaagatcgatcagaacaagctgaaacctgagatggacgagaagggcaacctgaccaccgccggctttgcctgctctcagtgtggccagcccctgttcgtgtacaagctggagcaggtgtctgagaagggcaaggcttacaccaactacttcggacggtgcaatgtggccgagcacgaaaagctgatcctgctggcccagctgaagcccgagaaggatagcgacgaagccgtgacatatagcctgggaaagtttgggcagagggccctggatttctacagcattcatgtgaccaaggagtccacccaccccgtgaagcccctggcccagatcgccggaaacagatacgcctccggacctgtgggaaaggccctgagcgacgcatgtatgggcacaatcgcctccttcctgtctaagtaccaggacatcatcatcgaacaccagaaggtggtgaagggcaaccagaagagactggagagcctgcgggagctggccggcaaggaaaacctggaataccctagcgtgaccctgccacctcagcctcacaccaaggagggcgttgatgcctacaacgaagtgatcgcccgggtgcgaatgtgggtgaacctgaacctgtggcagaagctgaagctaagcagagatgatgccaagcctctgctgagactgaagggattcccttcctttcctctggtcgagagacaggccaacgaagtggactggtgggacatggtgtgtaacgtgaagaagctgatcaacgagaaaaaggaggatggcaaggtgttttggcagaatctggctggctacaagagacaggaagccctgagaccatacctgagcagcgaggaagatcggaagaagggaaagaaattcgctcggtaccagctgggcgacctgctgctgcacctggaaaagaagcacggcgaggactggggaaaggtgtacgacgaggcctgggagcggattgacaagaaagtggaaggcctgagcaagcacatcaagctggaagaggaacggagaagcgaggacgcccagagcaaggccgccctgaccgactggctgcgggctaaggccagcttcgtgatcgagggcctgaaggaggccgacaaggacgagttctgcagatgcgagctgaagctgcagaagtggtacggggacctgcggggaaagcccttcgccatcgaagccgagaacagcatcctggacatcagcggcttcagcaagcagtacaactgtgccttcatctggcagaaggacggcgtgaagaagctgaacctgtacctgatcatcaactacttcaagggcggcaagctgcggttcaagaagatcaaacctgaagccttcgaagccaacagattctacaccgtgatcaacaaaaagagcggcgagatcgtgcccatggaggtgaacttcaacttcgacgaccccaacctgatcatcctgcctctggcctttggcaagagacagggcagagaattcatctggaacgacctgctgtccctggaaaccggcagcctgaagctggccaacggaagagtgatcgagaagacactgtacaacagaagaacccggcaggatgagcctgccctgttcgtggccctgaccttcgagcggcgggaggtcctggactcctccaatatcaaaccaatgaacctgatcggcgtggcaagaggcgaaaacatccccgccgtgatcgccctgaccgaccccgagggctgcccactgagccggtttaaggatagcctgggaaacccaacccacatcctgagaatcggcgagagctataaggagaagcagcggaccatccaggccaagaaggaggtggagcagcggagagccggcggctacagccggaagtacgccagcaaagccaagaatctggcagacgatatggtgagaaacaccgctagagatctgctgtactacgccgtgacccaggatgccatgctgatcttcgccaacctgagccggggcttcggccggcagggcaagcggaccttcatggccgagagacagtacacacggatggaggactggctgaccgccaagctggcctacgagggcctgagcaagacctacctgtccaagacactggcccagtacacctccaagacatgcagcaactgtgggtttaccatcaccagcgccgactacgacagggtgctggagaagctgaagaagacagcaacaggctggatgaccacaattaacggcaaggagctgaaggtggagggccagattacctactacaacagatacaagagacagaacgtagtcaaggacctgtccgtcgagctggatagactgagcgaagaatctgtgaacaacgacatctcctcctggacaaagggcagaagcggagaagctctgagcctcctgaagaaaagattctcccatagacccgtgcaggagaagttcgtgtgcctgaactgcggcttcgagacacacgcagccgagcaagccgccctgaacatcgccagatcctggctgttcctgcggagccaggagtacaagaaataccagacaaacaagacaaccggcaacaccgataagagagccttcgtcgagacctggcagtccttttaccggaagaagcttaaggaggtgtggaaacctgccgtgcggtctggcggatctggcggaggctccaccagccccaagaaaaagagaaaagtctaagctgccttctgcggggcttgccttctggccatgcccttcttctctcccttgcacctgtacctcttggtctttgaataaagcctgagtaggaaggctagcaaaaaaaaaaaaaaaaaaaaaaaaaaaaaaaaaaaaaaaaaaaaaaaaaaaaaaaaaaaaaaaaaaaaaaaaaaaaaaaa

SEQ ID NO: 13461 - RNA, 5785 nt, synthetic construct
  source 1..5785: mol_type = other RNA
aggaaataagagagaaaagaagagtaagaagaaatataagagccaccatggcccctaagaagaagcgtaaagtgagccggatggaacgcctcgtctacgaggtgcggcagaagtgcagaaacatcgaggacatctgcatctcctgcggatctctgaacgtgaccctggagcacccactgttcatcggcggcatgtgccagaactgtaaaaactgttttctggagtgtgcctatcaatacgacgatgacggctaccagagctactgcaccatctgttgcggcggaagagaggtgctgatgtgtggaaataacaactgctgccggtgcttctgcgtggaatgcgtggacctgctggtgggccccggcgccgcccaggccgctattaaggaagatccttggaactgctacatgtgcggccacaagggcacatacggcctgctgagacggagagaggactggcctagcagactgcagatgttcttcgccaataaccacgaccaggagttcgacccccctaaggtgtaccctcccgtccccgccgagaagagaaagcccatccgggtcctgagcctgttcgatggcatcgccaccggtctgctggtgctgaaggacctgggcatccaggtggataggtacattgcctccgaggtgtgcgaggactccatcaccgtgggaatggtgcgtcatcagggcaagatcatgtacgtgggcgacgtgcggagcgtgacacagaagcatatccaggagtggggccctttcgacctggtgatcggcggcagcccttgcaatgacctgagcatcgtgaacccagcccggaagggcctgtacgagggaaccggcagactgttcttcgagttttacagactgctgcacgacgcccggcctaaggaaggcgacgaccggcccttcttttggctgttcgagaatgtggtggccatgggagtcagcgacaagcgggatattagccggttcctggagagcaaccccgtgatgatcgatgccaaggaagtgagcgccgcccaccgggccagatacttctggggcaatctgcctggcatgaacagacccctggccagcaccgtgaacgacaagctggagctgcaggagtgcctggagcacggccggatcgccaagttcagcaaggtgagaaccatcaccacccgaagcaacagcatcaaacaaggcaaggaccagcactttcctgtgttcatgaacgagaaggaggacatcctgtggtgtaccgagatggagagagtgttcgggttcccagtccactacacagatgtcagcaacatgtctagactggccagacagagactgctgggaagaagctggtccgtccctgtgatcagacacctgttcgcccctctgaaggagtacttcgcctgcgtgagcagcggcaacagcaacgccaacagccggggccccagcttctctagcggcctggtgccactgtccctgagagggagccacatgggccccatggagatctacaaaaccgtgagcgcctggaagcggcagcctgtgcgcgtgctgagcctgtttcggaatatcgataaagtcctgaaaagcctgggattcctggagagcggctctggctccggcggtggcaccctgaagtacgtggaggatgtgacaaacgtggtcagacgggatgtggagaagtggggccccttcgatctggtgtacggcagcacccaacccctgggcagctcttgtgaccggtgccctggctggtacatgtttcagttccaccggatcctgcagtacgccctgccgagacaggagtcccagcggccattcttttggattttcatggacaacttgctgctgaccgaggatgaccaggaaactaccactcggttcctgcagaccgaagccgtgaccctgcaggacgtgagaggccgggactaccagaacgccatgcgggtgtggtccaacatccctggactgaaaagcaagcacgcacctctgacccctaaagaagaggagtacctgcaggcccaggtgcggagcagaagcaagctggacgcccctaaggtggatctgctggtgaagaattgcctcctgcccctgagagagtacttcaagtatttcagccagaatagtctgcccctgggaggcagcggcggcggccagatccccgtgatcttcgaggacatcgtgatctacttcagccaggaggagtggaaggacctggaggagtggcagaaggagctgtacaaggacgtgatgaaggagaactaccagaccctgatcagcctgggcaccggcttccccacccccccccccgacatcatcagccacatcgagaggggcgaggagccctacatcagggacgagctggagagcgagaagagggagaccggcaagaggggcggcggcccaagcagcggcgcccctcctcccagcggcggcagcccagccggctccccaacctctaccgaggagggcacctctgagtccgccacccccgagagcggccctggcacctccaccgagcccagcgagggcagcgcacccggcagccctgccggcagccccacctccacagaggagggaaccagcaccgagcccagcgaaggcagcgccccaggcaccagcaccgagcctagtgagcaggagattaaacggatcaacaagatcagaagaagacttgtgaaagacagcaacaccaagaaggccggcaagacaggccccatgaaaaccctgctggttagagtgatgacacccgatctgagagagcggctggaaaacctgagaaagaagcctgaaaatatcccccagcccatcagcaatacatctagagccaacctgaataagctgctgaccgattacaccgaaatgaagaaggcgatcctgcatgtgtactgggaagagttccagaaggaccctgtgggcctgatgagccgggtggcccagcctgccagcaagaagatcgatcagaacaagctgaaacctgagatggacgagaagggcaacctgaccaccgccggctttgcctgctctcagtgtggccagcccctgttcgtgtacaagctggagcaggtgtctgagaagggcaaggcttacaccaactacttcggacggtgcaatgtggccgagcacgaaaagctgatcctgctggcccagctgaagcccgagaaggatagcgacgaagccgtgacatatagcctgggaaagtttgggcagagggccctggatttctacagcattcatgtgaccaaggagtccacccaccccgtgaagcccctggcccagatcgccggaaacagatacgcctccggacctgtgggaaaggccctgagcgacgcatgtatgggcacaatcgcctccttcctgtctaagtaccaggacatcatcatcgaacaccagaaggtggtgaagggcaaccagaagagactggagagcctgcgggagctggccggcaaggaaaacctggaataccctagcgtgaccctgccacctcagcctcacaccaaggagggcgttgatgcctacaacgaagtgatcgcccgggtgcgaatgtgggtgaacctgaacctgtggcagaagctgaagctaagcagagatgatgccaagcctctgctgagactgaagggattcccttcctttcctctggtcgagagacaggccaacgaagtggactggtgggacatggtgtgtaacgtgaagaagctgatcaacgagaaaaaggaggatggcaaggtgttttggcagaatctggctggctacaagagacaggaagccctgagaccatacctgagcagcgaggaagatcggaagaagggaaagaaattcgctcggtaccagctgggcgacctgctgctgcacctggaaaagaagcacggcgaggactggggaaaggtgtacgacgaggcctgggagcggattgacaagaaagtggaaggcctgagcaagcacatcaagctggaagaggaacggagaagcgaggacgcccagagcaaggccgccctgaccgactggctgcgggctaaggccagcttcgtgatcgagggcctgaaggaggccgacaaggacgagttctgcagatgcgagctgaagctgcagaagtggtacggggacctgcggggaaagcccttcgccatcgaagccgagaacagcatcctggacatcagcggcttcagcaagcagtacaactgtgccttcatctggcagaaggacggcgtgaagaagctgaacctgtacctgatcatcaactacttcaagggcggcaagctgcggttcaagaagatcaaacctgaagccttcgaagccaacagattctacaccgtgatcaacaaaaagagcggcgagatcgtgcccatggaggtgaacttcaacttcgacgaccccaacctgatcatcctgcctctggcctttggcaagagacagggcagagaattcatctggaacgacctgctgtccctggaaaccggcagcctgaagctggccaacggaagagtgatcgagaagacactgtacaacagaagaacccggcaggatgagcctgccctgttcgtggccctgaccttcgagcggcgggaggtcctggactcctccaatatcaaaccaatgaacctgatcggcgtggcaagaggcgaaaacatccccgccgtgatcgccctgaccgaccccgagggctgcccactgagccggtttaaggatagcctgggaaacccaacccacatcctgagaatcggcgagagctataaggagaagcagcggaccatccaggccaagaaggaggtggagcagcggagagccggcggctacagccggaagtacgccagcaaagccaagaatctggcagacgatatggtgagaaacaccgctagagatctgctgtactacgccgtgacccaggatgccatgctgatcttcgccaacctgagccggggcttcggccggcagggcaagcggaccttcatggccgagagacagtacacacggatggaggactggctgaccgccaagctggcctacgagggcctgagcaagacctacctgtccaagacactggcccagtacacctccaagacatgcagcaactgtgggtttaccatcaccagcgccgactacgacagggtgctggagaagctgaagaagacagcaacaggctggatgaccacaattaacggcaaggagctgaaggtggagggccagattacctactacaacagatacaagagacagaacgtagtcaaggacctgtccgtcgagctggatagactgagcgaagaatctgtgaacaacgacatctcctcctggacaaagggcagaagcggagaagctctgagcctcctgaagaaaagattctcccatagacccgtgcaggagaagttcgtgtgcctgaactgcggcttcgagacacacgcagccgagcaagccgccctgaacatcgccagatcctggctgttcctgcggagccaggagtacaagaaataccagacaaacaagacaaccggcaacaccgataagagagccttcgtcgagacctggcagtccttttaccggaagaagcttaaggaggtgtggaaacctgccgtgcggtctggcggatctggcggaggctccaccagccccaagaaaaagagaaaagtctaagctgccttctgcggggcttgccttctggccatgcccttcttctctcccttgcacctgtacctcttggtctttgaataaagcctgagtaggaaggctagcaaaaaaaaaaaaaaaaaaaaaaaaaaaaaaaaaaaaaaaaaaaaaaaaaaaaaaaaaaaaaaaaaaaaaaaaaaaaaaaa

SEQ ID NO: 13462 - RNA, 5785 nt, synthetic construct
  source 1..5785: mol_type = other RNA
aggaaataagagagaaaagaagagtaagaagaaatataagagccaccatggcccctaagaagaagcgtaaagtgagccggatggaacgcctcgtctacgaggtgcggcagaagtgcagaaacatcgaggacatctgcatctcctgcggatctctgaacgtgaccctggagcacccactgttcatcggcggcatgtgccagaactgtaaaaactgttttctggagtgtgcctatcaatacgacgatgacggctaccagagctactgcaccatctgttgcggcggaagagaggtgctgatgtgtggaaataacaactgctgccggtgcttctgcgtggaatgcgtggacctgctggtgggccccggcgccgcccaggccgctattaaggaagatccttggaactgctacatgtgcggccacaagggcacatacggcctgctgagacggagagaggactggcctagcagactgcagatgttcttcgccaataaccacgaccaggagttcgacccccctaaggtgtaccctcccgtccccgccgagaagagaaagcccatccgggtcctgagcctgttcgatggcatcgccaccggtctgctggtgctgaaggacctgggcatccaggtggataggtacattgcctccgaggtgtgcgaggactccatcaccgtgggaatggtgcgtcatcagggcaagatcatgtacgtgggcgacgtgcggagcgtgacacagaagcatatccaggagtggggccctttcgacctggtgatcggcggcagcccttgcaatgacctgagcatcgtgaacccagcccggaagggcctgtacgagggaaccggcagactgttcttcgagttttacagactgctgcacgacgcccggcctaaggaaggcgacgaccggcccttcttttggctgttcgagaatgtggtggccatgggagtcagcgacaagcgggatattagccggttcctggagagcaaccccgtgatgatcgatgccaaggaagtgagcgccgcccaccgggccagatacttctggggcaatctgcctggcatgaacagacccctggccagcaccgtgaacgacaagctggagctgcaggagtgcctggagcacggccggatcgccaagttcagcaaggtgagaaccatcaccacccgaagcaacagcatcaaacaaggcaaggaccagcactttcctgtgttcatgaacgagaaggaggacatcctgtggtgtaccgagatggagagagtgttcgggttcccagtccactacacagatgtcagcaacatgtctagactggccagacagagactgctgggaagaagctggtccgtccctgtgatcagacacctgttcgcccctctgaaggagtacttcgcctgcgtgagcagcggcaacagcaacgccaacagccggggccccagcttctctagcggcctggtgccactgtccctgagagggagccacatgggccccatggagatctacaaaaccgtgagcgcctggaagcggcagcctgtgcgcgtgctgagcctgtttcggaatatcgataaagtcctgaaaagcctgggattcctggagagcggctctggctccggcggtggcaccctgaagtacgtggaggatgtgacaaacgtggtcagacgggatgtggagaagtggggccccttcgatctggtgtacggcagcacccaacccctgggcagctcttgtgaccggtgccctggctggtacatgtttcagttccaccggatcctgcagtacgccctgccgagacaggagtcccagcggccattcttttggattttcatggacaacttgctgctgaccgaggatgaccaggaaactaccactcggttcctgcagaccgaagccgtgaccctgcaggacgtgagaggccgggactaccagaacgccatgcgggtgtggtccaacatccctggactgaaaagcaagcacgcacctctgacccctaaagaagaggagtacctgcaggcccaggtgcggagcagaagcaagctggacgcccctaaggtggatctgctggtgaagaattgcctcctgcccctgagagagtacttcaagtatttcagccagaatagtctgcccctgggaggcagcggcggcggcttccaggagcccgtgagcttcaaggacgtgagcgtggtgttcaccgaggaggagctgggcctgctggacagcgcccagaggaagctgtacagggacgtgatgctggagaacttccagaacctgctgagcgtgggcaaccagcccttcaagcccgagctgatcttccagctggagagggaggaggagctgctgatgatggagaccgagacccagagggacggctgcagcggcaccaagagccagggcggcccaagcagcggcgcccctcctcccagcggcggcagcccagccggctccccaacctctaccgaggagggcacctctgagtccgccacccccgagagcggccctggcacctccaccgagcccagcgagggcagcgcacccggcagccctgccggcagccccacctccacagaggagggaaccagcaccgagcccagcgaaggcagcgccccaggcaccagcaccgagcctagtgagcaggagattaaacggatcaacaagatcagaagaagacttgtgaaagacagcaacaccaagaaggccggcaagacaggccccatgaaaaccctgctggttagagtgatgacacccgatctgagagagcggctggaaaacctgagaaagaagcctgaaaatatcccccagcccatcagcaatacatctagagccaacctgaataagctgctgaccgattacaccgaaatgaagaaggcgatcctgcatgtgtactgggaagagttccagaaggaccctgtgggcctgatgagccgggtggcccagcctgccagcaagaagatcgatcagaacaagctgaaacctgagatggacgagaagggcaacctgaccaccgccggctttgcctgctctcagtgtggccagcccctgttcgtgtacaagctggagcaggtgtctgagaagggcaaggcttacaccaactacttcggacggtgcaatgtggccgagcacgaaaagctgatcctgctggcccagctgaagcccgagaaggatagcgacgaagccgtgacatatagcctgggaaagtttgggcagagggccctggatttctacagcattcatgtgaccaaggagtccacccaccccgtgaagcccctggcccagatcgccggaaacagatacgcctccggacctgtgggaaaggccctgagcgacgcatgtatgggcacaatcgcctccttcctgtctaagtaccaggacatcatcatcgaacaccagaaggtggtgaagggcaaccagaagagactggagagcctgcgggagctggccggcaaggaaaacctggaataccctagcgtgaccctgccacctcagcctcacaccaaggagggcgttgatgcctacaacgaagtgatcgcccgggtgcgaatgtgggtgaacctgaacctgtggcagaagctgaagctaagcagagatgatgccaagcctctgctgagactgaagggattcccttcctttcctctggtcgagagacaggccaacgaagtggactggtgggacatggtgtgtaacgtgaagaagctgatcaacgagaaaaaggaggatggcaaggtgttttggcagaatctggctggctacaagagacaggaagccctgagaccatacctgagcagcgaggaagatcggaagaagggaaagaaattcgctcggtaccagctgggcgacctgctgctgcacctggaaaagaagcacggcgaggactggggaaaggtgtacgacgaggcctgggagcggattgacaagaaagtggaaggcctgagcaagcacatcaagctggaagaggaacggagaagcgaggacgcccagagcaaggccgccctgaccgactggctgcgggctaaggccagcttcgtgatcgagggcctgaaggaggccgacaaggacgagttctgcagatgcgagctgaagctgcagaagtggtacggggacctgcggggaaagcccttcgccatcgaagccgagaacagcatcctggacatcagcggcttcagcaagcagtacaactgtgccttcatctggcagaaggacggcgtgaagaagctgaacctgtacctgatcatcaactacttcaagggcggcaagctgcggttcaagaagatcaaacctgaagccttcgaagccaacagattctacaccgtgatcaacaaaaagagcggcgagatcgtgcccatggaggtgaacttcaacttcgacgaccccaacctgatcatcctgcctctggcctttggcaagagacagggcagagaattcatctggaacgacctgctgtccctggaaaccggcagcctgaagctggccaacggaagagtgatcgagaagacactgtacaacagaagaacccggcaggatgagcctgccctgttcgtggccctgaccttcgagcggcgggaggtcctggactcctccaatatcaaaccaatgaacctgatcggcgtggcaagaggcgaaaacatccccgccgtgatcgccctgaccgaccccgagggctgcccactgagccggtttaaggatagcctgggaaacccaacccacatcctgagaatcggcgagagctataaggagaagcagcggaccatccaggccaagaaggaggtggagcagcggagagccggcggctacagccggaagtacgccagcaaagccaagaatctggcagacgatatggtgagaaacaccgctagagatctgctgtactacgccgtgacccaggatgccatgctgatcttcgccaacctgagccggggcttcggccggcagggcaagcggaccttcatggccgagagacagtacacacggatggaggactggctgaccgccaagctggcctacgagggcctgagcaagacctacctgtccaagacactggcccagtacacctccaagacatgcagcaactgtgggtttaccatcaccagcgccgactacgacagggtgctggagaagctgaagaagacagcaacaggctggatgaccacaattaacggcaaggagctgaaggtggagggccagattacctactacaacagatacaagagacagaacgtagtcaaggacctgtccgtcgagctggatagactgagcgaagaatctgtgaacaacgacatctcctcctggacaaagggcagaagcggagaagctctgagcctcctgaagaaaagattctcccatagacccgtgcaggagaagttcgtgtgcctgaactgcggcttcgagacacacgcagccgagcaagccgccctgaacatcgccagatcctggctgttcctgcggagccaggagtacaagaaataccagacaaacaagacaaccggcaacaccgataagagagccttcgtcgagacctggcagtccttttaccggaagaagcttaaggaggtgtggaaacctgccgtgcggtctggcggatctggcggaggctccaccagccccaagaaaaagagaaaagtctaagctgccttctgcggggcttgccttctggccatgcccttcttctctcccttgcacctgtacctcttggtctttgaataaagcctgagtaggaaggctagcaaaaaaaaaaaaaaaaaaaaaaaaaaaaaaaaaaaaaaaaaaaaaaaaaaaaaaaaaaaaaaaaaaaaaaaaaaaaaaaa

SEQ ID NO: 13463 - RNA, 5785 nt, synthetic construct
  source 1..5785: mol_type = other RNA
aggaaataagagagaaaagaagagtaagaagaaatataagagccaccatggcccctaagaagaagcgtaaagtgagccggatggaacgcctcgtctacgaggtgcggcagaagtgcagaaacatcgaggacatctgcatctcctgcggatctctgaacgtgaccctggagcacccactgttcatcggcggcatgtgccagaactgtaaaaactgttttctggagtgtgcctatcaatacgacgatgacggctaccagagctactgcaccatctgttgcggcggaagagaggtgctgatgtgtggaaataacaactgctgccggtgcttctgcgtggaatgcgtggacctgctggtgggccccggcgccgcccaggccgctattaaggaagatccttggaactgctacatgtgcggccacaagggcacatacggcctgctgagacggagagaggactggcctagcagactgcagatgttcttcgccaataaccacgaccaggagttcgacccccctaaggtgtaccctcccgtccccgccgagaagagaaagcccatccgggtcctgagcctgttcgatggcatcgccaccggtctgctggtgctgaaggacctgggcatccaggtggataggtacattgcctccgaggtgtgcgaggactccatcaccgtgggaatggtgcgtcatcagggcaagatcatgtacgtgggcgacgtgcggagcgtgacacagaagcatatccaggagtggggccctttcgacctggtgatcggcggcagcccttgcaatgacctgagcatcgtgaacccagcccggaagggcctgtacgagggaaccggcagactgttcttcgagttttacagactgctgcacgacgcccggcctaaggaaggcgacgaccggcccttcttttggctgttcgagaatgtggtggccatgggagtcagcgacaagcgggatattagccggttcctggagagcaaccccgtgatgatcgatgccaaggaagtgagcgccgcccaccgggccagatacttctggggcaatctgcctggcatgaacagacccctggccagcaccgtgaacgacaagctggagctgcaggagtgcctggagcacggccggatcgccaagttcagcaaggtgagaaccatcaccacccgaagcaacagcatcaaacaaggcaaggaccagcactttcctgtgttcatgaacgagaaggaggacatcctgtggtgtaccgagatggagagagtgttcgggttcccagtccactacacagatgtcagcaacatgtctagactggccagacagagactgctgggaagaagctggtccgtccctgtgatcagacacctgttcgcccctctgaaggagtacttcgcctgcgtgagcagcggcaacagcaacgccaacagccggggccccagcttctctagcggcctggtgccactgtccctgagagggagccacatgggccccatggagatctacaaaaccgtgagcgcctggaagcggcagcctgtgcgcgtgctgagcctgtttcggaatatcgataaagtcctgaaaagcctgggattcctggagagcggctctggctccggcggtggcaccctgaagtacgtggaggatgtgacaaacgtggtcagacgggatgtggagaagtggggccccttcgatctggtgtacggcagcacccaacccctgggcagctcttgtgaccggtgccctggctggtacatgtttcagttccaccggatcctgcagtacgccctgccgagacaggagtcccagcggccattcttttggattttcatggacaacttgctgctgaccgaggatgaccaggaaactaccactcggttcctgcagaccgaagccgtgaccctgcaggacgtgagaggccgggactaccagaacgccatgcgggtgtggtccaacatccctggactgaaaagcaagcacgcacctctgacccctaaagaagaggagtacctgcaggcccaggtgcggagcagaagcaagctggacgcccctaaggtggatctgctggtgaagaattgcctcctgcccctgagagagtacttcaagtatttcagccagaatagtctgcccctgggaggcagcggcggcggcccccaggagagcgtgaccttcgaggacgtggccgtggacttcacctgggaggagtggggctacctggacaccagccagaaggagctgtactgggaggtgatgctggagaactacaagaacctggtgagcctgggcttcgtggtggccaagcccgacgccatcagccagctggagcaggaggaggccccctggaggcccgaggtgctgttccccaggagcagctgcagcgacctggacaccaagggcggcccaagcagcggcgcccctcctcccagcggcggcagcccagccggctccccaacctctaccgaggagggcacctctgagtccgccacccccgagagcggccctggcacctccaccgagcccagcgagggcagcgcacccggcagccctgccggcagccccacctccacagaggagggaaccagcaccgagcccagcgaaggcagcgccccaggcaccagcaccgagcctagtgagcaggagattaaacggatcaacaagatcagaagaagacttgtgaaagacagcaacaccaagaaggccggcaagacaggccccatgaaaaccctgctggttagagtgatgacacccgatctgagagagcggctggaaaacctgagaaagaagcctgaaaatatcccccagcccatcagcaatacatctagagccaacctgaataagctgctgaccgattacaccgaaatgaagaaggcgatcctgcatgtgtactgggaagagttccagaaggaccctgtgggcctgatgagccgggtggcccagcctgccagcaagaagatcgatcagaacaagctgaaacctgagatggacgagaagggcaacctgaccaccgccggctttgcctgctctcagtgtggccagcccctgttcgtgtacaagctggagcaggtgtctgagaagggcaaggcttacaccaactacttcggacggtgcaatgtggccgagcacgaaaagctgatcctgctggcccagctgaagcccgagaaggatagcgacgaagccgtgacatatagcctgggaaagtttgggcagagggccctggatttctacagcattcatgtgaccaaggagtccacccaccccgtgaagcccctggcccagatcgccggaaacagatacgcctccggacctgtgggaaaggccctgagcgacgcatgtatgggcacaatcgcctccttcctgtctaagtaccaggacatcatcatcgaacaccagaaggtggtgaagggcaaccagaagagactggagagcctgcgggagctggccggcaaggaaaacctggaataccctagcgtgaccctgccacctcagcctcacaccaaggagggcgttgatgcctacaacgaagtgatcgcccgggtgcgaatgtgggtgaacctgaacctgtggcagaagctgaagctaagcagagatgatgccaagcctctgctgagactgaagggattcccttcctttcctctggtcgagagacaggccaacgaagtggactggtgggacatggtgtgtaacgtgaagaagctgatcaacgagaaaaaggaggatggcaaggtgttttggcagaatctggctggctacaagagacaggaagccctgagaccatacctgagcagcgaggaagatcggaagaagggaaagaaattcgctcggtaccagctgggcgacctgctgctgcacctggaaaagaagcacggcgaggactggggaaaggtgtacgacgaggcctgggagcggattgacaagaaagtggaaggcctgagcaagcacatcaagctggaagaggaacggagaagcgaggacgcccagagcaaggccgccctgaccgactggctgcgggctaaggccagcttcgtgatcgagggcctgaaggaggccgacaaggacgagttctgcagatgcgagctgaagctgcagaagtggtacggggacctgcggggaaagcccttcgccatcgaagccgagaacagcatcctggacatcagcggcttcagcaagcagtacaactgtgccttcatctggcagaaggacggcgtgaagaagctgaacctgtacctgatcatcaactacttcaagggcggcaagctgcggttcaagaagatcaaacctgaagccttcgaagccaacagattctacaccgtgatcaacaaaaagagcggcgagatcgtgcccatggaggtgaacttcaacttcgacgaccccaacctgatcatcctgcctctggcctttggcaagagacagggcagagaattcatctggaacgacctgctgtccctggaaaccggcagcctgaagctggccaacggaagagtgatcgagaagacactgtacaacagaagaacccggcaggatgagcctgccctgttcgtggccctgaccttcgagcggcgggaggtcctggactcctccaatatcaaaccaatgaacctgatcggcgtggcaagaggcgaaaacatccccgccgtgatcgccctgaccgaccccgagggctgcccactgagccggtttaaggatagcctgggaaacccaacccacatcctgagaatcggcgagagctataaggagaagcagcggaccatccaggccaagaaggaggtggagcagcggagagccggcggctacagccggaagtacgccagcaaagccaagaatctggcagacgatatggtgagaaacaccgctagagatctgctgtactacgccgtgacccaggatgccatgctgatcttcgccaacctgagccggggcttcggccggcagggcaagcggaccttcatggccgagagacagtacacacggatggaggactggctgaccgccaagctggcctacgagggcctgagcaagacctacctgtccaagacactggcccagtacacctccaagacatgcagcaactgtgggtttaccatcaccagcgccgactacgacagggtgctggagaagctgaagaagacagcaacaggctggatgaccacaattaacggcaaggagctgaaggtggagggccagattacctactacaacagatacaagagacagaacgtagtcaaggacctgtccgtcgagctggatagactgagcgaagaatctgtgaacaacgacatctcctcctggacaaagggcagaagcggagaagctctgagcctcctgaagaaaagattctcccatagacccgtgcaggagaagttcgtgtgcctgaactgcggcttcgagacacacgcagccgagcaagccgccctgaacatcgccagatcctggctgttcctgcggagccaggagtacaagaaataccagacaaacaagacaaccggcaacaccgataagagagccttcgtcgagacctggcagtccttttaccggaagaagcttaaggaggtgtggaaacctgccgtgcggtctggcggatctggcggaggctccaccagccccaagaaaaagagaaaagtctaagctgccttctgcggggcttgccttctggccatgcccttcttctctcccttgcacctgtacctcttggtctttgaataaagcctgagtaggaaggctagcaaaaaaaaaaaaaaaaaaaaaaaaaaaaaaaaaaaaaaaaaaaaaaaaaaaaaaaaaaaaaaaaaaaaaaaaaaaaaaaa

SEQ ID NO: 13464 - RNA, 5785 nt, synthetic construct
  source 1..5785: mol_type = other RNA
aggaaataagagagaaaagaagagtaagaagaaatataagagccaccatggcccctaagaagaagcgtaaagtgagccggatggaacgcctcgtctacgaggtgcggcagaagtgcagaaacatcgaggacatctgcatctcctgcggatctctgaacgtgaccctggagcacccactgttcatcggcggcatgtgccagaactgtaaaaactgttttctggagtgtgcctatcaatacgacgatgacggctaccagagctactgcaccatctgttgcggcggaagagaggtgctgatgtgtggaaataacaactgctgccggtgcttctgcgtggaatgcgtggacctgctggtgggccccggcgccgcccaggccgctattaaggaagatccttggaactgctacatgtgcggccacaagggcacatacggcctgctgagacggagagaggactggcctagcagactgcagatgttcttcgccaataaccacgaccaggagttcgacccccctaaggtgtaccctcccgtccccgccgagaagagaaagcccatccgggtcctgagcctgttcgatggcatcgccaccggtctgctggtgctgaaggacctgggcatccaggtggataggtacattgcctccgaggtgtgcgaggactccatcaccgtgggaatggtgcgtcatcagggcaagatcatgtacgtgggcgacgtgcggagcgtgacacagaagcatatccaggagtggggccctttcgacctggtgatcggcggcagcccttgcaatgacctgagcatcgtgaacccagcccggaagggcctgtacgagggaaccggcagactgttcttcgagttttacagactgctgcacgacgcccggcctaaggaaggcgacgaccggcccttcttttggctgttcgagaatgtggtggccatgggagtcagcgacaagcgggatattagccggttcctggagagcaaccccgtgatgatcgatgccaaggaagtgagcgccgcccaccgggccagatacttctggggcaatctgcctggcatgaacagacccctggccagcaccgtgaacgacaagctggagctgcaggagtgcctggagcacggccggatcgccaagttcagcaaggtgagaaccatcaccacccgaagcaacagcatcaaacaaggcaaggaccagcactttcctgtgttcatgaacgagaaggaggacatcctgtggtgtaccgagatggagagagtgttcgggttcccagtccactacacagatgtcagcaacatgtctagactggccagacagagactgctgggaagaagctggtccgtccctgtgatcagacacctgttcgcccctctgaaggagtacttcgcctgcgtgagcagcggcaacagcaacgccaacagccggggccccagcttctctagcggcctggtgccactgtccctgagagggagccacatgggccccatggagatctacaaaaccgtgagcgcctggaagcggcagcctgtgcgcgtgctgagcctgtttcggaatatcgataaagtcctgaaaagcctgggattcctggagagcggctctggctccggcggtggcaccctgaagtacgtggaggatgtgacaaacgtggtcagacgggatgtggagaagtggggccccttcgatctggtgtacggcagcacccaacccctgggcagctcttgtgaccggtgccctggctggtacatgtttcagttccaccggatcctgcagtacgccctgccgagacaggagtcccagcggccattcttttggattttcatggacaacttgctgctgaccgaggatgaccaggaaactaccactcggttcctgcagaccgaagccgtgaccctgcaggacgtgagaggccgggactaccagaacgccatgcgggtgtggtccaacatccctggactgaaaagcaagcacgcacctctgacccctaaagaagaggagtacctgcaggcccaggtgcggagcagaagcaagctggacgcccctaaggtggatctgctggtgaagaattgcctcctgcccctgagagagtacttcaagtatttcagccagaatagtctgcccctgggaggcagcggcggcggcagcaagggcagcctgatgttcagggacgtgagcatcgacttcagccaggaggagtgggagtgcctggacagcggccagatgaacctgtacaaggaggtgatgctggagaacttcagcaacctggtgagcgtgggcctgagcagcagcaagcccgccgtgatcagcctgctggagcagggcaaggagccctggatggtggacagggagctgaccaggggcctgtgcagcgacctggagagcatgggcggcccaagcagcggcgcccctcctcccagcggcggcagcccagccggctccccaacctctaccgaggagggcacctctgagtccgccacccccgagagcggccctggcacctccaccgagcccagcgagggcagcgcacccggcagccctgccggcagccccacctccacagaggagggaaccagcaccgagcccagcgaaggcagcgccccaggcaccagcaccgagcctagtgagcaggagattaaacggatcaacaagatcagaagaagacttgtgaaagacagcaacaccaagaaggccggcaagacaggccccatgaaaaccctgctggttagagtgatgacacccgatctgagagagcggctggaaaacctgagaaagaagcctgaaaatatcccccagcccatcagcaatacatctagagccaacctgaataagctgctgaccgattacaccgaaatgaagaaggcgatcctgcatgtgtactgggaagagttccagaaggaccctgtgggcctgatgagccgggtggcccagcctgccagcaagaagatcgatcagaacaagctgaaacctgagatggacgagaagggcaacctgaccaccgccggctttgcctgctctcagtgtggccagcccctgttcgtgtacaagctggagcaggtgtctgagaagggcaaggcttacaccaactacttcggacggtgcaatgtggccgagcacgaaaagctgatcctgctggcccagctgaagcccgagaaggatagcgacgaagccgtgacatatagcctgggaaagtttgggcagagggccctggatttctacagcattcatgtgaccaaggagtccacccaccccgtgaagcccctggcccagatcgccggaaacagatacgcctccggacctgtgggaaaggccctgagcgacgcatgtatgggcacaatcgcctccttcctgtctaagtaccaggacatcatcatcgaacaccagaaggtggtgaagggcaaccagaagagactggagagcctgcgggagctggccggcaaggaaaacctggaataccctagcgtgaccctgccacctcagcctcacaccaaggagggcgttgatgcctacaacgaagtgatcgcccgggtgcgaatgtgggtgaacctgaacctgtggcagaagctgaagctaagcagagatgatgccaagcctctgctgagactgaagggattcccttcctttcctctggtcgagagacaggccaacgaagtggactggtgggacatggtgtgtaacgtgaagaagctgatcaacgagaaaaaggaggatggcaaggtgttttggcagaatctggctggctacaagagacaggaagccctgagaccatacctgagcagcgaggaagatcggaagaagggaaagaaattcgctcggtaccagctgggcgacctgctgctgcacctggaaaagaagcacggcgaggactggggaaaggtgtacgacgaggcctgggagcggattgacaagaaagtggaaggcctgagcaagcacatcaagctggaagaggaacggagaagcgaggacgcccagagcaaggccgccctgaccgactggctgcgggctaaggccagcttcgtgatcgagggcctgaaggaggccgacaaggacgagttctgcagatgcgagctgaagctgcagaagtggtacggggacctgcggggaaagcccttcgccatcgaagccgagaacagcatcctggacatcagcggcttcagcaagcagtacaactgtgccttcatctggcagaaggacggcgtgaagaagctgaacctgtacctgatcatcaactacttcaagggcggcaagctgcggttcaagaagatcaaacctgaagccttcgaagccaacagattctacaccgtgatcaacaaaaagagcggcgagatcgtgcccatggaggtgaacttcaacttcgacgaccccaacctgatcatcctgcctctggcctttggcaagagacagggcagagaattcatctggaacgacctgctgtccctggaaaccggcagcctgaagctggccaacggaagagtgatcgagaagacactgtacaacagaagaacccggcaggatgagcctgccctgttcgtggccctgaccttcgagcggcgggaggtcctggactcctccaatatcaaaccaatgaacctgatcggcgtggcaagaggcgaaaacatccccgccgtgatcgccctgaccgaccccgagggctgcccactgagccggtttaaggatagcctgggaaacccaacccacatcctgagaatcggcgagagctataaggagaagcagcggaccatccaggccaagaaggaggtggagcagcggagagccggcggctacagccggaagtacgccagcaaagccaagaatctggcagacgatatggtgagaaacaccgctagagatctgctgtactacgccgtgacccaggatgccatgctgatcttcgccaacctgagccggggcttcggccggcagggcaagcggaccttcatggccgagagacagtacacacggatggaggactggctgaccgccaagctggcctacgagggcctgagcaagacctacctgtccaagacactggcccagtacacctccaagacatgcagcaactgtgggtttaccatcaccagcgccgactacgacagggtgctggagaagctgaagaagacagcaacaggctggatgaccacaattaacggcaaggagctgaaggtggagggccagattacctactacaacagatacaagagacagaacgtagtcaaggacctgtccgtcgagctggatagactgagcgaagaatctgtgaacaacgacatctcctcctggacaaagggcagaagcggagaagctctgagcctcctgaagaaaagattctcccatagacccgtgcaggagaagttcgtgtgcctgaactgcggcttcgagacacacgcagccgagcaagccgccctgaacatcgccagatcctggctgttcctgcggagccaggagtacaagaaataccagacaaacaagacaaccggcaacaccgataagagagccttcgtcgagacctggcagtccttttaccggaagaagcttaaggaggtgtggaaacctgccgtgcggtctggcggatctggcggaggctccaccagccccaagaaaaagagaaaagtctaagctgccttctgcggggcttgccttctggccatgcccttcttctctcccttgcacctgtacctcttggtctttgaataaagcctgagtaggaaggctagcaaaaaaaaaaaaaaaaaaaaaaaaaaaaaaaaaaaaaaaaaaaaaaaaaaaaaaaaaaaaaaaaaaaaaaaaaaaaaaaa

SEQ ID NO: 13465 - RNA, 5785 nt, synthetic construct
  source 1..5785: mol_type = other RNA
aggaaataagagagaaaagaagagtaagaagaaatataagagccaccatggcccctaagaagaagcgtaaagtgagccggatggaacgcctcgtctacgaggtgcggcagaagtgcagaaacatcgaggacatctgcatctcctgcggatctctgaacgtgaccctggagcacccactgttcatcggcggcatgtgccagaactgtaaaaactgttttctggagtgtgcctatcaatacgacgatgacggctaccagagctactgcaccatctgttgcggcggaagagaggtgctgatgtgtggaaataacaactgctgccggtgcttctgcgtggaatgcgtggacctgctggtgggccccggcgccgcccaggccgctattaaggaagatccttggaactgctacatgtgcggccacaagggcacatacggcctgctgagacggagagaggactggcctagcagactgcagatgttcttcgccaataaccacgaccaggagttcgacccccctaaggtgtaccctcccgtccccgccgagaagagaaagcccatccgggtcctgagcctgttcgatggcatcgccaccggtctgctggtgctgaaggacctgggcatccaggtggataggtacattgcctccgaggtgtgcgaggactccatcaccgtgggaatggtgcgtcatcagggcaagatcatgtacgtgggcgacgtgcggagcgtgacacagaagcatatccaggagtggggccctttcgacctggtgatcggcggcagcccttgcaatgacctgagcatcgtgaacccagcccggaagggcctgtacgagggaaccggcagactgttcttcgagttttacagactgctgcacgacgcccggcctaaggaaggcgacgaccggcccttcttttggctgttcgagaatgtggtggccatgggagtcagcgacaagcgggatattagccggttcctggagagcaaccccgtgatgatcgatgccaaggaagtgagcgccgcccaccgggccagatacttctggggcaatctgcctggcatgaacagacccctggccagcaccgtgaacgacaagctggagctgcaggagtgcctggagcacggccggatcgccaagttcagcaaggtgagaaccatcaccacccgaagcaacagcatcaaacaaggcaaggaccagcactttcctgtgttcatgaacgagaaggaggacatcctgtggtgtaccgagatggagagagtgttcgggttcccagtccactacacagatgtcagcaacatgtctagactggccagacagagactgctgggaagaagctggtccgtccctgtgatcagacacctgttcgcccctctgaaggagtacttcgcctgcgtgagcagcggcaacagcaacgccaacagccggggccccagcttctctagcggcctggtgccactgtccctgagagggagccacatgggccccatggagatctacaaaaccgtgagcgcctggaagcggcagcctgtgcgcgtgctgagcctgtttcggaatatcgataaagtcctgaaaagcctgggattcctggagagcggctctggctccggcggtggcaccctgaagtacgtggaggatgtgacaaacgtggtcagacgggatgtggagaagtggggccccttcgatctggtgtacggcagcacccaacccctgggcagctcttgtgaccggtgccctggctggtacatgtttcagttccaccggatcctgcagtacgccctgccgagacaggagtcccagcggccattcttttggattttcatggacaacttgctgctgaccgaggatgaccaggaaactaccactcggttcctgcagaccgaagccgtgaccctgcaggacgtgagaggccgggactaccagaacgccatgcgggtgtggtccaacatccctggactgaaaagcaagcacgcacctctgacccctaaagaagaggagtacctgcaggcccaggtgcggagcagaagcaagctggacgcccctaaggtggatctgctggtgaagaattgcctcctgcccctgagagagtacttcaagtatttcagccagaatagtctgcccctgggaggcagcggcggcggccagatgagggtgaccttcgaggacatcagcgtgagcttcagccaggaggagtggggctacctgaacgaggagcagaaggagctgtacagggaggtgatgaaggagaactaccagaccctgatcagcctggccaccgacagccccatcatcgaccccgacatcatcagcaggatcgagaggggcgaggagccctacgtgagggacgagcccgccagcgaggagagggagaccggcaggagcaacggcggcccaagcagcggcgcccctcctcccagcggcggcagcccagccggctccccaacctctaccgaggagggcacctctgagtccgccacccccgagagcggccctggcacctccaccgagcccagcgagggcagcgcacccggcagccctgccggcagccccacctccacagaggagggaaccagcaccgagcccagcgaaggcagcgccccaggcaccagcaccgagcctagtgagcaggagattaaacggatcaacaagatcagaagaagacttgtgaaagacagcaacaccaagaaggccggcaagacaggccccatgaaaaccctgctggttagagtgatgacacccgatctgagagagcggctggaaaacctgagaaagaagcctgaaaatatcccccagcccatcagcaatacatctagagccaacctgaataagctgctgaccgattacaccgaaatgaagaaggcgatcctgcatgtgtactgggaagagttccagaaggaccctgtgggcctgatgagccgggtggcccagcctgccagcaagaagatcgatcagaacaagctgaaacctgagatggacgagaagggcaacctgaccaccgccggctttgcctgctctcagtgtggccagcccctgttcgtgtacaagctggagcaggtgtctgagaagggcaaggcttacaccaactacttcggacggtgcaatgtggccgagcacgaaaagctgatcctgctggcccagctgaagcccgagaaggatagcgacgaagccgtgacatatagcctgggaaagtttgggcagagggccctggatttctacagcattcatgtgaccaaggagtccacccaccccgtgaagcccctggcccagatcgccggaaacagatacgcctccggacctgtgggaaaggccctgagcgacgcatgtatgggcacaatcgcctccttcctgtctaagtaccaggacatcatcatcgaacaccagaaggtggtgaagggcaaccagaagagactggagagcctgcgggagctggccggcaaggaaaacctggaataccctagcgtgaccctgccacctcagcctcacaccaaggagggcgttgatgcctacaacgaagtgatcgcccgggtgcgaatgtgggtgaacctgaacctgtggcagaagctgaagctaagcagagatgatgccaagcctctgctgagactgaagggattcccttcctttcctctggtcgagagacaggccaacgaagtggactggtgggacatggtgtgtaacgtgaagaagctgatcaacgagaaaaaggaggatggcaaggtgttttggcagaatctggctggctacaagagacaggaagccctgagaccatacctgagcagcgaggaagatcggaagaagggaaagaaattcgctcggtaccagctgggcgacctgctgctgcacctggaaaagaagcacggcgaggactggggaaaggtgtacgacgaggcctgggagcggattgacaagaaagtggaaggcctgagcaagcacatcaagctggaagaggaacggagaagcgaggacgcccagagcaaggccgccctgaccgactggctgcgggctaaggccagcttcgtgatcgagggcctgaaggaggccgacaaggacgagttctgcagatgcgagctgaagctgcagaagtggtacggggacctgcggggaaagcccttcgccatcgaagccgagaacagcatcctggacatcagcggcttcagcaagcagtacaactgtgccttcatctggcagaaggacggcgtgaagaagctgaacctgtacctgatcatcaactacttcaagggcggcaagctgcggttcaagaagatcaaacctgaagccttcgaagccaacagattctacaccgtgatcaacaaaaagagcggcgagatcgtgcccatggaggtgaacttcaacttcgacgaccccaacctgatcatcctgcctctggcctttggcaagagacagggcagagaattcatctggaacgacctgctgtccctggaaaccggcagcctgaagctggccaacggaagagtgatcgagaagacactgtacaacagaagaacccggcaggatgagcctgccctgttcgtggccctgaccttcgagcggcgggaggtcctggactcctccaatatcaaaccaatgaacctgatcggcgtggcaagaggcgaaaacatccccgccgtgatcgccctgaccgaccccgagggctgcccactgagccggtttaaggatagcctgggaaacccaacccacatcctgagaatcggcgagagctataaggagaagcagcggaccatccaggccaagaaggaggtggagcagcggagagccggcggctacagccggaagtacgccagcaaagccaagaatctggcagacgatatggtgagaaacaccgctagagatctgctgtactacgccgtgacccaggatgccatgctgatcttcgccaacctgagccggggcttcggccggcagggcaagcggaccttcatggccgagagacagtacacacggatggaggactggctgaccgccaagctggcctacgagggcctgagcaagacctacctgtccaagacactggcccagtacacctccaagacatgcagcaactgtgggtttaccatcaccagcgccgactacgacagggtgctggagaagctgaagaagacagcaacaggctggatgaccacaattaacggcaaggagctgaaggtggagggccagattacctactacaacagatacaagagacagaacgtagtcaaggacctgtccgtcgagctggatagactgagcgaagaatctgtgaacaacgacatctcctcctggacaaagggcagaagcggagaagctctgagcctcctgaagaaaagattctcccatagacccgtgcaggagaagttcgtgtgcctgaactgcggcttcgagacacacgcagccgagcaagccgccctgaacatcgccagatcctggctgttcctgcggagccaggagtacaagaaataccagacaaacaagacaaccggcaacaccgataagagagccttcgtcgagacctggcagtccttttaccggaagaagcttaaggaggtgtggaaacctgccgtgcggtctggcggatctggcggaggctccaccagccccaagaaaaagagaaaagtctaagctgccttctgcggggcttgccttctggccatgcccttcttctctcccttgcacctgtacctcttggtctttgaataaagcctgagtaggaaggctagcaaaaaaaaaaaaaaaaaaaaaaaaaaaaaaaaaaaaaaaaaaaaaaaaaaaaaaaaaaaaaaaaaaaaaaaaaaaaaaaa

SEQ ID NO: 13466 - RNA, 5785 nt, synthetic construct
  source 1..5785: mol_type = other RNA
aggaaataagagagaaaagaagagtaagaagaaatataagagccaccatggcccctaagaagaagcgtaaagtgagccggatggaacgcctcgtctacgaggtgcggcagaagtgcagaaacatcgaggacatctgcatctcctgcggatctctgaacgtgaccctggagcacccactgttcatcggcggcatgtgccagaactgtaaaaactgttttctggagtgtgcctatcaatacgacgatgacggctaccagagctactgcaccatctgttgcggcggaagagaggtgctgatgtgtggaaataacaactgctgccggtgcttctgcgtggaatgcgtggacctgctggtgggccccggcgccgcccaggccgctattaaggaagatccttggaactgctacatgtgcggccacaagggcacatacggcctgctgagacggagagaggactggcctagcagactgcagatgttcttcgccaataaccacgaccaggagttcgacccccctaaggtgtaccctcccgtccccgccgagaagagaaagcccatccgggtcctgagcctgttcgatggcatcgccaccggtctgctggtgctgaaggacctgggcatccaggtggataggtacattgcctccgaggtgtgcgaggactccatcaccgtgggaatggtgcgtcatcagggcaagatcatgtacgtgggcgacgtgcggagcgtgacacagaagcatatccaggagtggggccctttcgacctggtgatcggcggcagcccttgcaatgacctgagcatcgtgaacccagcccggaagggcctgtacgagggaaccggcagactgttcttcgagttttacagactgctgcacgacgcccggcctaaggaaggcgacgaccggcccttcttttggctgttcgagaatgtggtggccatgggagtcagcgacaagcgggatattagccggttcctggagagcaaccccgtgatgatcgatgccaaggaagtgagcgccgcccaccgggccagatacttctggggcaatctgcctggcatgaacagacccctggccagcaccgtgaacgacaagctggagctgcaggagtgcctggagcacggccggatcgccaagttcagcaaggtgagaaccatcaccacccgaagcaacagcatcaaacaaggcaaggaccagcactttcctgtgttcatgaacgagaaggaggacatcctgtggtgtaccgagatggagagagtgttcgggttcccagtccactacacagatgtcagcaacatgtctagactggccagacagagactgctgggaagaagctggtccgtccctgtgatcagacacctgttcgcccctctgaaggagtacttcgcctgcgtgagcagcggcaacagcaacgccaacagccggggccccagcttctctagcggcctggtgccactgtccctgagagggagccacatgggccccatggagatctacaaaaccgtgagcgcctggaagcggcagcctgtgcgcgtgctgagcctgtttcggaatatcgataaagtcctgaaaagcctgggattcctggagagcggctctggctccggcggtggcaccctgaagtacgtggaggatgtgacaaacgtggtcagacgggatgtggagaagtggggccccttcgatctggtgtacggcagcacccaacccctgggcagctcttgtgaccggtgccctggctggtacatgtttcagttccaccggatcctgcagtacgccctgccgagacaggagtcccagcggccattcttttggattttcatggacaacttgctgctgaccgaggatgaccaggaaactaccactcggttcctgcagaccgaagccgtgaccctgcaggacgtgagaggccgggactaccagaacgccatgcgggtgtggtccaacatccctggactgaaaagcaagcacgcacctctgacccctaaagaagaggagtacctgcaggcccaggtgcggagcagaagcaagctggacgcccctaaggtggatctgctggtgaagaattgcctcctgcccctgagagagtacttcaagtatttcagccagaatagtctgcccctgggaggcagcggcggcggcctggtgttcgaggacgtggccatcaacttcacccccgaggagtgggccctgctggaccccgcccagaggaggctgtacagggacgtgatgctggagaccttcaagaacctggccttcgtgggcagctgcctgcacgtgaagaccagcggcagcagcgcccagagggacatcctggagaacgtgctgtgcagcgaggagaagatcgtgaggttcaagaggaacgacagcaagagcgtgctgggcggcggcccaagcagcggcgcccctcctcccagcggcggcagcccagccggctccccaacctctaccgaggagggcacctctgagtccgccacccccgagagcggccctggcacctccaccgagcccagcgagggcagcgcacccggcagccctgccggcagccccacctccacagaggagggaaccagcaccgagcccagcgaaggcagcgccccaggcaccagcaccgagcctagtgagcaggagattaaacggatcaacaagatcagaagaagacttgtgaaagacagcaacaccaagaaggccggcaagacaggccccatgaaaaccctgctggttagagtgatgacacccgatctgagagagcggctggaaaacctgagaaagaagcctgaaaatatcccccagcccatcagcaatacatctagagccaacctgaataagctgctgaccgattacaccgaaatgaagaaggcgatcctgcatgtgtactgggaagagttccagaaggaccctgtgggcctgatgagccgggtggcccagcctgccagcaagaagatcgatcagaacaagctgaaacctgagatggacgagaagggcaacctgaccaccgccggctttgcctgctctcagtgtggccagcccctgttcgtgtacaagctggagcaggtgtctgagaagggcaaggcttacaccaactacttcggacggtgcaatgtggccgagcacgaaaagctgatcctgctggcccagctgaagcccgagaaggatagcgacgaagccgtgacatatagcctgggaaagtttgggcagagggccctggatttctacagcattcatgtgaccaaggagtccacccaccccgtgaagcccctggcccagatcgccggaaacagatacgcctccggacctgtgggaaaggccctgagcgacgcatgtatgggcacaatcgcctccttcctgtctaagtaccaggacatcatcatcgaacaccagaaggtggtgaagggcaaccagaagagactggagagcctgcgggagctggccggcaaggaaaacctggaataccctagcgtgaccctgccacctcagcctcacaccaaggagggcgttgatgcctacaacgaagtgatcgcccgggtgcgaatgtgggtgaacctgaacctgtggcagaagctgaagctaagcagagatgatgccaagcctctgctgagactgaagggattcccttcctttcctctggtcgagagacaggccaacgaagtggactggtgggacatggtgtgtaacgtgaagaagctgatcaacgagaaaaaggaggatggcaaggtgttttggcagaatctggctggctacaagagacaggaagccctgagaccatacctgagcagcgaggaagatcggaagaagggaaagaaattcgctcggtaccagctgggcgacctgctgctgcacctggaaaagaagcacggcgaggactggggaaaggtgtacgacgaggcctgggagcggattgacaagaaagtggaaggcctgagcaagcacatcaagctggaagaggaacggagaagcgaggacgcccagagcaaggccgccctgaccgactggctgcgggctaaggccagcttcgtgatcgagggcctgaaggaggccgacaaggacgagttctgcagatgcgagctgaagctgcagaagtggtacggggacctgcggggaaagcccttcgccatcgaagccgagaacagcatcctggacatcagcggcttcagcaagcagtacaactgtgccttcatctggcagaaggacggcgtgaagaagctgaacctgtacctgatcatcaactacttcaagggcggcaagctgcggttcaagaagatcaaacctgaagccttcgaagccaacagattctacaccgtgatcaacaaaaagagcggcgagatcgtgcccatggaggtgaacttcaacttcgacgaccccaacctgatcatcctgcctctggcctttggcaagagacagggcagagaattcatctggaacgacctgctgtccctggaaaccggcagcctgaagctggccaacggaagagtgatcgagaagacactgtacaacagaagaacccggcaggatgagcctgccctgttcgtggccctgaccttcgagcggcgggaggtcctggactcctccaatatcaaaccaatgaacctgatcggcgtggcaagaggcgaaaacatccccgccgtgatcgccctgaccgaccccgagggctgcccactgagccggtttaaggatagcctgggaaacccaacccacatcctgagaatcggcgagagctataaggagaagcagcggaccatccaggccaagaaggaggtggagcagcggagagccggcggctacagccggaagtacgccagcaaagccaagaatctggcagacgatatggtgagaaacaccgctagagatctgctgtactacgccgtgacccaggatgccatgctgatcttcgccaacctgagccggggcttcggccggcagggcaagcggaccttcatggccgagagacagtacacacggatggaggactggctgaccgccaagctggcctacgagggcctgagcaagacctacctgtccaagacactggcccagtacacctccaagacatgcagcaactgtgggtttaccatcaccagcgccgactacgacagggtgctggagaagctgaagaagacagcaacaggctggatgaccacaattaacggcaaggagctgaaggtggagggccagattacctactacaacagatacaagagacagaacgtagtcaaggacctgtccgtcgagctggatagactgagcgaagaatctgtgaacaacgacatctcctcctggacaaagggcagaagcggagaagctctgagcctcctgaagaaaagattctcccatagacccgtgcaggagaagttcgtgtgcctgaactgcggcttcgagacacacgcagccgagcaagccgccctgaacatcgccagatcctggctgttcctgcggagccaggagtacaagaaataccagacaaacaagacaaccggcaacaccgataagagagccttcgtcgagacctggcagtccttttaccggaagaagcttaaggaggtgtggaaacctgccgtgcggtctggcggatctggcggaggctccaccagccccaagaaaaagagaaaagtctaagctgccttctgcggggcttgccttctggccatgcccttcttctctcccttgcacctgtacctcttggtctttgaataaagcctgagtaggaaggctagcaaaaaaaaaaaaaaaaaaaaaaaaaaaaaaaaaaaaaaaaaaaaaaaaaaaaaaaaaaaaaaaaaaaaaaaaaaaaaaaa

SEQ ID NO: 13467 - RNA, 5785 nt, synthetic construct
  source 1..5785: mol_type = other RNA
aggaaataagagagaaaagaagagtaagaagaaatataagagccaccatggcccctaagaagaagcgtaaagtgagccggatggaacgcctcgtctacgaggtgcggcagaagtgcagaaacatcgaggacatctgcatctcctgcggatctctgaacgtgaccctggagcacccactgttcatcggcggcatgtgccagaactgtaaaaactgttttctggagtgtgcctatcaatacgacgatgacggctaccagagctactgcaccatctgttgcggcggaagagaggtgctgatgtgtggaaataacaactgctgccggtgcttctgcgtggaatgcgtggacctgctggtgggccccggcgccgcccaggccgctattaaggaagatccttggaactgctacatgtgcggccacaagggcacatacggcctgctgagacggagagaggactggcctagcagactgcagatgttcttcgccaataaccacgaccaggagttcgacccccctaaggtgtaccctcccgtccccgccgagaagagaaagcccatccgggtcctgagcctgttcgatggcatcgccaccggtctgctggtgctgaaggacctgggcatccaggtggataggtacattgcctccgaggtgtgcgaggactccatcaccgtgggaatggtgcgtcatcagggcaagatcatgtacgtgggcgacgtgcggagcgtgacacagaagcatatccaggagtggggccctttcgacctggtgatcggcggcagcccttgcaatgacctgagcatcgtgaacccagcccggaagggcctgtacgagggaaccggcagactgttcttcgagttttacagactgctgcacgacgcccggcctaaggaaggcgacgaccggcccttcttttggctgttcgagaatgtggtggccatgggagtcagcgacaagcgggatattagccggttcctggagagcaaccccgtgatgatcgatgccaaggaagtgagcgccgcccaccgggccagatacttctggggcaatctgcctggcatgaacagacccctggccagcaccgtgaacgacaagctggagctgcaggagtgcctggagcacggccggatcgccaagttcagcaaggtgagaaccatcaccacccgaagcaacagcatcaaacaaggcaaggaccagcactttcctgtgttcatgaacgagaaggaggacatcctgtggtgtaccgagatggagagagtgttcgggttcccagtccactacacagatgtcagcaacatgtctagactggccagacagagactgctgggaagaagctggtccgtccctgtgatcagacacctgttcgcccctctgaaggagtacttcgcctgcgtgagcagcggcaacagcaacgccaacagccggggccccagcttctctagcggcctggtgccactgtccctgagagggagccacatgggccccatggagatctacaaaaccgtgagcgcctggaagcggcagcctgtgcgcgtgctgagcctgtttcggaatatcgataaagtcctgaaaagcctgggattcctggagagcggctctggctccggcggtggcaccctgaagtacgtggaggatgtgacaaacgtggtcagacgggatgtggagaagtggggccccttcgatctggtgtacggcagcacccaacccctgggcagctcttgtgaccggtgccctggctggtacatgtttcagttccaccggatcctgcagtacgccctgccgagacaggagtcccagcggccattcttttggattttcatggacaacttgctgctgaccgaggatgaccaggaaactaccactcggttcctgcagaccgaagccgtgaccctgcaggacgtgagaggccgggactaccagaacgccatgcgggtgtggtccaacatccctggactgaaaagcaagcacgcacctctgacccctaaagaagaggagtacctgcaggcccaggtgcggagcagaagcaagctggacgcccctaaggtggatctgctggtgaagaattgcctcctgcccctgagagagtacttcaagtatttcagccagaatagtctgcccctgggaggcagcggcggcggcggcccctggaccctgctgaccttcagggacgtggccatcgagttcagccaggaggagtggggctgcctgaaccacagccagagggagctgtacagggacgtgatgctggagacctacggccacctgctgttcctgggcctggtgagcaagcccgacctggtgatcctgctggagcagaagaaggagctgtggggcgtgaagaggaaggagaccgtggccagccaccccggcaggtgggagatcggcggcccaagcagcggcgcccctcctcccagcggcggcagcccagccggctccccaacctctaccgaggagggcacctctgagtccgccacccccgagagcggccctggcacctccaccgagcccagcgagggcagcgcacccggcagccctgccggcagccccacctccacagaggagggaaccagcaccgagcccagcgaaggcagcgccccaggcaccagcaccgagcctagtgagcaggagattaaacggatcaacaagatcagaagaagacttgtgaaagacagcaacaccaagaaggccggcaagacaggccccatgaaaaccctgctggttagagtgatgacacccgatctgagagagcggctggaaaacctgagaaagaagcctgaaaatatcccccagcccatcagcaatacatctagagccaacctgaataagctgctgaccgattacaccgaaatgaagaaggcgatcctgcatgtgtactgggaagagttccagaaggaccctgtgggcctgatgagccgggtggcccagcctgccagcaagaagatcgatcagaacaagctgaaacctgagatggacgagaagggcaacctgaccaccgccggctttgcctgctctcagtgtggccagcccctgttcgtgtacaagctggagcaggtgtctgagaagggcaaggcttacaccaactacttcggacggtgcaatgtggccgagcacgaaaagctgatcctgctggcccagctgaagcccgagaaggatagcgacgaagccgtgacatatagcctgggaaagtttgggcagagggccctggatttctacagcattcatgtgaccaaggagtccacccaccccgtgaagcccctggcccagatcgccggaaacagatacgcctccggacctgtgggaaaggccctgagcgacgcatgtatgggcacaatcgcctccttcctgtctaagtaccaggacatcatcatcgaacaccagaaggtggtgaagggcaaccagaagagactggagagcctgcgggagctggccggcaaggaaaacctggaataccctagcgtgaccctgccacctcagcctcacaccaaggagggcgttgatgcctacaacgaagtgatcgcccgggtgcgaatgtgggtgaacctgaacctgtggcagaagctgaagctaagcagagatgatgccaagcctctgctgagactgaagggattcccttcctttcctctggtcgagagacaggccaacgaagtggactggtgggacatggtgtgtaacgtgaagaagctgatcaacgagaaaaaggaggatggcaaggtgttttggcagaatctggctggctacaagagacaggaagccctgagaccatacctgagcagcgaggaagatcggaagaagggaaagaaattcgctcggtaccagctgggcgacctgctgctgcacctggaaaagaagcacggcgaggactggggaaaggtgtacgacgaggcctgggagcggattgacaagaaagtggaaggcctgagcaagcacatcaagctggaagaggaacggagaagcgaggacgcccagagcaaggccgccctgaccgactggctgcgggctaaggccagcttcgtgatcgagggcctgaaggaggccgacaaggacgagttctgcagatgcgagctgaagctgcagaagtggtacggggacctgcggggaaagcccttcgccatcgaagccgagaacagcatcctggacatcagcggcttcagcaagcagtacaactgtgccttcatctggcagaaggacggcgtgaagaagctgaacctgtacctgatcatcaactacttcaagggcggcaagctgcggttcaagaagatcaaacctgaagccttcgaagccaacagattctacaccgtgatcaacaaaaagagcggcgagatcgtgcccatggaggtgaacttcaacttcgacgaccccaacctgatcatcctgcctctggcctttggcaagagacagggcagagaattcatctggaacgacctgctgtccctggaaaccggcagcctgaagctggccaacggaagagtgatcgagaagacactgtacaacagaagaacccggcaggatgagcctgccctgttcgtggccctgaccttcgagcggcgggaggtcctggactcctccaatatcaaaccaatgaacctgatcggcgtggcaagaggcgaaaacatccccgccgtgatcgccctgaccgaccccgagggctgcccactgagccggtttaaggatagcctgggaaacccaacccacatcctgagaatcggcgagagctataaggagaagcagcggaccatccaggccaagaaggaggtggagcagcggagagccggcggctacagccggaagtacgccagcaaagccaagaatctggcagacgatatggtgagaaacaccgctagagatctgctgtactacgccgtgacccaggatgccatgctgatcttcgccaacctgagccggggcttcggccggcagggcaagcggaccttcatggccgagagacagtacacacggatggaggactggctgaccgccaagctggcctacgagggcctgagcaagacctacctgtccaagacactggcccagtacacctccaagacatgcagcaactgtgggtttaccatcaccagcgccgactacgacagggtgctggagaagctgaagaagacagcaacaggctggatgaccacaattaacggcaaggagctgaaggtggagggccagattacctactacaacagatacaagagacagaacgtagtcaaggacctgtccgtcgagctggatagactgagcgaagaatctgtgaacaacgacatctcctcctggacaaagggcagaagcggagaagctctgagcctcctgaagaaaagattctcccatagacccgtgcaggagaagttcgtgtgcctgaactgcggcttcgagacacacgcagccgagcaagccgccctgaacatcgccagatcctggctgttcctgcggagccaggagtacaagaaataccagacaaacaagacaaccggcaacaccgataagagagccttcgtcgagacctggcagtccttttaccggaagaagcttaaggaggtgtggaaacctgccgtgcggtctggcggatctggcggaggctccaccagccccaagaaaaagagaaaagtctaagctgccttctgcggggcttgccttctggccatgcccttcttctctcccttgcacctgtacctcttggtctttgaataaagcctgagtaggaaggctagcaaaaaaaaaaaaaaaaaaaaaaaaaaaaaaaaaaaaaaaaaaaaaaaaaaaaaaaaaaaaaaaaaaaaaaaaaaaaaaaa

SEQ ID NO: 13468 - RNA, 5785 nt, synthetic construct
  source 1..5785: mol_type = other RNA
aggaaataagagagaaaagaagagtaagaagaaatataagagccaccatggcccctaagaagaagcgtaaagtgagccggatggaacgcctcgtctacgaggtgcggcagaagtgcagaaacatcgaggacatctgcatctcctgcggatctctgaacgtgaccctggagcacccactgttcatcggcggcatgtgccagaactgtaaaaactgttttctggagtgtgcctatcaatacgacgatgacggctaccagagctactgcaccatctgttgcggcggaagagaggtgctgatgtgtggaaataacaactgctgccggtgcttctgcgtggaatgcgtggacctgctggtgggccccggcgccgcccaggccgctattaaggaagatccttggaactgctacatgtgcggccacaagggcacatacggcctgctgagacggagagaggactggcctagcagactgcagatgttcttcgccaataaccacgaccaggagttcgacccccctaaggtgtaccctcccgtccccgccgagaagagaaagcccatccgggtcctgagcctgttcgatggcatcgccaccggtctgctggtgctgaaggacctgggcatccaggtggataggtacattgcctccgaggtgtgcgaggactccatcaccgtgggaatggtgcgtcatcagggcaagatcatgtacgtgggcgacgtgcggagcgtgacacagaagcatatccaggagtggggccctttcgacctggtgatcggcggcagcccttgcaatgacctgagcatcgtgaacccagcccggaagggcctgtacgagggaaccggcagactgttcttcgagttttacagactgctgcacgacgcccggcctaaggaaggcgacgaccggcccttcttttggctgttcgagaatgtggtggccatgggagtcagcgacaagcgggatattagccggttcctggagagcaaccccgtgatgatcgatgccaaggaagtgagcgccgcccaccgggccagatacttctggggcaatctgcctggcatgaacagacccctggccagcaccgtgaacgacaagctggagctgcaggagtgcctggagcacggccggatcgccaagttcagcaaggtgagaaccatcaccacccgaagcaacagcatcaaacaaggcaaggaccagcactttcctgtgttcatgaacgagaaggaggacatcctgtggtgtaccgagatggagagagtgttcgggttcccagtccactacacagatgtcagcaacatgtctagactggccagacagagactgctgggaagaagctggtccgtccctgtgatcagacacctgttcgcccctctgaaggagtacttcgcctgcgtgagcagcggcaacagcaacgccaacagccggggccccagcttctctagcggcctggtgccactgtccctgagagggagccacatgggccccatggagatctacaaaaccgtgagcgcctggaagcggcagcctgtgcgcgtgctgagcctgtttcggaatatcgataaagtcctgaaaagcctgggattcctggagagcggctctggctccggcggtggcaccctgaagtacgtggaggatgtgacaaacgtggtcagacgggatgtggagaagtggggccccttcgatctggtgtacggcagcacccaacccctgggcagctcttgtgaccggtgccctggctggtacatgtttcagttccaccggatcctgcagtacgccctgccgagacaggagtcccagcggccattcttttggattttcatggacaacttgctgctgaccgaggatgaccaggaaactaccactcggttcctgcagaccgaagccgtgaccctgcaggacgtgagaggccgggactaccagaacgccatgcgggtgtggtccaacatccctggactgaaaagcaagcacgcacctctgacccctaaagaagaggagtacctgcaggcccaggtgcggagcagaagcaagctggacgcccctaaggtggatctgctggtgaagaattgcctcctgcccctgagagagtacttcaagtatttcagccagaatagtctgcccctgggaggcagcggcggcggcatggaggacctgctgagcttcaccgacgtggccatcgacttcagcgccgacgagtgcgagtgcctggacagcgcccagtggaacctgtacaaggaggtgatgctggagaactacagcaacctggtgttcctgggcctggccttcagcaagccccacctggtgaccttcctggagcagagcagcgacccctggagcgtgaagaggaaggccagcgccgccatcagcctgggcagcaagccccacggcggcccaagcagcggcgcccctcctcccagcggcggcagcccagccggctccccaacctctaccgaggagggcacctctgagtccgccacccccgagagcggccctggcacctccaccgagcccagcgagggcagcgcacccggcagccctgccggcagccccacctccacagaggagggaaccagcaccgagcccagcgaaggcagcgccccaggcaccagcaccgagcctagtgagcaggagattaaacggatcaacaagatcagaagaagacttgtgaaagacagcaacaccaagaaggccggcaagacaggccccatgaaaaccctgctggttagagtgatgacacccgatctgagagagcggctggaaaacctgagaaagaagcctgaaaatatcccccagcccatcagcaatacatctagagccaacctgaataagctgctgaccgattacaccgaaatgaagaaggcgatcctgcatgtgtactgggaagagttccagaaggaccctgtgggcctgatgagccgggtggcccagcctgccagcaagaagatcgatcagaacaagctgaaacctgagatggacgagaagggcaacctgaccaccgccggctttgcctgctctcagtgtggccagcccctgttcgtgtacaagctggagcaggtgtctgagaagggcaaggcttacaccaactacttcggacggtgcaatgtggccgagcacgaaaagctgatcctgctggcccagctgaagcccgagaaggatagcgacgaagccgtgacatatagcctgggaaagtttgggcagagggccctggatttctacagcattcatgtgaccaaggagtccacccaccccgtgaagcccctggcccagatcgccggaaacagatacgcctccggacctgtgggaaaggccctgagcgacgcatgtatgggcacaatcgcctccttcctgtctaagtaccaggacatcatcatcgaacaccagaaggtggtgaagggcaaccagaagagactggagagcctgcgggagctggccggcaaggaaaacctggaataccctagcgtgaccctgccacctcagcctcacaccaaggagggcgttgatgcctacaacgaagtgatcgcccgggtgcgaatgtgggtgaacctgaacctgtggcagaagctgaagctaagcagagatgatgccaagcctctgctgagactgaagggattcccttcctttcctctggtcgagagacaggccaacgaagtggactggtgggacatggtgtgtaacgtgaagaagctgatcaacgagaaaaaggaggatggcaaggtgttttggcagaatctggctggctacaagagacaggaagccctgagaccatacctgagcagcgaggaagatcggaagaagggaaagaaattcgctcggtaccagctgggcgacctgctgctgcacctggaaaagaagcacggcgaggactggggaaaggtgtacgacgaggcctgggagcggattgacaagaaagtggaaggcctgagcaagcacatcaagctggaagaggaacggagaagcgaggacgcccagagcaaggccgccctgaccgactggctgcgggctaaggccagcttcgtgatcgagggcctgaaggaggccgacaaggacgagttctgcagatgcgagctgaagctgcagaagtggtacggggacctgcggggaaagcccttcgccatcgaagccgagaacagcatcctggacatcagcggcttcagcaagcagtacaactgtgccttcatctggcagaaggacggcgtgaagaagctgaacctgtacctgatcatcaactacttcaagggcggcaagctgcggttcaagaagatcaaacctgaagccttcgaagccaacagattctacaccgtgatcaacaaaaagagcggcgagatcgtgcccatggaggtgaacttcaacttcgacgaccccaacctgatcatcctgcctctggcctttggcaagagacagggcagagaattcatctggaacgacctgctgtccctggaaaccggcagcctgaagctggccaacggaagagtgatcgagaagacactgtacaacagaagaacccggcaggatgagcctgccctgttcgtggccctgaccttcgagcggcgggaggtcctggactcctccaatatcaaaccaatgaacctgatcggcgtggcaagaggcgaaaacatccccgccgtgatcgccctgaccgaccccgagggctgcccactgagccggtttaaggatagcctgggaaacccaacccacatcctgagaatcggcgagagctataaggagaagcagcggaccatccaggccaagaaggaggtggagcagcggagagccggcggctacagccggaagtacgccagcaaagccaagaatctggcagacgatatggtgagaaacaccgctagagatctgctgtactacgccgtgacccaggatgccatgctgatcttcgccaacctgagccggggcttcggccggcagggcaagcggaccttcatggccgagagacagtacacacggatggaggactggctgaccgccaagctggcctacgagggcctgagcaagacctacctgtccaagacactggcccagtacacctccaagacatgcagcaactgtgggtttaccatcaccagcgccgactacgacagggtgctggagaagctgaagaagacagcaacaggctggatgaccacaattaacggcaaggagctgaaggtggagggccagattacctactacaacagatacaagagacagaacgtagtcaaggacctgtccgtcgagctggatagactgagcgaagaatctgtgaacaacgacatctcctcctggacaaagggcagaagcggagaagctctgagcctcctgaagaaaagattctcccatagacccgtgcaggagaagttcgtgtgcctgaactgcggcttcgagacacacgcagccgagcaagccgccctgaacatcgccagatcctggctgttcctgcggagccaggagtacaagaaataccagacaaacaagacaaccggcaacaccgataagagagccttcgtcgagacctggcagtccttttaccggaagaagcttaaggaggtgtggaaacctgccgtgcggtctggcggatctggcggaggctccaccagccccaagaaaaagagaaaagtctaagctgccttctgcggggcttgccttctggccatgcccttcttctctcccttgcacctgtacctcttggtctttgaataaagcctgagtaggaaggctagcaaaaaaaaaaaaaaaaaaaaaaaaaaaaaaaaaaaaaaaaaaaaaaaaaaaaaaaaaaaaaaaaaaaaaaaaaaaaaaaa

SEQ ID NO: 13469 - RNA, 5785 nt, synthetic construct
  source 1..5785: mol_type = other RNA
aggaaataagagagaaaagaagagtaagaagaaatataagagccaccatggcccctaagaagaagcgtaaagtgagccggatggaacgcctcgtctacgaggtgcggcagaagtgcagaaacatcgaggacatctgcatctcctgcggatctctgaacgtgaccctggagcacccactgttcatcggcggcatgtgccagaactgtaaaaactgttttctggagtgtgcctatcaatacgacgatgacggctaccagagctactgcaccatctgttgcggcggaagagaggtgctgatgtgtggaaataacaactgctgccggtgcttctgcgtggaatgcgtggacctgctggtgggccccggcgccgcccaggccgctattaaggaagatccttggaactgctacatgtgcggccacaagggcacatacggcctgctgagacggagagaggactggcctagcagactgcagatgttcttcgccaataaccacgaccaggagttcgacccccctaaggtgtaccctcccgtccccgccgagaagagaaagcccatccgggtcctgagcctgttcgatggcatcgccaccggtctgctggtgctgaaggacctgggcatccaggtggataggtacattgcctccgaggtgtgcgaggactccatcaccgtgggaatggtgcgtcatcagggcaagatcatgtacgtgggcgacgtgcggagcgtgacacagaagcatatccaggagtggggccctttcgacctggtgatcggcggcagcccttgcaatgacctgagcatcgtgaacccagcccggaagggcctgtacgagggaaccggcagactgttcttcgagttttacagactgctgcacgacgcccggcctaaggaaggcgacgaccggcccttcttttggctgttcgagaatgtggtggccatgggagtcagcgacaagcgggatattagccggttcctggagagcaaccccgtgatgatcgatgccaaggaagtgagcgccgcccaccgggccagatacttctggggcaatctgcctggcatgaacagacccctggccagcaccgtgaacgacaagctggagctgcaggagtgcctggagcacggccggatcgccaagttcagcaaggtgagaaccatcaccacccgaagcaacagcatcaaacaaggcaaggaccagcactttcctgtgttcatgaacgagaaggaggacatcctgtggtgtaccgagatggagagagtgttcgggttcccagtccactacacagatgtcagcaacatgtctagactggccagacagagactgctgggaagaagctggtccgtccctgtgatcagacacctgttcgcccctctgaaggagtacttcgcctgcgtgagcagcggcaacagcaacgccaacagccggggccccagcttctctagcggcctggtgccactgtccctgagagggagccacatgggccccatggagatctacaaaaccgtgagcgcctggaagcggcagcctgtgcgcgtgctgagcctgtttcggaatatcgataaagtcctgaaaagcctgggattcctggagagcggctctggctccggcggtggcaccctgaagtacgtggaggatgtgacaaacgtggtcagacgggatgtggagaagtggggccccttcgatctggtgtacggcagcacccaacccctgggcagctcttgtgaccggtgccctggctggtacatgtttcagttccaccggatcctgcagtacgccctgccgagacaggagtcccagcggccattcttttggattttcatggacaacttgctgctgaccgaggatgaccaggaaactaccactcggttcctgcagaccgaagccgtgaccctgcaggacgtgagaggccgggactaccagaacgccatgcgggtgtggtccaacatccctggactgaaaagcaagcacgcacctctgacccctaaagaagaggagtacctgcaggcccaggtgcggagcagaagcaagctggacgcccctaaggtggatctgctggtgaagaattgcctcctgcccctgagagagtacttcaagtatttcagccagaatagtctgcccctgggaggcagcggcggcggcgcccacgacctggtggtgttcagggacgtgagcgtggacttcagccaggaggagtgggagtgcctgaacagctaccagaggaacctgtacagggacgtgatcctggagaactacagcaacctggtgagcctgggctgcagcatcagcaagcccgacgtgatcaccctgctggagcagggcaaggagccctggatggtggtgaggaacgagaagaggaggtggaacctggacctggagagcaagggcggcccaagcagcggcgcccctcctcccagcggcggcagcccagccggctccccaacctctaccgaggagggcacctctgagtccgccacccccgagagcggccctggcacctccaccgagcccagcgagggcagcgcacccggcagccctgccggcagccccacctccacagaggagggaaccagcaccgagcccagcgaaggcagcgccccaggcaccagcaccgagcctagtgagcaggagattaaacggatcaacaagatcagaagaagacttgtgaaagacagcaacaccaagaaggccggcaagacaggccccatgaaaaccctgctggttagagtgatgacacccgatctgagagagcggctggaaaacctgagaaagaagcctgaaaatatcccccagcccatcagcaatacatctagagccaacctgaataagctgctgaccgattacaccgaaatgaagaaggcgatcctgcatgtgtactgggaagagttccagaaggaccctgtgggcctgatgagccgggtggcccagcctgccagcaagaagatcgatcagaacaagctgaaacctgagatggacgagaagggcaacctgaccaccgccggctttgcctgctctcagtgtggccagcccctgttcgtgtacaagctggagcaggtgtctgagaagggcaaggcttacaccaactacttcggacggtgcaatgtggccgagcacgaaaagctgatcctgctggcccagctgaagcccgagaaggatagcgacgaagccgtgacatatagcctgggaaagtttgggcagagggccctggatttctacagcattcatgtgaccaaggagtccacccaccccgtgaagcccctggcccagatcgccggaaacagatacgcctccggacctgtgggaaaggccctgagcgacgcatgtatgggcacaatcgcctccttcctgtctaagtaccaggacatcatcatcgaacaccagaaggtggtgaagggcaaccagaagagactggagagcctgcgggagctggccggcaaggaaaacctggaataccctagcgtgaccctgccacctcagcctcacaccaaggagggcgttgatgcctacaacgaagtgatcgcccgggtgcgaatgtgggtgaacctgaacctgtggcagaagctgaagctaagcagagatgatgccaagcctctgctgagactgaagggattcccttcctttcctctggtcgagagacaggccaacgaagtggactggtgggacatggtgtgtaacgtgaagaagctgatcaacgagaaaaaggaggatggcaaggtgttttggcagaatctggctggctacaagagacaggaagccctgagaccatacctgagcagcgaggaagatcggaagaagggaaagaaattcgctcggtaccagctgggcgacctgctgctgcacctggaaaagaagcacggcgaggactggggaaaggtgtacgacgaggcctgggagcggattgacaagaaagtggaaggcctgagcaagcacatcaagctggaagaggaacggagaagcgaggacgcccagagcaaggccgccctgaccgactggctgcgggctaaggccagcttcgtgatcgagggcctgaaggaggccgacaaggacgagttctgcagatgcgagctgaagctgcagaagtggtacggggacctgcggggaaagcccttcgccatcgaagccgagaacagcatcctggacatcagcggcttcagcaagcagtacaactgtgccttcatctggcagaaggacggcgtgaagaagctgaacctgtacctgatcatcaactacttcaagggcggcaagctgcggttcaagaagatcaaacctgaagccttcgaagccaacagattctacaccgtgatcaacaaaaagagcggcgagatcgtgcccatggaggtgaacttcaacttcgacgaccccaacctgatcatcctgcctctggcctttggcaagagacagggcagagaattcatctggaacgacctgctgtccctggaaaccggcagcctgaagctggccaacggaagagtgatcgagaagacactgtacaacagaagaacccggcaggatgagcctgccctgttcgtggccctgaccttcgagcggcgggaggtcctggactcctccaatatcaaaccaatgaacctgatcggcgtggcaagaggcgaaaacatccccgccgtgatcgccctgaccgaccccgagggctgcccactgagccggtttaaggatagcctgggaaacccaacccacatcctgagaatcggcgagagctataaggagaagcagcggaccatccaggccaagaaggaggtggagcagcggagagccggcggctacagccggaagtacgccagcaaagccaagaatctggcagacgatatggtgagaaacaccgctagagatctgctgtactacgccgtgacccaggatgccatgctgatcttcgccaacctgagccggggcttcggccggcagggcaagcggaccttcatggccgagagacagtacacacggatggaggactggctgaccgccaagctggcctacgagggcctgagcaagacctacctgtccaagacactggcccagtacacctccaagacatgcagcaactgtgggtttaccatcaccagcgccgactacgacagggtgctggagaagctgaagaagacagcaacaggctggatgaccacaattaacggcaaggagctgaaggtggagggccagattacctactacaacagatacaagagacagaacgtagtcaaggacctgtccgtcgagctggatagactgagcgaagaatctgtgaacaacgacatctcctcctggacaaagggcagaagcggagaagctctgagcctcctgaagaaaagattctcccatagacccgtgcaggagaagttcgtgtgcctgaactgcggcttcgagacacacgcagccgagcaagccgccctgaacatcgccagatcctggctgttcctgcggagccaggagtacaagaaataccagacaaacaagacaaccggcaacaccgataagagagccttcgtcgagacctggcagtccttttaccggaagaagcttaaggaggtgtggaaacctgccgtgcggtctggcggatctggcggaggctccaccagccccaagaaaaagagaaaagtctaagctgccttctgcggggcttgccttctggccatgcccttcttctctcccttgcacctgtacctcttggtctttgaataaagcctgagtaggaaggctagcaaaaaaaaaaaaaaaaaaaaaaaaaaaaaaaaaaaaaaaaaaaaaaaaaaaaaaaaaaaaaaaaaaaaaaaaaaaaaaaa

SEQ ID NO: 13470 - RNA, 5785 nt, synthetic construct
  source 1..5785: mol_type = other RNA
aggaaataagagagaaaagaagagtaagaagaaatataagagccaccatggcccctaagaagaagcgtaaagtgagccggatggaacgcctcgtctacgaggtgcggcagaagtgcagaaacatcgaggacatctgcatctcctgcggatctctgaacgtgaccctggagcacccactgttcatcggcggcatgtgccagaactgtaaaaactgttttctggagtgtgcctatcaatacgacgatgacggctaccagagctactgcaccatctgttgcggcggaagagaggtgctgatgtgtggaaataacaactgctgccggtgcttctgcgtggaatgcgtggacctgctggtgggccccggcgccgcccaggccgctattaaggaagatccttggaactgctacatgtgcggccacaagggcacatacggcctgctgagacggagagaggactggcctagcagactgcagatgttcttcgccaataaccacgaccaggagttcgacccccctaaggtgtaccctcccgtccccgccgagaagagaaagcccatccgggtcctgagcctgttcgatggcatcgccaccggtctgctggtgctgaaggacctgggcatccaggtggataggtacattgcctccgaggtgtgcgaggactccatcaccgtgggaatggtgcgtcatcagggcaagatcatgtacgtgggcgacgtgcggagcgtgacacagaagcatatccaggagtggggccctttcgacctggtgatcggcggcagcccttgcaatgacctgagcatcgtgaacccagcccggaagggcctgtacgagggaaccggcagactgttcttcgagttttacagactgctgcacgacgcccggcctaaggaaggcgacgaccggcccttcttttggctgttcgagaatgtggtggccatgggagtcagcgacaagcgggatattagccggttcctggagagcaaccccgtgatgatcgatgccaaggaagtgagcgccgcccaccgggccagatacttctggggcaatctgcctggcatgaacagacccctggccagcaccgtgaacgacaagctggagctgcaggagtgcctggagcacggccggatcgccaagttcagcaaggtgagaaccatcaccacccgaagcaacagcatcaaacaaggcaaggaccagcactttcctgtgttcatgaacgagaaggaggacatcctgtggtgtaccgagatggagagagtgttcgggttcccagtccactacacagatgtcagcaacatgtctagactggccagacagagactgctgggaagaagctggtccgtccctgtgatcagacacctgttcgcccctctgaaggagtacttcgcctgcgtgagcagcggcaacagcaacgccaacagccggggccccagcttctctagcggcctggtgccactgtccctgagagggagccacatgggccccatggagatctacaaaaccgtgagcgcctggaagcggcagcctgtgcgcgtgctgagcctgtttcggaatatcgataaagtcctgaaaagcctgggattcctggagagcggctctggctccggcggtggcaccctgaagtacgtggaggatgtgacaaacgtggtcagacgggatgtggagaagtggggccccttcgatctggtgtacggcagcacccaacccctgggcagctcttgtgaccggtgccctggctggtacatgtttcagttccaccggatcctgcagtacgccctgccgagacaggagtcccagcggccattcttttggattttcatggacaacttgctgctgaccgaggatgaccaggaaactaccactcggttcctgcagaccgaagccgtgaccctgcaggacgtgagaggccgggactaccagaacgccatgcgggtgtggtccaacatccctggactgaaaagcaagcacgcacctctgacccctaaagaagaggagtacctgcaggcccaggtgcggagcagaagcaagctggacgcccctaaggtggatctgctggtgaagaattgcctcctgcccctgagagagtacttcaagtatttcagccagaatagtctgcccctgggaggcagcggcggcggcatgctgcccatcgtgcagctgtacccccagggcctggtgagcttcaaggacgtggccgtggacttcacccaggaggagtggcagcagctggaccccagccagaggaccctgtacagggacgtgatgctggagaactacagccacctggtgagcatgggctaccccgtgagcaagcccgacgtgatcagcaagctggagcagggcgaggagccctggatcatcaagggcgacatcagcaactggggcggcccaagcagcggcgcccctcctcccagcggcggcagcccagccggctccccaacctctaccgaggagggcacctctgagtccgccacccccgagagcggccctggcacctccaccgagcccagcgagggcagcgcacccggcagccctgccggcagccccacctccacagaggagggaaccagcaccgagcccagcgaaggcagcgccccaggcaccagcaccgagcctagtgagcaggagattaaacggatcaacaagatcagaagaagacttgtgaaagacagcaacaccaagaaggccggcaagacaggccccatgaaaaccctgctggttagagtgatgacacccgatctgagagagcggctggaaaacctgagaaagaagcctgaaaatatcccccagcccatcagcaatacatctagagccaacctgaataagctgctgaccgattacaccgaaatgaagaaggcgatcctgcatgtgtactgggaagagttccagaaggaccctgtgggcctgatgagccgggtggcccagcctgccagcaagaagatcgatcagaacaagctgaaacctgagatggacgagaagggcaacctgaccaccgccggctttgcctgctctcagtgtggccagcccctgttcgtgtacaagctggagcaggtgtctgagaagggcaaggcttacaccaactacttcggacggtgcaatgtggccgagcacgaaaagctgatcctgctggcccagctgaagcccgagaaggatagcgacgaagccgtgacatatagcctgggaaagtttgggcagagggccctggatttctacagcattcatgtgaccaaggagtccacccaccccgtgaagcccctggcccagatcgccggaaacagatacgcctccggacctgtgggaaaggccctgagcgacgcatgtatgggcacaatcgcctccttcctgtctaagtaccaggacatcatcatcgaacaccagaaggtggtgaagggcaaccagaagagactggagagcctgcgggagctggccggcaaggaaaacctggaataccctagcgtgaccctgccacctcagcctcacaccaaggagggcgttgatgcctacaacgaagtgatcgcccgggtgcgaatgtgggtgaacctgaacctgtggcagaagctgaagctaagcagagatgatgccaagcctctgctgagactgaagggattcccttcctttcctctggtcgagagacaggccaacgaagtggactggtgggacatggtgtgtaacgtgaagaagctgatcaacgagaaaaaggaggatggcaaggtgttttggcagaatctggctggctacaagagacaggaagccctgagaccatacctgagcagcgaggaagatcggaagaagggaaagaaattcgctcggtaccagctgggcgacctgctgctgcacctggaaaagaagcacggcgaggactggggaaaggtgtacgacgaggcctgggagcggattgacaagaaagtggaaggcctgagcaagcacatcaagctggaagaggaacggagaagcgaggacgcccagagcaaggccgccctgaccgactggctgcgggctaaggccagcttcgtgatcgagggcctgaaggaggccgacaaggacgagttctgcagatgcgagctgaagctgcagaagtggtacggggacctgcggggaaagcccttcgccatcgaagccgagaacagcatcctggacatcagcggcttcagcaagcagtacaactgtgccttcatctggcagaaggacggcgtgaagaagctgaacctgtacctgatcatcaactacttcaagggcggcaagctgcggttcaagaagatcaaacctgaagccttcgaagccaacagattctacaccgtgatcaacaaaaagagcggcgagatcgtgcccatggaggtgaacttcaacttcgacgaccccaacctgatcatcctgcctctggcctttggcaagagacagggcagagaattcatctggaacgacctgctgtccctggaaaccggcagcctgaagctggccaacggaagagtgatcgagaagacactgtacaacagaagaacccggcaggatgagcctgccctgttcgtggccctgaccttcgagcggcgggaggtcctggactcctccaatatcaaaccaatgaacctgatcggcgtggcaagaggcgaaaacatccccgccgtgatcgccctgaccgaccccgagggctgcccactgagccggtttaaggatagcctgggaaacccaacccacatcctgagaatcggcgagagctataaggagaagcagcggaccatccaggccaagaaggaggtggagcagcggagagccggcggctacagccggaagtacgccagcaaagccaagaatctggcagacgatatggtgagaaacaccgctagagatctgctgtactacgccgtgacccaggatgccatgctgatcttcgccaacctgagccggggcttcggccggcagggcaagcggaccttcatggccgagagacagtacacacggatggaggactggctgaccgccaagctggcctacgagggcctgagcaagacctacctgtccaagacactggcccagtacacctccaagacatgcagcaactgtgggtttaccatcaccagcgccgactacgacagggtgctggagaagctgaagaagacagcaacaggctggatgaccacaattaacggcaaggagctgaaggtggagggccagattacctactacaacagatacaagagacagaacgtagtcaaggacctgtccgtcgagctggatagactgagcgaagaatctgtgaacaacgacatctcctcctggacaaagggcagaagcggagaagctctgagcctcctgaagaaaagattctcccatagacccgtgcaggagaagttcgtgtgcctgaactgcggcttcgagacacacgcagccgagcaagccgccctgaacatcgccagatcctggctgttcctgcggagccaggagtacaagaaataccagacaaacaagacaaccggcaacaccgataagagagccttcgtcgagacctggcagtccttttaccggaagaagcttaaggaggtgtggaaacctgccgtgcggtctggcggatctggcggaggctccaccagccccaagaaaaagagaaaagtctaagctgccttctgcggggcttgccttctggccatgcccttcttctctcccttgcacctgtacctcttggtctttgaataaagcctgagtaggaaggctagcaaaaaaaaaaaaaaaaaaaaaaaaaaaaaaaaaaaaaaaaaaaaaaaaaaaaaaaaaaaaaaaaaaaaaaaaaaaaaaaa

SEQ ID NO: 13471 - RNA, 5785 nt, synthetic construct
  source 1..5785: mol_type = other RNA
aggaaataagagagaaaagaagagtaagaagaaatataagagccaccatggcccctaagaagaagcgtaaagtgagccggatggaacgcctcgtctacgaggtgcggcagaagtgcagaaacatcgaggacatctgcatctcctgcggatctctgaacgtgaccctggagcacccactgttcatcggcggcatgtgccagaactgtaaaaactgttttctggagtgtgcctatcaatacgacgatgacggctaccagagctactgcaccatctgttgcggcggaagagaggtgctgatgtgtggaaataacaactgctgccggtgcttctgcgtggaatgcgtggacctgctggtgggccccggcgccgcccaggccgctattaaggaagatccttggaactgctacatgtgcggccacaagggcacatacggcctgctgagacggagagaggactggcctagcagactgcagatgttcttcgccaataaccacgaccaggagttcgacccccctaaggtgtaccctcccgtccccgccgagaagagaaagcccatccgggtcctgagcctgttcgatggcatcgccaccggtctgctggtgctgaaggacctgggcatccaggtggataggtacattgcctccgaggtgtgcgaggactccatcaccgtgggaatggtgcgtcatcagggcaagatcatgtacgtgggcgacgtgcggagcgtgacacagaagcatatccaggagtggggccctttcgacctggtgatcggcggcagcccttgcaatgacctgagcatcgtgaacccagcccggaagggcctgtacgagggaaccggcagactgttcttcgagttttacagactgctgcacgacgcccggcctaaggaaggcgacgaccggcccttcttttggctgttcgagaatgtggtggccatgggagtcagcgacaagcgggatattagccggttcctggagagcaaccccgtgatgatcgatgccaaggaagtgagcgccgcccaccgggccagatacttctggggcaatctgcctggcatgaacagacccctggccagcaccgtgaacgacaagctggagctgcaggagtgcctggagcacggccggatcgccaagttcagcaaggtgagaaccatcaccacccgaagcaacagcatcaaacaaggcaaggaccagcactttcctgtgttcatgaacgagaaggaggacatcctgtggtgtaccgagatggagagagtgttcgggttcccagtccactacacagatgtcagcaacatgtctagactggccagacagagactgctgggaagaagctggtccgtccctgtgatcagacacctgttcgcccctctgaaggagtacttcgcctgcgtgagcagcggcaacagcaacgccaacagccggggccccagcttctctagcggcctggtgccactgtccctgagagggagccacatgggccccatggagatctacaaaaccgtgagcgcctggaagcggcagcctgtgcgcgtgctgagcctgtttcggaatatcgataaagtcctgaaaagcctgggattcctggagagcggctctggctccggcggtggcaccctgaagtacgtggaggatgtgacaaacgtggtcagacgggatgtggagaagtggggccccttcgatctggtgtacggcagcacccaacccctgggcagctcttgtgaccggtgccctggctggtacatgtttcagttccaccggatcctgcagtacgccctgccgagacaggagtcccagcggccattcttttggattttcatggacaacttgctgctgaccgaggatgaccaggaaactaccactcggttcctgcagaccgaagccgtgaccctgcaggacgtgagaggccgggactaccagaacgccatgcgggtgtggtccaacatccctggactgaaaagcaagcacgcacctctgacccctaaagaagaggagtacctgcaggcccaggtgcggagcagaagcaagctggacgcccctaaggtggatctgctggtgaagaattgcctcctgcccctgagagagtacttcaagtatttcagccagaatagtctgcccctgggaggcagcggcggcggccccgagaacggcgtgaccttcgaggacatcgccctgtacttcagctgggaggagtggaagctgctggacgaggcccagaggaggctgtaccacgacgtgatgctggagaacttcgccctgatcagcagcctgggcgtgtggagcggcgaggagaacgtggaggccagcttcgagcagagcgtgagcgtggtgatgagccaggtgaggaccagcaaggagcccagcagcagccagaagacccacggcggcccaagcagcggcgcccctcctcccagcggcggcagcccagccggctccccaacctctaccgaggagggcacctctgagtccgccacccccgagagcggccctggcacctccaccgagcccagcgagggcagcgcacccggcagccctgccggcagccccacctccacagaggagggaaccagcaccgagcccagcgaaggcagcgccccaggcaccagcaccgagcctagtgagcaggagattaaacggatcaacaagatcagaagaagacttgtgaaagacagcaacaccaagaaggccggcaagacaggccccatgaaaaccctgctggttagagtgatgacacccgatctgagagagcggctggaaaacctgagaaagaagcctgaaaatatcccccagcccatcagcaatacatctagagccaacctgaataagctgctgaccgattacaccgaaatgaagaaggcgatcctgcatgtgtactgggaagagttccagaaggaccctgtgggcctgatgagccgggtggcccagcctgccagcaagaagatcgatcagaacaagctgaaacctgagatggacgagaagggcaacctgaccaccgccggctttgcctgctctcagtgtggccagcccctgttcgtgtacaagctggagcaggtgtctgagaagggcaaggcttacaccaactacttcggacggtgcaatgtggccgagcacgaaaagctgatcctgctggcccagctgaagcccgagaaggatagcgacgaagccgtgacatatagcctgggaaagtttgggcagagggccctggatttctacagcattcatgtgaccaaggagtccacccaccccgtgaagcccctggcccagatcgccggaaacagatacgcctccggacctgtgggaaaggccctgagcgacgcatgtatgggcacaatcgcctccttcctgtctaagtaccaggacatcatcatcgaacaccagaaggtggtgaagggcaaccagaagagactggagagcctgcgggagctggccggcaaggaaaacctggaataccctagcgtgaccctgccacctcagcctcacaccaaggagggcgttgatgcctacaacgaagtgatcgcccgggtgcgaatgtgggtgaacctgaacctgtggcagaagctgaagctaagcagagatgatgccaagcctctgctgagactgaagggattcccttcctttcctctggtcgagagacaggccaacgaagtggactggtgggacatggtgtgtaacgtgaagaagctgatcaacgagaaaaaggaggatggcaaggtgttttggcagaatctggctggctacaagagacaggaagccctgagaccatacctgagcagcgaggaagatcggaagaagggaaagaaattcgctcggtaccagctgggcgacctgctgctgcacctggaaaagaagcacggcgaggactggggaaaggtgtacgacgaggcctgggagcggattgacaagaaagtggaaggcctgagcaagcacatcaagctggaagaggaacggagaagcgaggacgcccagagcaaggccgccctgaccgactggctgcgggctaaggccagcttcgtgatcgagggcctgaaggaggccgacaaggacgagttctgcagatgcgagctgaagctgcagaagtggtacggggacctgcggggaaagcccttcgccatcgaagccgagaacagcatcctggacatcagcggcttcagcaagcagtacaactgtgccttcatctggcagaaggacggcgtgaagaagctgaacctgtacctgatcatcaactacttcaagggcggcaagctgcggttcaagaagatcaaacctgaagccttcgaagccaacagattctacaccgtgatcaacaaaaagagcggcgagatcgtgcccatggaggtgaacttcaacttcgacgaccccaacctgatcatcctgcctctggcctttggcaagagacagggcagagaattcatctggaacgacctgctgtccctggaaaccggcagcctgaagctggccaacggaagagtgatcgagaagacactgtacaacagaagaacccggcaggatgagcctgccctgttcgtggccctgaccttcgagcggcgggaggtcctggactcctccaatatcaaaccaatgaacctgatcggcgtggcaagaggcgaaaacatccccgccgtgatcgccctgaccgaccccgagggctgcccactgagccggtttaaggatagcctgggaaacccaacccacatcctgagaatcggcgagagctataaggagaagcagcggaccatccaggccaagaaggaggtggagcagcggagagccggcggctacagccggaagtacgccagcaaagccaagaatctggcagacgatatggtgagaaacaccgctagagatctgctgtactacgccgtgacccaggatgccatgctgatcttcgccaacctgagccggggcttcggccggcagggcaagcggaccttcatggccgagagacagtacacacggatggaggactggctgaccgccaagctggcctacgagggcctgagcaagacctacctgtccaagacactggcccagtacacctccaagacatgcagcaactgtgggtttaccatcaccagcgccgactacgacagggtgctggagaagctgaagaagacagcaacaggctggatgaccacaattaacggcaaggagctgaaggtggagggccagattacctactacaacagatacaagagacagaacgtagtcaaggacctgtccgtcgagctggatagactgagcgaagaatctgtgaacaacgacatctcctcctggacaaagggcagaagcggagaagctctgagcctcctgaagaaaagattctcccatagacccgtgcaggagaagttcgtgtgcctgaactgcggcttcgagacacacgcagccgagcaagccgccctgaacatcgccagatcctggctgttcctgcggagccaggagtacaagaaataccagacaaacaagacaaccggcaacaccgataagagagccttcgtcgagacctggcagtccttttaccggaagaagcttaaggaggtgtggaaacctgccgtgcggtctggcggatctggcggaggctccaccagccccaagaaaaagagaaaagtctaagctgccttctgcggggcttgccttctggccatgcccttcttctctcccttgcacctgtacctcttggtctttgaataaagcctgagtaggaaggctagcaaaaaaaaaaaaaaaaaaaaaaaaaaaaaaaaaaaaaaaaaaaaaaaaaaaaaaaaaaaaaaaaaaaaaaaaaaaaaaaa

SEQ ID NO: 13472 - RNA, 5785 nt, synthetic construct
  source 1..5785: mol_type = other RNA
aggaaataagagagaaaagaagagtaagaagaaatataagagccaccatggcccctaagaagaagcgtaaagtgagccggatggaacgcctcgtctacgaggtgcggcagaagtgcagaaacatcgaggacatctgcatctcctgcggatctctgaacgtgaccctggagcacccactgttcatcggcggcatgtgccagaactgtaaaaactgttttctggagtgtgcctatcaatacgacgatgacggctaccagagctactgcaccatctgttgcggcggaagagaggtgctgatgtgtggaaataacaactgctgccggtgcttctgcgtggaatgcgtggacctgctggtgggccccggcgccgcccaggccgctattaaggaagatccttggaactgctacatgtgcggccacaagggcacatacggcctgctgagacggagagaggactggcctagcagactgcagatgttcttcgccaataaccacgaccaggagttcgacccccctaaggtgtaccctcccgtccccgccgagaagagaaagcccatccgggtcctgagcctgttcgatggcatcgccaccggtctgctggtgctgaaggacctgggcatccaggtggataggtacattgcctccgaggtgtgcgaggactccatcaccgtgggaatggtgcgtcatcagggcaagatcatgtacgtgggcgacgtgcggagcgtgacacagaagcatatccaggagtggggccctttcgacctggtgatcggcggcagcccttgcaatgacctgagcatcgtgaacccagcccggaagggcctgtacgagggaaccggcagactgttcttcgagttttacagactgctgcacgacgcccggcctaaggaaggcgacgaccggcccttcttttggctgttcgagaatgtggtggccatgggagtcagcgacaagcgggatattagccggttcctggagagcaaccccgtgatgatcgatgccaaggaagtgagcgccgcccaccgggccagatacttctggggcaatctgcctggcatgaacagacccctggccagcaccgtgaacgacaagctggagctgcaggagtgcctggagcacggccggatcgccaagttcagcaaggtgagaaccatcaccacccgaagcaacagcatcaaacaaggcaaggaccagcactttcctgtgttcatgaacgagaaggaggacatcctgtggtgtaccgagatggagagagtgttcgggttcccagtccactacacagatgtcagcaacatgtctagactggccagacagagactgctgggaagaagctggtccgtccctgtgatcagacacctgttcgcccctctgaaggagtacttcgcctgcgtgagcagcggcaacagcaacgccaacagccggggccccagcttctctagcggcctggtgccactgtccctgagagggagccacatgggccccatggagatctacaaaaccgtgagcgcctggaagcggcagcctgtgcgcgtgctgagcctgtttcggaatatcgataaagtcctgaaaagcctgggattcctggagagcggctctggctccggcggtggcaccctgaagtacgtggaggatgtgacaaacgtggtcagacgggatgtggagaagtggggccccttcgatctggtgtacggcagcacccaacccctgggcagctcttgtgaccggtgccctggctggtacatgtttcagttccaccggatcctgcagtacgccctgccgagacaggagtcccagcggccattcttttggattttcatggacaacttgctgctgaccgaggatgaccaggaaactaccactcggttcctgcagaccgaagccgtgaccctgcaggacgtgagaggccgggactaccagaacgccatgcgggtgtggtccaacatccctggactgaaaagcaagcacgcacctctgacccctaaagaagaggagtacctgcaggcccaggtgcggagcagaagcaagctggacgcccctaaggtggatctgctggtgaagaattgcctcctgcccctgagagagtacttcaagtatttcagccagaatagtctgcccctgggaggcagcggcggcggcatgcccgtgaccttcgaggaggtggccgtgtacttcaccgagggccagggcgccctgctggaccccgcccagagggccctgtacagggacgtgatgcaggagatctacgagatggtgatcagcctgggcttcctgctgcccaagcccgacgtgatcatccagctggagaggggcgaggagccctgggtgcccgacctgcagggcagcgccgagagggagatgagcaggggcacctgcgccggcggcggcccaagcagcggcgcccctcctcccagcggcggcagcccagccggctccccaacctctaccgaggagggcacctctgagtccgccacccccgagagcggccctggcacctccaccgagcccagcgagggcagcgcacccggcagccctgccggcagccccacctccacagaggagggaaccagcaccgagcccagcgaaggcagcgccccaggcaccagcaccgagcctagtgagcaggagattaaacggatcaacaagatcagaagaagacttgtgaaagacagcaacaccaagaaggccggcaagacaggccccatgaaaaccctgctggttagagtgatgacacccgatctgagagagcggctggaaaacctgagaaagaagcctgaaaatatcccccagcccatcagcaatacatctagagccaacctgaataagctgctgaccgattacaccgaaatgaagaaggcgatcctgcatgtgtactgggaagagttccagaaggaccctgtgggcctgatgagccgggtggcccagcctgccagcaagaagatcgatcagaacaagctgaaacctgagatggacgagaagggcaacctgaccaccgccggctttgcctgctctcagtgtggccagcccctgttcgtgtacaagctggagcaggtgtctgagaagggcaaggcttacaccaactacttcggacggtgcaatgtggccgagcacgaaaagctgatcctgctggcccagctgaagcccgagaaggatagcgacgaagccgtgacatatagcctgggaaagtttgggcagagggccctggatttctacagcattcatgtgaccaaggagtccacccaccccgtgaagcccctggcccagatcgccggaaacagatacgcctccggacctgtgggaaaggccctgagcgacgcatgtatgggcacaatcgcctccttcctgtctaagtaccaggacatcatcatcgaacaccagaaggtggtgaagggcaaccagaagagactggagagcctgcgggagctggccggcaaggaaaacctggaataccctagcgtgaccctgccacctcagcctcacaccaaggagggcgttgatgcctacaacgaagtgatcgcccgggtgcgaatgtgggtgaacctgaacctgtggcagaagctgaagctaagcagagatgatgccaagcctctgctgagactgaagggattcccttcctttcctctggtcgagagacaggccaacgaagtggactggtgggacatggtgtgtaacgtgaagaagctgatcaacgagaaaaaggaggatggcaaggtgttttggcagaatctggctggctacaagagacaggaagccctgagaccatacctgagcagcgaggaagatcggaagaagggaaagaaattcgctcggtaccagctgggcgacctgctgctgcacctggaaaagaagcacggcgaggactggggaaaggtgtacgacgaggcctgggagcggattgacaagaaagtggaaggcctgagcaagcacatcaagctggaagaggaacggagaagcgaggacgcccagagcaaggccgccctgaccgactggctgcgggctaaggccagcttcgtgatcgagggcctgaaggaggccgacaaggacgagttctgcagatgcgagctgaagctgcagaagtggtacggggacctgcggggaaagcccttcgccatcgaagccgagaacagcatcctggacatcagcggcttcagcaagcagtacaactgtgccttcatctggcagaaggacggcgtgaagaagctgaacctgtacctgatcatcaactacttcaagggcggcaagctgcggttcaagaagatcaaacctgaagccttcgaagccaacagattctacaccgtgatcaacaaaaagagcggcgagatcgtgcccatggaggtgaacttcaacttcgacgaccccaacctgatcatcctgcctctggcctttggcaagagacagggcagagaattcatctggaacgacctgctgtccctggaaaccggcagcctgaagctggccaacggaagagtgatcgagaagacactgtacaacagaagaacccggcaggatgagcctgccctgttcgtggccctgaccttcgagcggcgggaggtcctggactcctccaatatcaaaccaatgaacctgatcggcgtggcaagaggcgaaaacatccccgccgtgatcgccctgaccgaccccgagggctgcccactgagccggtttaaggatagcctgggaaacccaacccacatcctgagaatcggcgagagctataaggagaagcagcggaccatccaggccaagaaggaggtggagcagcggagagccggcggctacagccggaagtacgccagcaaagccaagaatctggcagacgatatggtgagaaacaccgctagagatctgctgtactacgccgtgacccaggatgccatgctgatcttcgccaacctgagccggggcttcggccggcagggcaagcggaccttcatggccgagagacagtacacacggatggaggactggctgaccgccaagctggcctacgagggcctgagcaagacctacctgtccaagacactggcccagtacacctccaagacatgcagcaactgtgggtttaccatcaccagcgccgactacgacagggtgctggagaagctgaagaagacagcaacaggctggatgaccacaattaacggcaaggagctgaaggtggagggccagattacctactacaacagatacaagagacagaacgtagtcaaggacctgtccgtcgagctggatagactgagcgaagaatctgtgaacaacgacatctcctcctggacaaagggcagaagcggagaagctctgagcctcctgaagaaaagattctcccatagacccgtgcaggagaagttcgtgtgcctgaactgcggcttcgagacacacgcagccgagcaagccgccctgaacatcgccagatcctggctgttcctgcggagccaggagtacaagaaataccagacaaacaagacaaccggcaacaccgataagagagccttcgtcgagacctggcagtccttttaccggaagaagcttaaggaggtgtggaaacctgccgtgcggtctggcggatctggcggaggctccaccagccccaagaaaaagagaaaagtctaagctgccttctgcggggcttgccttctggccatgcccttcttctctcccttgcacctgtacctcttggtctttgaataaagcctgagtaggaaggctagcaaaaaaaaaaaaaaaaaaaaaaaaaaaaaaaaaaaaaaaaaaaaaaaaaaaaaaaaaaaaaaaaaaaaaaaaaaaaaaaa

SEQ ID NO: 13473 - RNA, 5782 nt, synthetic construct
  source 1..5782: mol_type = other RNA
aggaaataagagagaaaagaagagtaagaagaaatataagagccaccatggcccctaagaagaagcgtaaagtgagccggatggaacgcctcgtctacgaggtgcggcagaagtgcagaaacatcgaggacatctgcatctcctgcggatctctgaacgtgaccctggagcacccactgttcatcggcggcatgtgccagaactgtaaaaactgttttctggagtgtgcctatcaatacgacgatgacggctaccagagctactgcaccatctgttgcggcggaagagaggtgctgatgtgtggaaataacaactgctgccggtgcttctgcgtggaatgcgtggacctgctggtgggccccggcgccgcccaggccgctattaaggaagatccttggaactgctacatgtgcggccacaagggcacatacggcctgctgagacggagagaggactggcctagcagactgcagatgttcttcgccaataaccacgaccaggagttcgacccccctaaggtgtaccctcccgtccccgccgagaagagaaagcccatccgggtcctgagcctgttcgatggcatcgccaccggtctgctggtgctgaaggacctgggcatccaggtggataggtacattgcctccgaggtgtgcgaggactccatcaccgtgggaatggtgcgtcatcagggcaagatcatgtacgtgggcgacgtgcggagcgtgacacagaagcatatccaggagtggggccctttcgacctggtgatcggcggcagcccttgcaatgacctgagcatcgtgaacccagcccggaagggcctgtacgagggaaccggcagactgttcttcgagttttacagactgctgcacgacgcccggcctaaggaaggcgacgaccggcccttcttttggctgttcgagaatgtggtggccatgggagtcagcgacaagcgggatattagccggttcctggagagcaaccccgtgatgatcgatgccaaggaagtgagcgccgcccaccgggccagatacttctggggcaatctgcctggcatgaacagacccctggccagcaccgtgaacgacaagctggagctgcaggagtgcctggagcacggccggatcgccaagttcagcaaggtgagaaccatcaccacccgaagcaacagcatcaaacaaggcaaggaccagcactttcctgtgttcatgaacgagaaggaggacatcctgtggtgtaccgagatggagagagtgttcgggttcccagtccactacacagatgtcagcaacatgtctagactggccagacagagactgctgggaagaagctggtccgtccctgtgatcagacacctgttcgcccctctgaaggagtacttcgcctgcgtgagcagcggcaacagcaacgccaacagccggggccccagcttctctagcggcctggtgccactgtccctgagagggagccacatgggccccatggagatctacaaaaccgtgagcgcctggaagcggcagcctgtgcgcgtgctgagcctgtttcggaatatcgataaagtcctgaaaagcctgggattcctggagagcggctctggctccggcggtggcaccctgaagtacgtggaggatgtgacaaacgtggtcagacgggatgtggagaagtggggccccttcgatctggtgtacggcagcacccaacccctgggcagctcttgtgaccggtgccctggctggtacatgtttcagttccaccggatcctgcagtacgccctgccgagacaggagtcccagcggccattcttttggattttcatggacaacttgctgctgaccgaggatgaccaggaaactaccactcggttcctgcagaccgaagccgtgaccctgcaggacgtgagaggccgggactaccagaacgccatgcgggtgtggtccaacatccctggactgaaaagcaagcacgcacctctgacccctaaagaagaggagtacctgcaggcccaggtgcggagcagaagcaagctggacgcccctaaggtggatctgctggtgaagaattgcctcctgcccctgagagagtacttcaagtatttcagccagaatagtctgcccctgggaggcagcggcggcggcgaggagacccagggcgagctgaccagcagctgcggcagcaagaccatggccaacgtgagcctggccttcagagacgtgagcatcgacctgagccaggaggagtgggagtgcctggacgccgtgcagagagacctgtacaaggacgtgatgctggagaactacagcaacctggtgagcctgggctacaccatccccaagcccgacgtgatcaccctgctggagcaggagaaggagccctggggcggcccaagcagcggcgcccctcctcccagcggcggcagcccagccggctccccaacctctaccgaggagggcacctctgagtccgccacccccgagagcggccctggcacctccaccgagcccagcgagggcagcgcacccggcagccctgccggcagccccacctccacagaggagggaaccagcaccgagcccagcgaaggcagcgccccaggcaccagcaccgagcctagtgagcaggagattaaacggatcaacaagatcagaagaagacttgtgaaagacagcaacaccaagaaggccggcaagacaggccccatgaaaaccctgctggttagagtgatgacacccgatctgagagagcggctggaaaacctgagaaagaagcctgaaaatatcccccagcccatcagcaatacatctagagccaacctgaataagctgctgaccgattacaccgaaatgaagaaggcgatcctgcatgtgtactgggaagagttccagaaggaccctgtgggcctgatgagccgggtggcccagcctgccagcaagaagatcgatcagaacaagctgaaacctgagatggacgagaagggcaacctgaccaccgccggctttgcctgctctcagtgtggccagcccctgttcgtgtacaagctggagcaggtgtctgagaagggcaaggcttacaccaactacttcggacggtgcaatgtggccgagcacgaaaagctgatcctgctggcccagctgaagcccgagaaggatagcgacgaagccgtgacatatagcctgggaaagtttgggcagagggccctggatttctacagcattcatgtgaccaaggagtccacccaccccgtgaagcccctggcccagatcgccggaaacagatacgcctccggacctgtgggaaaggccctgagcgacgcatgtatgggcacaatcgcctccttcctgtctaagtaccaggacatcatcatcgaacaccagaaggtggtgaagggcaaccagaagagactggagagcctgcgggagctggccggcaaggaaaacctggaataccctagcgtgaccctgccacctcagcctcacaccaaggagggcgttgatgcctacaacgaagtgatcgcccgggtgcgaatgtgggtgaacctgaacctgtggcagaagctgaagctaagcagagatgatgccaagcctctgctgagactgaagggattcccttcctttcctctggtcgagagacaggccaacgaagtggactggtgggacatggtgtgtaacgtgaagaagctgatcaacgagaaaaaggaggatggcaaggtgttttggcagaatctggctggctacaagagacaggaagccctgagaccatacctgagcagcgaggaagatcggaagaagggaaagaaattcgctcggtaccagctgggcgacctgctgctgcacctggaaaagaagcacggcgaggactggggaaaggtgtacgacgaggcctgggagcggattgacaagaaagtggaaggcctgagcaagcacatcaagctggaagaggaacggagaagcgaggacgcccagagcaaggccgccctgaccgactggctgcgggctaaggccagcttcgtgatcgagggcctgaaggaggccgacaaggacgagttctgcagatgcgagctgaagctgcagaagtggtacggggacctgcggggaaagcccttcgccatcgaagccgagaacagcatcctggacatcagcggcttcagcaagcagtacaactgtgccttcatctggcagaaggacggcgtgaagaagctgaacctgtacctgatcatcaactacttcaagggcggcaagctgcggttcaagaagatcaaacctgaagccttcgaagccaacagattctacaccgtgatcaacaaaaagagcggcgagatcgtgcccatggaggtgaacttcaacttcgacgaccccaacctgatcatcctgcctctggcctttggcaagagacagggcagagaattcatctggaacgacctgctgtccctggaaaccggcagcctgaagctggccaacggaagagtgatcgagaagacactgtacaacagaagaacccggcaggatgagcctgccctgttcgtggccctgaccttcgagcggcgggaggtcctggactcctccaatatcaaaccaatgaacctgatcggcgtggcaagaggcgaaaacatccccgccgtgatcgccctgaccgaccccgagggctgcccactgagccggtttaaggatagcctgggaaacccaacccacatcctgagaatcggcgagagctataaggagaagcagcggaccatccaggccaagaaggaggtggagcagcggagagccggcggctacagccggaagtacgccagcaaagccaagaatctggcagacgatatggtgagaaacaccgctagagatctgctgtactacgccgtgacccaggatgccatgctgatcttcgccaacctgagccggggcttcggccggcagggcaagcggaccttcatggccgagagacagtacacacggatggaggactggctgaccgccaagctggcctacgagggcctgagcaagacctacctgtccaagacactggcccagtacacctccaagacatgcagcaactgtgggtttaccatcaccagcgccgactacgacagggtgctggagaagctgaagaagacagcaacaggctggatgaccacaattaacggcaaggagctgaaggtggagggccagattacctactacaacagatacaagagacagaacgtagtcaaggacctgtccgtcgagctggatagactgagcgaagaatctgtgaacaacgacatctcctcctggacaaagggcagaagcggagaagctctgagcctcctgaagaaaagattctcccatagacccgtgcaggagaagttcgtgtgcctgaactgcggcttcgagacacacgcagccgagcaagccgccctgaacatcgccagatcctggctgttcctgcggagccaggagtacaagaaataccagacaaacaagacaaccggcaacaccgataagagagccttcgtcgagacctggcagtccttttaccggaagaagcttaaggaggtgtggaaacctgccgtgcggtctggcggatctggcggaggctccaccagccccaagaaaaagagaaaagtctaagctgccttctgcggggcttgccttctggccatgcccttcttctctcccttgcacctgtacctcttggtctttgaataaagcctgagtaggaaggctagcaaaaaaaaaaaaaaaaaaaaaaaaaaaaaaaaaaaaaaaaaaaaaaaaaaaaaaaaaaaaaaaaaaaaaaaaaaaaaaaa

SEQ ID NO: 13474 - RNA, 5785 nt, synthetic construct
  source 1..5785: mol_type = other RNA
aggaaataagagagaaaagaagagtaagaagaaatataagagccaccatggcccctaagaagaagcgtaaagtgagccggatggaacgcctcgtctacgaggtgcggcagaagtgcagaaacatcgaggacatctgcatctcctgcggatctctgaacgtgaccctggagcacccactgttcatcggcggcatgtgccagaactgtaaaaactgttttctggagtgtgcctatcaatacgacgatgacggctaccagagctactgcaccatctgttgcggcggaagagaggtgctgatgtgtggaaataacaactgctgccggtgcttctgcgtggaatgcgtggacctgctggtgggccccggcgccgcccaggccgctattaaggaagatccttggaactgctacatgtgcggccacaagggcacatacggcctgctgagacggagagaggactggcctagcagactgcagatgttcttcgccaataaccacgaccaggagttcgacccccctaaggtgtaccctcccgtccccgccgagaagagaaagcccatccgggtcctgagcctgttcgatggcatcgccaccggtctgctggtgctgaaggacctgggcatccaggtggataggtacattgcctccgaggtgtgcgaggactccatcaccgtgggaatggtgcgtcatcagggcaagatcatgtacgtgggcgacgtgcggagcgtgacacagaagcatatccaggagtggggccctttcgacctggtgatcggcggcagcccttgcaatgacctgagcatcgtgaacccagcccggaagggcctgtacgagggaaccggcagactgttcttcgagttttacagactgctgcacgacgcccggcctaaggaaggcgacgaccggcccttcttttggctgttcgagaatgtggtggccatgggagtcagcgacaagcgggatattagccggttcctggagagcaaccccgtgatgatcgatgccaaggaagtgagcgccgcccaccgggccagatacttctggggcaatctgcctggcatgaacagacccctggccagcaccgtgaacgacaagctggagctgcaggagtgcctggagcacggccggatcgccaagttcagcaaggtgagaaccatcaccacccgaagcaacagcatcaaacaaggcaaggaccagcactttcctgtgttcatgaacgagaaggaggacatcctgtggtgtaccgagatggagagagtgttcgggttcccagtccactacacagatgtcagcaacatgtctagactggccagacagagactgctgggaagaagctggtccgtccctgtgatcagacacctgttcgcccctctgaaggagtacttcgcctgcgtgagcagcggcaacagcaacgccaacagccggggccccagcttctctagcggcctggtgccactgtccctgagagggagccacatgggccccatggagatctacaaaaccgtgagcgcctggaagcggcagcctgtgcgcgtgctgagcctgtttcggaatatcgataaagtcctgaaaagcctgggattcctggagagcggctctggctccggcggtggcaccctgaagtacgtggaggatgtgacaaacgtggtcagacgggatgtggagaagtggggccccttcgatctggtgtacggcagcacccaacccctgggcagctcttgtgaccggtgccctggctggtacatgtttcagttccaccggatcctgcagtacgccctgccgagacaggagtcccagcggccattcttttggattttcatggacaacttgctgctgaccgaggatgaccaggaaactaccactcggttcctgcagaccgaagccgtgaccctgcaggacgtgagaggccgggactaccagaacgccatgcgggtgtggtccaacatccctggactgaaaagcaagcacgcacctctgacccctaaagaagaggagtacctgcaggcccaggtgcggagcagaagcaagctggacgcccctaaggtggatctgctggtgaagaattgcctcctgcccctgagagagtacttcaagtatttcagccagaatagtctgcccctgggaggcagcggcggcggcatgggcccccagggcgccaggaggcaggccttcctggccttcggcgacgtgaccgtggacttcacccagaaggagtggaggctgctgagccccgcccagagggccctgtacagggaggtgaccctggagaactacagccacctggtgagcctgggcatcctgcacagcaagcccgagctgatcaggaggctggagcagggcgaggccccctggggcgaggagaggaggaggaggcccggccccggcggcccaagcagcggcgcccctcctcccagcggcggcagcccagccggctccccaacctctaccgaggagggcacctctgagtccgccacccccgagagcggccctggcacctccaccgagcccagcgagggcagcgcacccggcagccctgccggcagccccacctccacagaggagggaaccagcaccgagcccagcgaaggcagcgccccaggcaccagcaccgagcctagtgagcaggagattaaacggatcaacaagatcagaagaagacttgtgaaagacagcaacaccaagaaggccggcaagacaggccccatgaaaaccctgctggttagagtgatgacacccgatctgagagagcggctggaaaacctgagaaagaagcctgaaaatatcccccagcccatcagcaatacatctagagccaacctgaataagctgctgaccgattacaccgaaatgaagaaggcgatcctgcatgtgtactgggaagagttccagaaggaccctgtgggcctgatgagccgggtggcccagcctgccagcaagaagatcgatcagaacaagctgaaacctgagatggacgagaagggcaacctgaccaccgccggctttgcctgctctcagtgtggccagcccctgttcgtgtacaagctggagcaggtgtctgagaagggcaaggcttacaccaactacttcggacggtgcaatgtggccgagcacgaaaagctgatcctgctggcccagctgaagcccgagaaggatagcgacgaagccgtgacatatagcctgggaaagtttgggcagagggccctggatttctacagcattcatgtgaccaaggagtccacccaccccgtgaagcccctggcccagatcgccggaaacagatacgcctccggacctgtgggaaaggccctgagcgacgcatgtatgggcacaatcgcctccttcctgtctaagtaccaggacatcatcatcgaacaccagaaggtggtgaagggcaaccagaagagactggagagcctgcgggagctggccggcaaggaaaacctggaataccctagcgtgaccctgccacctcagcctcacaccaaggagggcgttgatgcctacaacgaagtgatcgcccgggtgcgaatgtgggtgaacctgaacctgtggcagaagctgaagctaagcagagatgatgccaagcctctgctgagactgaagggattcccttcctttcctctggtcgagagacaggccaacgaagtggactggtgggacatggtgtgtaacgtgaagaagctgatcaacgagaaaaaggaggatggcaaggtgttttggcagaatctggctggctacaagagacaggaagccctgagaccatacctgagcagcgaggaagatcggaagaagggaaagaaattcgctcggtaccagctgggcgacctgctgctgcacctggaaaagaagcacggcgaggactggggaaaggtgtacgacgaggcctgggagcggattgacaagaaagtggaaggcctgagcaagcacatcaagctggaagaggaacggagaagcgaggacgcccagagcaaggccgccctgaccgactggctgcgggctaaggccagcttcgtgatcgagggcctgaaggaggccgacaaggacgagttctgcagatgcgagctgaagctgcagaagtggtacggggacctgcggggaaagcccttcgccatcgaagccgagaacagcatcctggacatcagcggcttcagcaagcagtacaactgtgccttcatctggcagaaggacggcgtgaagaagctgaacctgtacctgatcatcaactacttcaagggcggcaagctgcggttcaagaagatcaaacctgaagccttcgaagccaacagattctacaccgtgatcaacaaaaagagcggcgagatcgtgcccatggaggtgaacttcaacttcgacgaccccaacctgatcatcctgcctctggcctttggcaagagacagggcagagaattcatctggaacgacctgctgtccctggaaaccggcagcctgaagctggccaacggaagagtgatcgagaagacactgtacaacagaagaacccggcaggatgagcctgccctgttcgtggccctgaccttcgagcggcgggaggtcctggactcctccaatatcaaaccaatgaacctgatcggcgtggcaagaggcgaaaacatccccgccgtgatcgccctgaccgaccccgagggctgcccactgagccggtttaaggatagcctgggaaacccaacccacatcctgagaatcggcgagagctataaggagaagcagcggaccatccaggccaagaaggaggtggagcagcggagagccggcggctacagccggaagtacgccagcaaagccaagaatctggcagacgatatggtgagaaacaccgctagagatctgctgtactacgccgtgacccaggatgccatgctgatcttcgccaacctgagccggggcttcggccggcagggcaagcggaccttcatggccgagagacagtacacacggatggaggactggctgaccgccaagctggcctacgagggcctgagcaagacctacctgtccaagacactggcccagtacacctccaagacatgcagcaactgtgggtttaccatcaccagcgccgactacgacagggtgctggagaagctgaagaagacagcaacaggctggatgaccacaattaacggcaaggagctgaaggtggagggccagattacctactacaacagatacaagagacagaacgtagtcaaggacctgtccgtcgagctggatagactgagcgaagaatctgtgaacaacgacatctcctcctggacaaagggcagaagcggagaagctctgagcctcctgaagaaaagattctcccatagacccgtgcaggagaagttcgtgtgcctgaactgcggcttcgagacacacgcagccgagcaagccgccctgaacatcgccagatcctggctgttcctgcggagccaggagtacaagaaataccagacaaacaagacaaccggcaacaccgataagagagccttcgtcgagacctggcagtccttttaccggaagaagcttaaggaggtgtggaaacctgccgtgcggtctggcggatctggcggaggctccaccagccccaagaaaaagagaaaagtctaagctgccttctgcggggcttgccttctggccatgcccttcttctctcccttgcacctgtacctcttggtctttgaataaagcctgagtaggaaggctagcaaaaaaaaaaaaaaaaaaaaaaaaaaaaaaaaaaaaaaaaaaaaaaaaaaaaaaaaaaaaaaaaaaaaaaaaaaaaaaaa

SEQ ID NO: 13475 - RNA, 5785 nt, synthetic construct
  source 1..5785: mol_type = other RNA
aggaaataagagagaaaagaagagtaagaagaaatataagagccaccatggcccctaagaagaagcgtaaagtgagccggatggaacgcctcgtctacgaggtgcggcagaagtgcagaaacatcgaggacatctgcatctcctgcggatctctgaacgtgaccctggagcacccactgttcatcggcggcatgtgccagaactgtaaaaactgttttctggagtgtgcctatcaatacgacgatgacggctaccagagctactgcaccatctgttgcggcggaagagaggtgctgatgtgtggaaataacaactgctgccggtgcttctgcgtggaatgcgtggacctgctggtgggccccggcgccgcccaggccgctattaaggaagatccttggaactgctacatgtgcggccacaagggcacatacggcctgctgagacggagagaggactggcctagcagactgcagatgttcttcgccaataaccacgaccaggagttcgacccccctaaggtgtaccctcccgtccccgccgagaagagaaagcccatccgggtcctgagcctgttcgatggcatcgccaccggtctgctggtgctgaaggacctgggcatccaggtggataggtacattgcctccgaggtgtgcgaggactccatcaccgtgggaatggtgcgtcatcagggcaagatcatgtacgtgggcgacgtgcggagcgtgacacagaagcatatccaggagtggggccctttcgacctggtgatcggcggcagcccttgcaatgacctgagcatcgtgaacccagcccggaagggcctgtacgagggaaccggcagactgttcttcgagttttacagactgctgcacgacgcccggcctaaggaaggcgacgaccggcccttcttttggctgttcgagaatgtggtggccatgggagtcagcgacaagcgggatattagccggttcctggagagcaaccccgtgatgatcgatgccaaggaagtgagcgccgcccaccgggccagatacttctggggcaatctgcctggcatgaacagacccctggccagcaccgtgaacgacaagctggagctgcaggagtgcctggagcacggccggatcgccaagttcagcaaggtgagaaccatcaccacccgaagcaacagcatcaaacaaggcaaggaccagcactttcctgtgttcatgaacgagaaggaggacatcctgtggtgtaccgagatggagagagtgttcgggttcccagtccactacacagatgtcagcaacatgtctagactggccagacagagactgctgggaagaagctggtccgtccctgtgatcagacacctgttcgcccctctgaaggagtacttcgcctgcgtgagcagcggcaacagcaacgccaacagccggggccccagcttctctagcggcctggtgccactgtccctgagagggagccacatgggccccatggagatctacaaaaccgtgagcgcctggaagcggcagcctgtgcgcgtgctgagcctgtttcggaatatcgataaagtcctgaaaagcctgggattcctggagagcggctctggctccggcggtggcaccctgaagtacgtggaggatgtgacaaacgtggtcagacgggatgtggagaagtggggccccttcgatctggtgtacggcagcacccaacccctgggcagctcttgtgaccggtgccctggctggtacatgtttcagttccaccggatcctgcagtacgccctgccgagacaggagtcccagcggccattcttttggattttcatggacaacttgctgctgaccgaggatgaccaggaaactaccactcggttcctgcagaccgaagccgtgaccctgcaggacgtgagaggccgggactaccagaacgccatgcgggtgtggtccaacatccctggactgaaaagcaagcacgcacctctgacccctaaagaagaggagtacctgcaggcccaggtgcggagcagaagcaagctggacgcccctaaggtggatctgctggtgaagaattgcctcctgcccctgagagagtacttcaagtatttcagccagaatagtctgcccctgggaggcagcggcggcggcttccagggcagcgtgaccttcaccgacgtggccatcgacttcagccaggaggagtggaggtggctgcagcccgcccagagggacctgtacaggtgcgtgatgctggagaactacggccacctggtgagcctgggcctgagcatcagcaagcccgacgtggtgagcctgctggagcagggcaaggagccctggctgggcaagaggaacgtgaacagggacctgttcagcgtgagcgagagcaggggcggcccaagcagcggcgcccctcctcccagcggcggcagcccagccggctccccaacctctaccgaggagggcacctctgagtccgccacccccgagagcggccctggcacctccaccgagcccagcgagggcagcgcacccggcagccctgccggcagccccacctccacagaggagggaaccagcaccgagcccagcgaaggcagcgccccaggcaccagcaccgagcctagtgagcaggagattaaacggatcaacaagatcagaagaagacttgtgaaagacagcaacaccaagaaggccggcaagacaggccccatgaaaaccctgctggttagagtgatgacacccgatctgagagagcggctggaaaacctgagaaagaagcctgaaaatatcccccagcccatcagcaatacatctagagccaacctgaataagctgctgaccgattacaccgaaatgaagaaggcgatcctgcatgtgtactgggaagagttccagaaggaccctgtgggcctgatgagccgggtggcccagcctgccagcaagaagatcgatcagaacaagctgaaacctgagatggacgagaagggcaacctgaccaccgccggctttgcctgctctcagtgtggccagcccctgttcgtgtacaagctggagcaggtgtctgagaagggcaaggcttacaccaactacttcggacggtgcaatgtggccgagcacgaaaagctgatcctgctggcccagctgaagcccgagaaggatagcgacgaagccgtgacatatagcctgggaaagtttgggcagagggccctggatttctacagcattcatgtgaccaaggagtccacccaccccgtgaagcccctggcccagatcgccggaaacagatacgcctccggacctgtgggaaaggccctgagcgacgcatgtatgggcacaatcgcctccttcctgtctaagtaccaggacatcatcatcgaacaccagaaggtggtgaagggcaaccagaagagactggagagcctgcgggagctggccggcaaggaaaacctggaataccctagcgtgaccctgccacctcagcctcacaccaaggagggcgttgatgcctacaacgaagtgatcgcccgggtgcgaatgtgggtgaacctgaacctgtggcagaagctgaagctaagcagagatgatgccaagcctctgctgagactgaagggattcccttcctttcctctggtcgagagacaggccaacgaagtggactggtgggacatggtgtgtaacgtgaagaagctgatcaacgagaaaaaggaggatggcaaggtgttttggcagaatctggctggctacaagagacaggaagccctgagaccatacctgagcagcgaggaagatcggaagaagggaaagaaattcgctcggtaccagctgggcgacctgctgctgcacctggaaaagaagcacggcgaggactggggaaaggtgtacgacgaggcctgggagcggattgacaagaaagtggaaggcctgagcaagcacatcaagctggaagaggaacggagaagcgaggacgcccagagcaaggccgccctgaccgactggctgcgggctaaggccagcttcgtgatcgagggcctgaaggaggccgacaaggacgagttctgcagatgcgagctgaagctgcagaagtggtacggggacctgcggggaaagcccttcgccatcgaagccgagaacagcatcctggacatcagcggcttcagcaagcagtacaactgtgccttcatctggcagaaggacggcgtgaagaagctgaacctgtacctgatcatcaactacttcaagggcggcaagctgcggttcaagaagatcaaacctgaagccttcgaagccaacagattctacaccgtgatcaacaaaaagagcggcgagatcgtgcccatggaggtgaacttcaacttcgacgaccccaacctgatcatcctgcctctggcctttggcaagagacagggcagagaattcatctggaacgacctgctgtccctggaaaccggcagcctgaagctggccaacggaagagtgatcgagaagacactgtacaacagaagaacccggcaggatgagcctgccctgttcgtggccctgaccttcgagcggcgggaggtcctggactcctccaatatcaaaccaatgaacctgatcggcgtggcaagaggcgaaaacatccccgccgtgatcgccctgaccgaccccgagggctgcccactgagccggtttaaggatagcctgggaaacccaacccacatcctgagaatcggcgagagctataaggagaagcagcggaccatccaggccaagaaggaggtggagcagcggagagccggcggctacagccggaagtacgccagcaaagccaagaatctggcagacgatatggtgagaaacaccgctagagatctgctgtactacgccgtgacccaggatgccatgctgatcttcgccaacctgagccggggcttcggccggcagggcaagcggaccttcatggccgagagacagtacacacggatggaggactggctgaccgccaagctggcctacgagggcctgagcaagacctacctgtccaagacactggcccagtacacctccaagacatgcagcaactgtgggtttaccatcaccagcgccgactacgacagggtgctggagaagctgaagaagacagcaacaggctggatgaccacaattaacggcaaggagctgaaggtggagggccagattacctactacaacagatacaagagacagaacgtagtcaaggacctgtccgtcgagctggatagactgagcgaagaatctgtgaacaacgacatctcctcctggacaaagggcagaagcggagaagctctgagcctcctgaagaaaagattctcccatagacccgtgcaggagaagttcgtgtgcctgaactgcggcttcgagacacacgcagccgagcaagccgccctgaacatcgccagatcctggctgttcctgcggagccaggagtacaagaaataccagacaaacaagacaaccggcaacaccgataagagagccttcgtcgagacctggcagtccttttaccggaagaagcttaaggaggtgtggaaacctgccgtgcggtctggcggatctggcggaggctccaccagccccaagaaaaagagaaaagtctaagctgccttctgcggggcttgccttctggccatgcccttcttctctcccttgcacctgtacctcttggtctttgaataaagcctgagtaggaaggctagcaaaaaaaaaaaaaaaaaaaaaaaaaaaaaaaaaaaaaaaaaaaaaaaaaaaaaaaaaaaaaaaaaaaaaaaaaaaaaaaa

SEQ ID NO: 13476 - RNA, 5785 nt, synthetic construct
  source 1..5785: mol_type = other RNA
aggaaataagagagaaaagaagagtaagaagaaatataagagccaccatggcccctaagaagaagcgtaaagtgagccggatggaacgcctcgtctacgaggtgcggcagaagtgcagaaacatcgaggacatctgcatctcctgcggatctctgaacgtgaccctggagcacccactgttcatcggcggcatgtgccagaactgtaaaaactgttttctggagtgtgcctatcaatacgacgatgacggctaccagagctactgcaccatctgttgcggcggaagagaggtgctgatgtgtggaaataacaactgctgccggtgcttctgcgtggaatgcgtggacctgctggtgggccccggcgccgcccaggccgctattaaggaagatccttggaactgctacatgtgcggccacaagggcacatacggcctgctgagacggagagaggactggcctagcagactgcagatgttcttcgccaataaccacgaccaggagttcgacccccctaaggtgtaccctcccgtccccgccgagaagagaaagcccatccgggtcctgagcctgttcgatggcatcgccaccggtctgctggtgctgaaggacctgggcatccaggtggataggtacattgcctccgaggtgtgcgaggactccatcaccgtgggaatggtgcgtcatcagggcaagatcatgtacgtgggcgacgtgcggagcgtgacacagaagcatatccaggagtggggccctttcgacctggtgatcggcggcagcccttgcaatgacctgagcatcgtgaacccagcccggaagggcctgtacgagggaaccggcagactgttcttcgagttttacagactgctgcacgacgcccggcctaaggaaggcgacgaccggcccttcttttggctgttcgagaatgtggtggccatgggagtcagcgacaagcgggatattagccggttcctggagagcaaccccgtgatgatcgatgccaaggaagtgagcgccgcccaccgggccagatacttctggggcaatctgcctggcatgaacagacccctggccagcaccgtgaacgacaagctggagctgcaggagtgcctggagcacggccggatcgccaagttcagcaaggtgagaaccatcaccacccgaagcaacagcatcaaacaaggcaaggaccagcactttcctgtgttcatgaacgagaaggaggacatcctgtggtgtaccgagatggagagagtgttcgggttcccagtccactacacagatgtcagcaacatgtctagactggccagacagagactgctgggaagaagctggtccgtccctgtgatcagacacctgttcgcccctctgaaggagtacttcgcctgcgtgagcagcggcaacagcaacgccaacagccggggccccagcttctctagcggcctggtgccactgtccctgagagggagccacatgggccccatggagatctacaaaaccgtgagcgcctggaagcggcagcctgtgcgcgtgctgagcctgtttcggaatatcgataaagtcctgaaaagcctgggattcctggagagcggctctggctccggcggtggcaccctgaagtacgtggaggatgtgacaaacgtggtcagacgggatgtggagaagtggggccccttcgatctggtgtacggcagcacccaacccctgggcagctcttgtgaccggtgccctggctggtacatgtttcagttccaccggatcctgcagtacgccctgccgagacaggagtcccagcggccattcttttggattttcatggacaacttgctgctgaccgaggatgaccaggaaactaccactcggttcctgcagaccgaagccgtgaccctgcaggacgtgagaggccgggactaccagaacgccatgcgggtgtggtccaacatccctggactgaaaagcaagcacgcacctctgacccctaaagaagaggagtacctgcaggcccaggtgcggagcagaagcaagctggacgcccctaaggtggatctgctggtgaagaattgcctcctgcccctgagagagtacttcaagtatttcagccagaatagtctgcccctgggaggcagcggcggcggctggaaggagctgctgagcttcgaggacgtggccatgtacttcaccagggaggagtggaacaggctggactgggcccagaaggacctgtacagggacgtgatgctggagaactacaggaacatgatcctgctgggcttccagttccccaagcccgaggtgatctgcctgctggagcagtgggaggagccctggatcctggacctgcccagggccggcaccaggaaggccagcagcagcgcctgcggcggcccaagcagcggcgcccctcctcccagcggcggcagcccagccggctccccaacctctaccgaggagggcacctctgagtccgccacccccgagagcggccctggcacctccaccgagcccagcgagggcagcgcacccggcagccctgccggcagccccacctccacagaggagggaaccagcaccgagcccagcgaaggcagcgccccaggcaccagcaccgagcctagtgagcaggagattaaacggatcaacaagatcagaagaagacttgtgaaagacagcaacaccaagaaggccggcaagacaggccccatgaaaaccctgctggttagagtgatgacacccgatctgagagagcggctggaaaacctgagaaagaagcctgaaaatatcccccagcccatcagcaatacatctagagccaacctgaataagctgctgaccgattacaccgaaatgaagaaggcgatcctgcatgtgtactgggaagagttccagaaggaccctgtgggcctgatgagccgggtggcccagcctgccagcaagaagatcgatcagaacaagctgaaacctgagatggacgagaagggcaacctgaccaccgccggctttgcctgctctcagtgtggccagcccctgttcgtgtacaagctggagcaggtgtctgagaagggcaaggcttacaccaactacttcggacggtgcaatgtggccgagcacgaaaagctgatcctgctggcccagctgaagcccgagaaggatagcgacgaagccgtgacatatagcctgggaaagtttgggcagagggccctggatttctacagcattcatgtgaccaaggagtccacccaccccgtgaagcccctggcccagatcgccggaaacagatacgcctccggacctgtgggaaaggccctgagcgacgcatgtatgggcacaatcgcctccttcctgtctaagtaccaggacatcatcatcgaacaccagaaggtggtgaagggcaaccagaagagactggagagcctgcgggagctggccggcaaggaaaacctggaataccctagcgtgaccctgccacctcagcctcacaccaaggagggcgttgatgcctacaacgaagtgatcgcccgggtgcgaatgtgggtgaacctgaacctgtggcagaagctgaagctaagcagagatgatgccaagcctctgctgagactgaagggattcccttcctttcctctggtcgagagacaggccaacgaagtggactggtgggacatggtgtgtaacgtgaagaagctgatcaacgagaaaaaggaggatggcaaggtgttttggcagaatctggctggctacaagagacaggaagccctgagaccatacctgagcagcgaggaagatcggaagaagggaaagaaattcgctcggtaccagctgggcgacctgctgctgcacctggaaaagaagcacggcgaggactggggaaaggtgtacgacgaggcctgggagcggattgacaagaaagtggaaggcctgagcaagcacatcaagctggaagaggaacggagaagcgaggacgcccagagcaaggccgccctgaccgactggctgcgggctaaggccagcttcgtgatcgagggcctgaaggaggccgacaaggacgagttctgcagatgcgagctgaagctgcagaagtggtacggggacctgcggggaaagcccttcgccatcgaagccgagaacagcatcctggacatcagcggcttcagcaagcagtacaactgtgccttcatctggcagaaggacggcgtgaagaagctgaacctgtacctgatcatcaactacttcaagggcggcaagctgcggttcaagaagatcaaacctgaagccttcgaagccaacagattctacaccgtgatcaacaaaaagagcggcgagatcgtgcccatggaggtgaacttcaacttcgacgaccccaacctgatcatcctgcctctggcctttggcaagagacagggcagagaattcatctggaacgacctgctgtccctggaaaccggcagcctgaagctggccaacggaagagtgatcgagaagacactgtacaacagaagaacccggcaggatgagcctgccctgttcgtggccctgaccttcgagcggcgggaggtcctggactcctccaatatcaaaccaatgaacctgatcggcgtggcaagaggcgaaaacatccccgccgtgatcgccctgaccgaccccgagggctgcccactgagccggtttaaggatagcctgggaaacccaacccacatcctgagaatcggcgagagctataaggagaagcagcggaccatccaggccaagaaggaggtggagcagcggagagccggcggctacagccggaagtacgccagcaaagccaagaatctggcagacgatatggtgagaaacaccgctagagatctgctgtactacgccgtgacccaggatgccatgctgatcttcgccaacctgagccggggcttcggccggcagggcaagcggaccttcatggccgagagacagtacacacggatggaggactggctgaccgccaagctggcctacgagggcctgagcaagacctacctgtccaagacactggcccagtacacctccaagacatgcagcaactgtgggtttaccatcaccagcgccgactacgacagggtgctggagaagctgaagaagacagcaacaggctggatgaccacaattaacggcaaggagctgaaggtggagggccagattacctactacaacagatacaagagacagaacgtagtcaaggacctgtccgtcgagctggatagactgagcgaagaatctgtgaacaacgacatctcctcctggacaaagggcagaagcggagaagctctgagcctcctgaagaaaagattctcccatagacccgtgcaggagaagttcgtgtgcctgaactgcggcttcgagacacacgcagccgagcaagccgccctgaacatcgccagatcctggctgttcctgcggagccaggagtacaagaaataccagacaaacaagacaaccggcaacaccgataagagagccttcgtcgagacctggcagtccttttaccggaagaagcttaaggaggtgtggaaacctgccgtgcggtctggcggatctggcggaggctccaccagccccaagaaaaagagaaaagtctaagctgccttctgcggggcttgccttctggccatgcccttcttctctcccttgcacctgtacctcttggtctttgaataaagcctgagtaggaaggctagcaaaaaaaaaaaaaaaaaaaaaaaaaaaaaaaaaaaaaaaaaaaaaaaaaaaaaaaaaaaaaaaaaaaaaaaaaaaaaaaa

SEQ ID NO: 13477 - RNA, 5785 nt, synthetic construct
  source 1..5785: mol_type = other RNA
aggaaataagagagaaaagaagagtaagaagaaatataagagccaccatggcccctaagaagaagcgtaaagtgagccggatggaacgcctcgtctacgaggtgcggcagaagtgcagaaacatcgaggacatctgcatctcctgcggatctctgaacgtgaccctggagcacccactgttcatcggcggcatgtgccagaactgtaaaaactgttttctggagtgtgcctatcaatacgacgatgacggctaccagagctactgcaccatctgttgcggcggaagagaggtgctgatgtgtggaaataacaactgctgccggtgcttctgcgtggaatgcgtggacctgctggtgggccccggcgccgcccaggccgctattaaggaagatccttggaactgctacatgtgcggccacaagggcacatacggcctgctgagacggagagaggactggcctagcagactgcagatgttcttcgccaataaccacgaccaggagttcgacccccctaaggtgtaccctcccgtccccgccgagaagagaaagcccatccgggtcctgagcctgttcgatggcatcgccaccggtctgctggtgctgaaggacctgggcatccaggtggataggtacattgcctccgaggtgtgcgaggactccatcaccgtgggaatggtgcgtcatcagggcaagatcatgtacgtgggcgacgtgcggagcgtgacacagaagcatatccaggagtggggccctttcgacctggtgatcggcggcagcccttgcaatgacctgagcatcgtgaacccagcccggaagggcctgtacgagggaaccggcagactgttcttcgagttttacagactgctgcacgacgcccggcctaaggaaggcgacgaccggcccttcttttggctgttcgagaatgtggtggccatgggagtcagcgacaagcgggatattagccggttcctggagagcaaccccgtgatgatcgatgccaaggaagtgagcgccgcccaccgggccagatacttctggggcaatctgcctggcatgaacagacccctggccagcaccgtgaacgacaagctggagctgcaggagtgcctggagcacggccggatcgccaagttcagcaaggtgagaaccatcaccacccgaagcaacagcatcaaacaaggcaaggaccagcactttcctgtgttcatgaacgagaaggaggacatcctgtggtgtaccgagatggagagagtgttcgggttcccagtccactacacagatgtcagcaacatgtctagactggccagacagagactgctgggaagaagctggtccgtccctgtgatcagacacctgttcgcccctctgaaggagtacttcgcctgcgtgagcagcggcaacagcaacgccaacagccggggccccagcttctctagcggcctggtgccactgtccctgagagggagccacatgggccccatggagatctacaaaaccgtgagcgcctggaagcggcagcctgtgcgcgtgctgagcctgtttcggaatatcgataaagtcctgaaaagcctgggattcctggagagcggctctggctccggcggtggcaccctgaagtacgtggaggatgtgacaaacgtggtcagacgggatgtggagaagtggggccccttcgatctggtgtacggcagcacccaacccctgggcagctcttgtgaccggtgccctggctggtacatgtttcagttccaccggatcctgcagtacgccctgccgagacaggagtcccagcggccattcttttggattttcatggacaacttgctgctgaccgaggatgaccaggaaactaccactcggttcctgcagaccgaagccgtgaccctgcaggacgtgagaggccgggactaccagaacgccatgcgggtgtggtccaacatccctggactgaaaagcaagcacgcacctctgacccctaaagaagaggagtacctgcaggcccaggtgcggagcagaagcaagctggacgcccctaaggtggatctgctggtgaagaattgcctcctgcccctgagagagtacttcaagtatttcagccagaatagtctgcccctgggaggcagcggcggcggcagcctgggccccgtgagcttcaaggacgtggccgtgggcttcacccaggaggagtggaggcagctggagcccgcccagaggaggacctacagggaggtgatgctggagaactacagccacctggtggccgtgggctgccacttcatcaagcccgacgtgatcaccaagctggagaggggcgaggagccctggatcgagggcggcttcctgccccagggctgcgccgacgaggtgtggcaggccggcggcccaagcagcggcgcccctcctcccagcggcggcagcccagccggctccccaacctctaccgaggagggcacctctgagtccgccacccccgagagcggccctggcacctccaccgagcccagcgagggcagcgcacccggcagccctgccggcagccccacctccacagaggagggaaccagcaccgagcccagcgaaggcagcgccccaggcaccagcaccgagcctagtgagcaggagattaaacggatcaacaagatcagaagaagacttgtgaaagacagcaacaccaagaaggccggcaagacaggccccatgaaaaccctgctggttagagtgatgacacccgatctgagagagcggctggaaaacctgagaaagaagcctgaaaatatcccccagcccatcagcaatacatctagagccaacctgaataagctgctgaccgattacaccgaaatgaagaaggcgatcctgcatgtgtactgggaagagttccagaaggaccctgtgggcctgatgagccgggtggcccagcctgccagcaagaagatcgatcagaacaagctgaaacctgagatggacgagaagggcaacctgaccaccgccggctttgcctgctctcagtgtggccagcccctgttcgtgtacaagctggagcaggtgtctgagaagggcaaggcttacaccaactacttcggacggtgcaatgtggccgagcacgaaaagctgatcctgctggcccagctgaagcccgagaaggatagcgacgaagccgtgacatatagcctgggaaagtttgggcagagggccctggatttctacagcattcatgtgaccaaggagtccacccaccccgtgaagcccctggcccagatcgccggaaacagatacgcctccggacctgtgggaaaggccctgagcgacgcatgtatgggcacaatcgcctccttcctgtctaagtaccaggacatcatcatcgaacaccagaaggtggtgaagggcaaccagaagagactggagagcctgcgggagctggccggcaaggaaaacctggaataccctagcgtgaccctgccacctcagcctcacaccaaggagggcgttgatgcctacaacgaagtgatcgcccgggtgcgaatgtgggtgaacctgaacctgtggcagaagctgaagctaagcagagatgatgccaagcctctgctgagactgaagggattcccttcctttcctctggtcgagagacaggccaacgaagtggactggtgggacatggtgtgtaacgtgaagaagctgatcaacgagaaaaaggaggatggcaaggtgttttggcagaatctggctggctacaagagacaggaagccctgagaccatacctgagcagcgaggaagatcggaagaagggaaagaaattcgctcggtaccagctgggcgacctgctgctgcacctggaaaagaagcacggcgaggactggggaaaggtgtacgacgaggcctgggagcggattgacaagaaagtggaaggcctgagcaagcacatcaagctggaagaggaacggagaagcgaggacgcccagagcaaggccgccctgaccgactggctgcgggctaaggccagcttcgtgatcgagggcctgaaggaggccgacaaggacgagttctgcagatgcgagctgaagctgcagaagtggtacggggacctgcggggaaagcccttcgccatcgaagccgagaacagcatcctggacatcagcggcttcagcaagcagtacaactgtgccttcatctggcagaaggacggcgtgaagaagctgaacctgtacctgatcatcaactacttcaagggcggcaagctgcggttcaagaagatcaaacctgaagccttcgaagccaacagattctacaccgtgatcaacaaaaagagcggcgagatcgtgcccatggaggtgaacttcaacttcgacgaccccaacctgatcatcctgcctctggcctttggcaagagacagggcagagaattcatctggaacgacctgctgtccctggaaaccggcagcctgaagctggccaacggaagagtgatcgagaagacactgtacaacagaagaacccggcaggatgagcctgccctgttcgtggccctgaccttcgagcggcgggaggtcctggactcctccaatatcaaaccaatgaacctgatcggcgtggcaagaggcgaaaacatccccgccgtgatcgccctgaccgaccccgagggctgcccactgagccggtttaaggatagcctgggaaacccaacccacatcctgagaatcggcgagagctataaggagaagcagcggaccatccaggccaagaaggaggtggagcagcggagagccggcggctacagccggaagtacgccagcaaagccaagaatctggcagacgatatggtgagaaacaccgctagagatctgctgtactacgccgtgacccaggatgccatgctgatcttcgccaacctgagccggggcttcggccggcagggcaagcggaccttcatggccgagagacagtacacacggatggaggactggctgaccgccaagctggcctacgagggcctgagcaagacctacctgtccaagacactggcccagtacacctccaagacatgcagcaactgtgggtttaccatcaccagcgccgactacgacagggtgctggagaagctgaagaagacagcaacaggctggatgaccacaattaacggcaaggagctgaaggtggagggccagattacctactacaacagatacaagagacagaacgtagtcaaggacctgtccgtcgagctggatagactgagcgaagaatctgtgaacaacgacatctcctcctggacaaagggcagaagcggagaagctctgagcctcctgaagaaaagattctcccatagacccgtgcaggagaagttcgtgtgcctgaactgcggcttcgagacacacgcagccgagcaagccgccctgaacatcgccagatcctggctgttcctgcggagccaggagtacaagaaataccagacaaacaagacaaccggcaacaccgataagagagccttcgtcgagacctggcagtccttttaccggaagaagcttaaggaggtgtggaaacctgccgtgcggtctggcggatctggcggaggctccaccagccccaagaaaaagagaaaagtctaagctgccttctgcggggcttgccttctggccatgcccttcttctctcccttgcacctgtacctcttggtctttgaataaagcctgagtaggaaggctagcaaaaaaaaaaaaaaaaaaaaaaaaaaaaaaaaaaaaaaaaaaaaaaaaaaaaaaaaaaaaaaaaaaaaaaaaaaaaaaaa

SEQ ID NO: 13478 - RNA, 5785 nt, synthetic construct
  source 1..5785: mol_type = other RNA
aggaaataagagagaaaagaagagtaagaagaaatataagagccaccatggcccctaagaagaagcgtaaagtgagccggatggaacgcctcgtctacgaggtgcggcagaagtgcagaaacatcgaggacatctgcatctcctgcggatctctgaacgtgaccctggagcacccactgttcatcggcggcatgtgccagaactgtaaaaactgttttctggagtgtgcctatcaatacgacgatgacggctaccagagctactgcaccatctgttgcggcggaagagaggtgctgatgtgtggaaataacaactgctgccggtgcttctgcgtggaatgcgtggacctgctggtgggccccggcgccgcccaggccgctattaaggaagatccttggaactgctacatgtgcggccacaagggcacatacggcctgctgagacggagagaggactggcctagcagactgcagatgttcttcgccaataaccacgaccaggagttcgacccccctaaggtgtaccctcccgtccccgccgagaagagaaagcccatccgggtcctgagcctgttcgatggcatcgccaccggtctgctggtgctgaaggacctgggcatccaggtggataggtacattgcctccgaggtgtgcgaggactccatcaccgtgggaatggtgcgtcatcagggcaagatcatgtacgtgggcgacgtgcggagcgtgacacagaagcatatccaggagtggggccctttcgacctggtgatcggcggcagcccttgcaatgacctgagcatcgtgaacccagcccggaagggcctgtacgagggaaccggcagactgttcttcgagttttacagactgctgcacgacgcccggcctaaggaaggcgacgaccggcccttcttttggctgttcgagaatgtggtggccatgggagtcagcgacaagcgggatattagccggttcctggagagcaaccccgtgatgatcgatgccaaggaagtgagcgccgcccaccgggccagatacttctggggcaatctgcctggcatgaacagacccctggccagcaccgtgaacgacaagctggagctgcaggagtgcctggagcacggccggatcgccaagttcagcaaggtgagaaccatcaccacccgaagcaacagcatcaaacaaggcaaggaccagcactttcctgtgttcatgaacgagaaggaggacatcctgtggtgtaccgagatggagagagtgttcgggttcccagtccactacacagatgtcagcaacatgtctagactggccagacagagactgctgggaagaagctggtccgtccctgtgatcagacacctgttcgcccctctgaaggagtacttcgcctgcgtgagcagcggcaacagcaacgccaacagccggggccccagcttctctagcggcctggtgccactgtccctgagagggagccacatgggccccatggagatctacaaaaccgtgagcgcctggaagcggcagcctgtgcgcgtgctgagcctgtttcggaatatcgataaagtcctgaaaagcctgggattcctggagagcggctctggctccggcggtggcaccctgaagtacgtggaggatgtgacaaacgtggtcagacgggatgtggagaagtggggccccttcgatctggtgtacggcagcacccaacccctgggcagctcttgtgaccggtgccctggctggtacatgtttcagttccaccggatcctgcagtacgccctgccgagacaggagtcccagcggccattcttttggattttcatggacaacttgctgctgaccgaggatgaccaggaaactaccactcggttcctgcagaccgaagccgtgaccctgcaggacgtgagaggccgggactaccagaacgccatgcgggtgtggtccaacatccctggactgaaaagcaagcacgcacctctgacccctaaagaagaggagtacctgcaggcccaggtgcggagcagaagcaagctggacgcccctaaggtggatctgctggtgaagaattgcctcctgcccctgagagagtacttcaagtatttcagccagaatagtctgcccctgggaggcagcggcggcggcaccctgggcctgctgagcttcaacgacgtgagcctggagttcagctgggaggagtggcagctgctggacagcgcccagaggtacctgtacagggaggtgatcctggagaactacagcaacctgctgagcgtgggctaccacggcaccaagcccgacctgatcttcaggctggagcagggcgaggagccctggatcctgaacgccaagatgagcacccagaactgccccgaggtgtgggaggacggcggcccaagcagcggcgcccctcctcccagcggcggcagcccagccggctccccaacctctaccgaggagggcacctctgagtccgccacccccgagagcggccctggcacctccaccgagcccagcgagggcagcgcacccggcagccctgccggcagccccacctccacagaggagggaaccagcaccgagcccagcgaaggcagcgccccaggcaccagcaccgagcctagtgagcaggagattaaacggatcaacaagatcagaagaagacttgtgaaagacagcaacaccaagaaggccggcaagacaggccccatgaaaaccctgctggttagagtgatgacacccgatctgagagagcggctggaaaacctgagaaagaagcctgaaaatatcccccagcccatcagcaatacatctagagccaacctgaataagctgctgaccgattacaccgaaatgaagaaggcgatcctgcatgtgtactgggaagagttccagaaggaccctgtgggcctgatgagccgggtggcccagcctgccagcaagaagatcgatcagaacaagctgaaacctgagatggacgagaagggcaacctgaccaccgccggctttgcctgctctcagtgtggccagcccctgttcgtgtacaagctggagcaggtgtctgagaagggcaaggcttacaccaactacttcggacggtgcaatgtggccgagcacgaaaagctgatcctgctggcccagctgaagcccgagaaggatagcgacgaagccgtgacatatagcctgggaaagtttgggcagagggccctggatttctacagcattcatgtgaccaaggagtccacccaccccgtgaagcccctggcccagatcgccggaaacagatacgcctccggacctgtgggaaaggccctgagcgacgcatgtatgggcacaatcgcctccttcctgtctaagtaccaggacatcatcatcgaacaccagaaggtggtgaagggcaaccagaagagactggagagcctgcgggagctggccggcaaggaaaacctggaataccctagcgtgaccctgccacctcagcctcacaccaaggagggcgttgatgcctacaacgaagtgatcgcccgggtgcgaatgtgggtgaacctgaacctgtggcagaagctgaagctaagcagagatgatgccaagcctctgctgagactgaagggattcccttcctttcctctggtcgagagacaggccaacgaagtggactggtgggacatggtgtgtaacgtgaagaagctgatcaacgagaaaaaggaggatggcaaggtgttttggcagaatctggctggctacaagagacaggaagccctgagaccatacctgagcagcgaggaagatcggaagaagggaaagaaattcgctcggtaccagctgggcgacctgctgctgcacctggaaaagaagcacggcgaggactggggaaaggtgtacgacgaggcctgggagcggattgacaagaaagtggaaggcctgagcaagcacatcaagctggaagaggaacggagaagcgaggacgcccagagcaaggccgccctgaccgactggctgcgggctaaggccagcttcgtgatcgagggcctgaaggaggccgacaaggacgagttctgcagatgcgagctgaagctgcagaagtggtacggggacctgcggggaaagcccttcgccatcgaagccgagaacagcatcctggacatcagcggcttcagcaagcagtacaactgtgccttcatctggcagaaggacggcgtgaagaagctgaacctgtacctgatcatcaactacttcaagggcggcaagctgcggttcaagaagatcaaacctgaagccttcgaagccaacagattctacaccgtgatcaacaaaaagagcggcgagatcgtgcccatggaggtgaacttcaacttcgacgaccccaacctgatcatcctgcctctggcctttggcaagagacagggcagagaattcatctggaacgacctgctgtccctggaaaccggcagcctgaagctggccaacggaagagtgatcgagaagacactgtacaacagaagaacccggcaggatgagcctgccctgttcgtggccctgaccttcgagcggcgggaggtcctggactcctccaatatcaaaccaatgaacctgatcggcgtggcaagaggcgaaaacatccccgccgtgatcgccctgaccgaccccgagggctgcccactgagccggtttaaggatagcctgggaaacccaacccacatcctgagaatcggcgagagctataaggagaagcagcggaccatccaggccaagaaggaggtggagcagcggagagccggcggctacagccggaagtacgccagcaaagccaagaatctggcagacgatatggtgagaaacaccgctagagatctgctgtactacgccgtgacccaggatgccatgctgatcttcgccaacctgagccggggcttcggccggcagggcaagcggaccttcatggccgagagacagtacacacggatggaggactggctgaccgccaagctggcctacgagggcctgagcaagacctacctgtccaagacactggcccagtacacctccaagacatgcagcaactgtgggtttaccatcaccagcgccgactacgacagggtgctggagaagctgaagaagacagcaacaggctggatgaccacaattaacggcaaggagctgaaggtggagggccagattacctactacaacagatacaagagacagaacgtagtcaaggacctgtccgtcgagctggatagactgagcgaagaatctgtgaacaacgacatctcctcctggacaaagggcagaagcggagaagctctgagcctcctgaagaaaagattctcccatagacccgtgcaggagaagttcgtgtgcctgaactgcggcttcgagacacacgcagccgagcaagccgccctgaacatcgccagatcctggctgttcctgcggagccaggagtacaagaaataccagacaaacaagacaaccggcaacaccgataagagagccttcgtcgagacctggcagtccttttaccggaagaagcttaaggaggtgtggaaacctgccgtgcggtctggcggatctggcggaggctccaccagccccaagaaaaagagaaaagtctaagctgccttctgcggggcttgccttctggccatgcccttcttctctcccttgcacctgtacctcttggtctttgaataaagcctgagtaggaaggctagcaaaaaaaaaaaaaaaaaaaaaaaaaaaaaaaaaaaaaaaaaaaaaaaaaaaaaaaaaaaaaaaaaaaaaaaaaaaaaaaa

SEQ ID NO: 13479 - RNA, 5785 nt, synthetic construct
  source 1..5785: mol_type = other RNA
aggaaataagagagaaaagaagagtaagaagaaatataagagccaccatggcccctaagaagaagcgtaaagtgagccggatggaacgcctcgtctacgaggtgcggcagaagtgcagaaacatcgaggacatctgcatctcctgcggatctctgaacgtgaccctggagcacccactgttcatcggcggcatgtgccagaactgtaaaaactgttttctggagtgtgcctatcaatacgacgatgacggctaccagagctactgcaccatctgttgcggcggaagagaggtgctgatgtgtggaaataacaactgctgccggtgcttctgcgtggaatgcgtggacctgctggtgggccccggcgccgcccaggccgctattaaggaagatccttggaactgctacatgtgcggccacaagggcacatacggcctgctgagacggagagaggactggcctagcagactgcagatgttcttcgccaataaccacgaccaggagttcgacccccctaaggtgtaccctcccgtccccgccgagaagagaaagcccatccgggtcctgagcctgttcgatggcatcgccaccggtctgctggtgctgaaggacctgggcatccaggtggataggtacattgcctccgaggtgtgcgaggactccatcaccgtgggaatggtgcgtcatcagggcaagatcatgtacgtgggcgacgtgcggagcgtgacacagaagcatatccaggagtggggccctttcgacctggtgatcggcggcagcccttgcaatgacctgagcatcgtgaacccagcccggaagggcctgtacgagggaaccggcagactgttcttcgagttttacagactgctgcacgacgcccggcctaaggaaggcgacgaccggcccttcttttggctgttcgagaatgtggtggccatgggagtcagcgacaagcgggatattagccggttcctggagagcaaccccgtgatgatcgatgccaaggaagtgagcgccgcccaccgggccagatacttctggggcaatctgcctggcatgaacagacccctggccagcaccgtgaacgacaagctggagctgcaggagtgcctggagcacggccggatcgccaagttcagcaaggtgagaaccatcaccacccgaagcaacagcatcaaacaaggcaaggaccagcactttcctgtgttcatgaacgagaaggaggacatcctgtggtgtaccgagatggagagagtgttcgggttcccagtccactacacagatgtcagcaacatgtctagactggccagacagagactgctgggaagaagctggtccgtccctgtgatcagacacctgttcgcccctctgaaggagtacttcgcctgcgtgagcagcggcaacagcaacgccaacagccggggccccagcttctctagcggcctggtgccactgtccctgagagggagccacatgggccccatggagatctacaaaaccgtgagcgcctggaagcggcagcctgtgcgcgtgctgagcctgtttcggaatatcgataaagtcctgaaaagcctgggattcctggagagcggctctggctccggcggtggcaccctgaagtacgtggaggatgtgacaaacgtggtcagacgggatgtggagaagtggggccccttcgatctggtgtacggcagcacccaacccctgggcagctcttgtgaccggtgccctggctggtacatgtttcagttccaccggatcctgcagtacgccctgccgagacaggagtcccagcggccattcttttggattttcatggacaacttgctgctgaccgaggatgaccaggaaactaccactcggttcctgcagaccgaagccgtgaccctgcaggacgtgagaggccgggactaccagaacgccatgcgggtgtggtccaacatccctggactgaaaagcaagcacgcacctctgacccctaaagaagaggagtacctgcaggcccaggtgcggagcagaagcaagctggacgcccctaaggtggatctgctggtgaagaattgcctcctgcccctgagagagtacttcaagtatttcagccagaatagtctgcccctgggaggcagcggcggcggcgcccagggccacgtgaccttcgaggacgtggccgtgtacttcagctgggaggagtggggcctgctggacgaggcccagaggctgctgtacagggacgtgatgctggagaacttcagcctgatggccagcctgggcctggccagcagcatgacccacgagatcacccagctggagtggtggagggagcccttcctgcccccctgcggcgtgatgaccgccgccatgcccagggacggcaggcagggcggcccaagcagcggcgcccctcctcccagcggcggcagcccagccggctccccaacctctaccgaggagggcacctctgagtccgccacccccgagagcggccctggcacctccaccgagcccagcgagggcagcgcacccggcagccctgccggcagccccacctccacagaggagggaaccagcaccgagcccagcgaaggcagcgccccaggcaccagcaccgagcctagtgagcaggagattaaacggatcaacaagatcagaagaagacttgtgaaagacagcaacaccaagaaggccggcaagacaggccccatgaaaaccctgctggttagagtgatgacacccgatctgagagagcggctggaaaacctgagaaagaagcctgaaaatatcccccagcccatcagcaatacatctagagccaacctgaataagctgctgaccgattacaccgaaatgaagaaggcgatcctgcatgtgtactgggaagagttccagaaggaccctgtgggcctgatgagccgggtggcccagcctgccagcaagaagatcgatcagaacaagctgaaacctgagatggacgagaagggcaacctgaccaccgccggctttgcctgctctcagtgtggccagcccctgttcgtgtacaagctggagcaggtgtctgagaagggcaaggcttacaccaactacttcggacggtgcaatgtggccgagcacgaaaagctgatcctgctggcccagctgaagcccgagaaggatagcgacgaagccgtgacatatagcctgggaaagtttgggcagagggccctggatttctacagcattcatgtgaccaaggagtccacccaccccgtgaagcccctggcccagatcgccggaaacagatacgcctccggacctgtgggaaaggccctgagcgacgcatgtatgggcacaatcgcctccttcctgtctaagtaccaggacatcatcatcgaacaccagaaggtggtgaagggcaaccagaagagactggagagcctgcgggagctggccggcaaggaaaacctggaataccctagcgtgaccctgccacctcagcctcacaccaaggagggcgttgatgcctacaacgaagtgatcgcccgggtgcgaatgtgggtgaacctgaacctgtggcagaagctgaagctaagcagagatgatgccaagcctctgctgagactgaagggattcccttcctttcctctggtcgagagacaggccaacgaagtggactggtgggacatggtgtgtaacgtgaagaagctgatcaacgagaaaaaggaggatggcaaggtgttttggcagaatctggctggctacaagagacaggaagccctgagaccatacctgagcagcgaggaagatcggaagaagggaaagaaattcgctcggtaccagctgggcgacctgctgctgcacctggaaaagaagcacggcgaggactggggaaaggtgtacgacgaggcctgggagcggattgacaagaaagtggaaggcctgagcaagcacatcaagctggaagaggaacggagaagcgaggacgcccagagcaaggccgccctgaccgactggctgcgggctaaggccagcttcgtgatcgagggcctgaaggaggccgacaaggacgagttctgcagatgcgagctgaagctgcagaagtggtacggggacctgcggggaaagcccttcgccatcgaagccgagaacagcatcctggacatcagcggcttcagcaagcagtacaactgtgccttcatctggcagaaggacggcgtgaagaagctgaacctgtacctgatcatcaactacttcaagggcggcaagctgcggttcaagaagatcaaacctgaagccttcgaagccaacagattctacaccgtgatcaacaaaaagagcggcgagatcgtgcccatggaggtgaacttcaacttcgacgaccccaacctgatcatcctgcctctggcctttggcaagagacagggcagagaattcatctggaacgacctgctgtccctggaaaccggcagcctgaagctggccaacggaagagtgatcgagaagacactgtacaacagaagaacccggcaggatgagcctgccctgttcgtggccctgaccttcgagcggcgggaggtcctggactcctccaatatcaaaccaatgaacctgatcggcgtggcaagaggcgaaaacatccccgccgtgatcgccctgaccgaccccgagggctgcccactgagccggtttaaggatagcctgggaaacccaacccacatcctgagaatcggcgagagctataaggagaagcagcggaccatccaggccaagaaggaggtggagcagcggagagccggcggctacagccggaagtacgccagcaaagccaagaatctggcagacgatatggtgagaaacaccgctagagatctgctgtactacgccgtgacccaggatgccatgctgatcttcgccaacctgagccggggcttcggccggcagggcaagcggaccttcatggccgagagacagtacacacggatggaggactggctgaccgccaagctggcctacgagggcctgagcaagacctacctgtccaagacactggcccagtacacctccaagacatgcagcaactgtgggtttaccatcaccagcgccgactacgacagggtgctggagaagctgaagaagacagcaacaggctggatgaccacaattaacggcaaggagctgaaggtggagggccagattacctactacaacagatacaagagacagaacgtagtcaaggacctgtccgtcgagctggatagactgagcgaagaatctgtgaacaacgacatctcctcctggacaaagggcagaagcggagaagctctgagcctcctgaagaaaagattctcccatagacccgtgcaggagaagttcgtgtgcctgaactgcggcttcgagacacacgcagccgagcaagccgccctgaacatcgccagatcctggctgttcctgcggagccaggagtacaagaaataccagacaaacaagacaaccggcaacaccgataagagagccttcgtcgagacctggcagtccttttaccggaagaagcttaaggaggtgtggaaacctgccgtgcggtctggcggatctggcggaggctccaccagccccaagaaaaagagaaaagtctaagctgccttctgcggggcttgccttctggccatgcccttcttctctcccttgcacctgtacctcttggtctttgaataaagcctgagtaggaaggctagcaaaaaaaaaaaaaaaaaaaaaaaaaaaaaaaaaaaaaaaaaaaaaaaaaaaaaaaaaaaaaaaaaaaaaaaaaaaaaaaa

SEQ ID NO: 13480 - RNA, 5785 nt, synthetic construct
  source 1..5785: mol_type = other RNA
aggaaataagagagaaaagaagagtaagaagaaatataagagccaccatggcccctaagaagaagcgtaaagtgagccggatggaacgcctcgtctacgaggtgcggcagaagtgcagaaacatcgaggacatctgcatctcctgcggatctctgaacgtgaccctggagcacccactgttcatcggcggcatgtgccagaactgtaaaaactgttttctggagtgtgcctatcaatacgacgatgacggctaccagagctactgcaccatctgttgcggcggaagagaggtgctgatgtgtggaaataacaactgctgccggtgcttctgcgtggaatgcgtggacctgctggtgggccccggcgccgcccaggccgctattaaggaagatccttggaactgctacatgtgcggccacaagggcacatacggcctgctgagacggagagaggactggcctagcagactgcagatgttcttcgccaataaccacgaccaggagttcgacccccctaaggtgtaccctcccgtccccgccgagaagagaaagcccatccgggtcctgagcctgttcgatggcatcgccaccggtctgctggtgctgaaggacctgggcatccaggtggataggtacattgcctccgaggtgtgcgaggactccatcaccgtgggaatggtgcgtcatcagggcaagatcatgtacgtgggcgacgtgcggagcgtgacacagaagcatatccaggagtggggccctttcgacctggtgatcggcggcagcccttgcaatgacctgagcatcgtgaacccagcccggaagggcctgtacgagggaaccggcagactgttcttcgagttttacagactgctgcacgacgcccggcctaaggaaggcgacgaccggcccttcttttggctgttcgagaatgtggtggccatgggagtcagcgacaagcgggatattagccggttcctggagagcaaccccgtgatgatcgatgccaaggaagtgagcgccgcccaccgggccagatacttctggggcaatctgcctggcatgaacagacccctggccagcaccgtgaacgacaagctggagctgcaggagtgcctggagcacggccggatcgccaagttcagcaaggtgagaaccatcaccacccgaagcaacagcatcaaacaaggcaaggaccagcactttcctgtgttcatgaacgagaaggaggacatcctgtggtgtaccgagatggagagagtgttcgggttcccagtccactacacagatgtcagcaacatgtctagactggccagacagagactgctgggaagaagctggtccgtccctgtgatcagacacctgttcgcccctctgaaggagtacttcgcctgcgtgagcagcggcaacagcaacgccaacagccggggccccagcttctctagcggcctggtgccactgtccctgagagggagccacatgggccccatggagatctacaaaaccgtgagcgcctggaagcggcagcctgtgcgcgtgctgagcctgtttcggaatatcgataaagtcctgaaaagcctgggattcctggagagcggctctggctccggcggtggcaccctgaagtacgtggaggatgtgacaaacgtggtcagacgggatgtggagaagtggggccccttcgatctggtgtacggcagcacccaacccctgggcagctcttgtgaccggtgccctggctggtacatgtttcagttccaccggatcctgcagtacgccctgccgagacaggagtcccagcggccattcttttggattttcatggacaacttgctgctgaccgaggatgaccaggaaactaccactcggttcctgcagaccgaagccgtgaccctgcaggacgtgagaggccgggactaccagaacgccatgcgggtgtggtccaacatccctggactgaaaagcaagcacgcacctctgacccctaaagaagaggagtacctgcaggcccaggtgcggagcagaagcaagctggacgcccctaaggtggatctgctggtgaagaattgcctcctgcccctgagagagtacttcaagtatttcagccagaatagtctgcccctgggaggcagcggcggcggcatggcccccggcctgctgaccaccagggaggaggccctgatggccttcagggacgtggccgtggccttcacccagaaggagtggaagctgctgagcagcgcccagaggaccctgtacagggaggtgatgctggagaactacagccacctggtgagcctgggcatcgccttcagcaagcccaagctgatcgagcagctggagcagggcaacgagccctggagggaggagaacgagcacctgctgggcggcccaagcagcggcgcccctcctcccagcggcggcagcccagccggctccccaacctctaccgaggagggcacctctgagtccgccacccccgagagcggccctggcacctccaccgagcccagcgagggcagcgcacccggcagccctgccggcagccccacctccacagaggagggaaccagcaccgagcccagcgaaggcagcgccccaggcaccagcaccgagcctagtgagcaggagattaaacggatcaacaagatcagaagaagacttgtgaaagacagcaacaccaagaaggccggcaagacaggccccatgaaaaccctgctggttagagtgatgacacccgatctgagagagcggctggaaaacctgagaaagaagcctgaaaatatcccccagcccatcagcaatacatctagagccaacctgaataagctgctgaccgattacaccgaaatgaagaaggcgatcctgcatgtgtactgggaagagttccagaaggaccctgtgggcctgatgagccgggtggcccagcctgccagcaagaagatcgatcagaacaagctgaaacctgagatggacgagaagggcaacctgaccaccgccggctttgcctgctctcagtgtggccagcccctgttcgtgtacaagctggagcaggtgtctgagaagggcaaggcttacaccaactacttcggacggtgcaatgtggccgagcacgaaaagctgatcctgctggcccagctgaagcccgagaaggatagcgacgaagccgtgacatatagcctgggaaagtttgggcagagggccctggatttctacagcattcatgtgaccaaggagtccacccaccccgtgaagcccctggcccagatcgccggaaacagatacgcctccggacctgtgggaaaggccctgagcgacgcatgtatgggcacaatcgcctccttcctgtctaagtaccaggacatcatcatcgaacaccagaaggtggtgaagggcaaccagaagagactggagagcctgcgggagctggccggcaaggaaaacctggaataccctagcgtgaccctgccacctcagcctcacaccaaggagggcgttgatgcctacaacgaagtgatcgcccgggtgcgaatgtgggtgaacctgaacctgtggcagaagctgaagctaagcagagatgatgccaagcctctgctgagactgaagggattcccttcctttcctctggtcgagagacaggccaacgaagtggactggtgggacatggtgtgtaacgtgaagaagctgatcaacgagaaaaaggaggatggcaaggtgttttggcagaatctggctggctacaagagacaggaagccctgagaccatacctgagcagcgaggaagatcggaagaagggaaagaaattcgctcggtaccagctgggcgacctgctgctgcacctggaaaagaagcacggcgaggactggggaaaggtgtacgacgaggcctgggagcggattgacaagaaagtggaaggcctgagcaagcacatcaagctggaagaggaacggagaagcgaggacgcccagagcaaggccgccctgaccgactggctgcgggctaaggccagcttcgtgatcgagggcctgaaggaggccgacaaggacgagttctgcagatgcgagctgaagctgcagaagtggtacggggacctgcggggaaagcccttcgccatcgaagccgagaacagcatcctggacatcagcggcttcagcaagcagtacaactgtgccttcatctggcagaaggacggcgtgaagaagctgaacctgtacctgatcatcaactacttcaagggcggcaagctgcggttcaagaagatcaaacctgaagccttcgaagccaacagattctacaccgtgatcaacaaaaagagcggcgagatcgtgcccatggaggtgaacttcaacttcgacgaccccaacctgatcatcctgcctctggcctttggcaagagacagggcagagaattcatctggaacgacctgctgtccctggaaaccggcagcctgaagctggccaacggaagagtgatcgagaagacactgtacaacagaagaacccggcaggatgagcctgccctgttcgtggccctgaccttcgagcggcgggaggtcctggactcctccaatatcaaaccaatgaacctgatcggcgtggcaagaggcgaaaacatccccgccgtgatcgccctgaccgaccccgagggctgcccactgagccggtttaaggatagcctgggaaacccaacccacatcctgagaatcggcgagagctataaggagaagcagcggaccatccaggccaagaaggaggtggagcagcggagagccggcggctacagccggaagtacgccagcaaagccaagaatctggcagacgatatggtgagaaacaccgctagagatctgctgtactacgccgtgacccaggatgccatgctgatcttcgccaacctgagccggggcttcggccggcagggcaagcggaccttcatggccgagagacagtacacacggatggaggactggctgaccgccaagctggcctacgagggcctgagcaagacctacctgtccaagacactggcccagtacacctccaagacatgcagcaactgtgggtttaccatcaccagcgccgactacgacagggtgctggagaagctgaagaagacagcaacaggctggatgaccacaattaacggcaaggagctgaaggtggagggccagattacctactacaacagatacaagagacagaacgtagtcaaggacctgtccgtcgagctggatagactgagcgaagaatctgtgaacaacgacatctcctcctggacaaagggcagaagcggagaagctctgagcctcctgaagaaaagattctcccatagacccgtgcaggagaagttcgtgtgcctgaactgcggcttcgagacacacgcagccgagcaagccgccctgaacatcgccagatcctggctgttcctgcggagccaggagtacaagaaataccagacaaacaagacaaccggcaacaccgataagagagccttcgtcgagacctggcagtccttttaccggaagaagcttaaggaggtgtggaaacctgccgtgcggtctggcggatctggcggaggctccaccagccccaagaaaaagagaaaagtctaagctgccttctgcggggcttgccttctggccatgcccttcttctctcccttgcacctgtacctcttggtctttgaataaagcctgagtaggaaggctagcaaaaaaaaaaaaaaaaaaaaaaaaaaaaaaaaaaaaaaaaaaaaaaaaaaaaaaaaaaaaaaaaaaaaaaaaaaaaaaaa

SEQ ID NO: 13481 - RNA, 5785 nt, synthetic construct
  source 1..5785: mol_type = other RNA
aggaaataagagagaaaagaagagtaagaagaaatataagagccaccatggcccctaagaagaagcgtaaagtgagccggatggaacgcctcgtctacgaggtgcggcagaagtgcagaaacatcgaggacatctgcatctcctgcggatctctgaacgtgaccctggagcacccactgttcatcggcggcatgtgccagaactgtaaaaactgttttctggagtgtgcctatcaatacgacgatgacggctaccagagctactgcaccatctgttgcggcggaagagaggtgctgatgtgtggaaataacaactgctgccggtgcttctgcgtggaatgcgtggacctgctggtgggccccggcgccgcccaggccgctattaaggaagatccttggaactgctacatgtgcggccacaagggcacatacggcctgctgagacggagagaggactggcctagcagactgcagatgttcttcgccaataaccacgaccaggagttcgacccccctaaggtgtaccctcccgtccccgccgagaagagaaagcccatccgggtcctgagcctgttcgatggcatcgccaccggtctgctggtgctgaaggacctgggcatccaggtggataggtacattgcctccgaggtgtgcgaggactccatcaccgtgggaatggtgcgtcatcagggcaagatcatgtacgtgggcgacgtgcggagcgtgacacagaagcatatccaggagtggggccctttcgacctggtgatcggcggcagcccttgcaatgacctgagcatcgtgaacccagcccggaagggcctgtacgagggaaccggcagactgttcttcgagttttacagactgctgcacgacgcccggcctaaggaaggcgacgaccggcccttcttttggctgttcgagaatgtggtggccatgggagtcagcgacaagcgggatattagccggttcctggagagcaaccccgtgatgatcgatgccaaggaagtgagcgccgcccaccgggccagatacttctggggcaatctgcctggcatgaacagacccctggccagcaccgtgaacgacaagctggagctgcaggagtgcctggagcacggccggatcgccaagttcagcaaggtgagaaccatcaccacccgaagcaacagcatcaaacaaggcaaggaccagcactttcctgtgttcatgaacgagaaggaggacatcctgtggtgtaccgagatggagagagtgttcgggttcccagtccactacacagatgtcagcaacatgtctagactggccagacagagactgctgggaagaagctggtccgtccctgtgatcagacacctgttcgcccctctgaaggagtacttcgcctgcgtgagcagcggcaacagcaacgccaacagccggggccccagcttctctagcggcctggtgccactgtccctgagagggagccacatgggccccatggagatctacaaaaccgtgagcgcctggaagcggcagcctgtgcgcgtgctgagcctgtttcggaatatcgataaagtcctgaaaagcctgggattcctggagagcggctctggctccggcggtggcaccctgaagtacgtggaggatgtgacaaacgtggtcagacgggatgtggagaagtggggccccttcgatctggtgtacggcagcacccaacccctgggcagctcttgtgaccggtgccctggctggtacatgtttcagttccaccggatcctgcagtacgccctgccgagacaggagtcccagcggccattcttttggattttcatggacaacttgctgctgaccgaggatgaccaggaaactaccactcggttcctgcagaccgaagccgtgaccctgcaggacgtgagaggccgggactaccagaacgccatgcgggtgtggtccaacatccctggactgaaaagcaagcacgcacctctgacccctaaagaagaggagtacctgcaggcccaggtgcggagcagaagcaagctggacgcccctaaggtggatctgctggtgaagaattgcctcctgcccctgagagagtacttcaagtatttcagccagaatagtctgcccctgggaggcagcggcggcggcaagccctgggccgtgaacttcgccgacgtggccgtgtacttcagccccgaggagtggaggtacctgaggcccgcccagagggccctgtacagggaggtgatgagggagacctacggcctgctggcctacctggacgtgggctgcgccaagcccgccctgatctgctgggtggaggaggagagcgaggtgtggggcccctgcgcccaggaccccgaggtggccatgtgcaggaccgaggtgcacggcggcccaagcagcggcgcccctcctcccagcggcggcagcccagccggctccccaacctctaccgaggagggcacctctgagtccgccacccccgagagcggccctggcacctccaccgagcccagcgagggcagcgcacccggcagccctgccggcagccccacctccacagaggagggaaccagcaccgagcccagcgaaggcagcgccccaggcaccagcaccgagcctagtgagcaggagattaaacggatcaacaagatcagaagaagacttgtgaaagacagcaacaccaagaaggccggcaagacaggccccatgaaaaccctgctggttagagtgatgacacccgatctgagagagcggctggaaaacctgagaaagaagcctgaaaatatcccccagcccatcagcaatacatctagagccaacctgaataagctgctgaccgattacaccgaaatgaagaaggcgatcctgcatgtgtactgggaagagttccagaaggaccctgtgggcctgatgagccgggtggcccagcctgccagcaagaagatcgatcagaacaagctgaaacctgagatggacgagaagggcaacctgaccaccgccggctttgcctgctctcagtgtggccagcccctgttcgtgtacaagctggagcaggtgtctgagaagggcaaggcttacaccaactacttcggacggtgcaatgtggccgagcacgaaaagctgatcctgctggcccagctgaagcccgagaaggatagcgacgaagccgtgacatatagcctgggaaagtttgggcagagggccctggatttctacagcattcatgtgaccaaggagtccacccaccccgtgaagcccctggcccagatcgccggaaacagatacgcctccggacctgtgggaaaggccctgagcgacgcatgtatgggcacaatcgcctccttcctgtctaagtaccaggacatcatcatcgaacaccagaaggtggtgaagggcaaccagaagagactggagagcctgcgggagctggccggcaaggaaaacctggaataccctagcgtgaccctgccacctcagcctcacaccaaggagggcgttgatgcctacaacgaagtgatcgcccgggtgcgaatgtgggtgaacctgaacctgtggcagaagctgaagctaagcagagatgatgccaagcctctgctgagactgaagggattcccttcctttcctctggtcgagagacaggccaacgaagtggactggtgggacatggtgtgtaacgtgaagaagctgatcaacgagaaaaaggaggatggcaaggtgttttggcagaatctggctggctacaagagacaggaagccctgagaccatacctgagcagcgaggaagatcggaagaagggaaagaaattcgctcggtaccagctgggcgacctgctgctgcacctggaaaagaagcacggcgaggactggggaaaggtgtacgacgaggcctgggagcggattgacaagaaagtggaaggcctgagcaagcacatcaagctggaagaggaacggagaagcgaggacgcccagagcaaggccgccctgaccgactggctgcgggctaaggccagcttcgtgatcgagggcctgaaggaggccgacaaggacgagttctgcagatgcgagctgaagctgcagaagtggtacggggacctgcggggaaagcccttcgccatcgaagccgagaacagcatcctggacatcagcggcttcagcaagcagtacaactgtgccttcatctggcagaaggacggcgtgaagaagctgaacctgtacctgatcatcaactacttcaagggcggcaagctgcggttcaagaagatcaaacctgaagccttcgaagccaacagattctacaccgtgatcaacaaaaagagcggcgagatcgtgcccatggaggtgaacttcaacttcgacgaccccaacctgatcatcctgcctctggcctttggcaagagacagggcagagaattcatctggaacgacctgctgtccctggaaaccggcagcctgaagctggccaacggaagagtgatcgagaagacactgtacaacagaagaacccggcaggatgagcctgccctgttcgtggccctgaccttcgagcggcgggaggtcctggactcctccaatatcaaaccaatgaacctgatcggcgtggcaagaggcgaaaacatccccgccgtgatcgccctgaccgaccccgagggctgcccactgagccggtttaaggatagcctgggaaacccaacccacatcctgagaatcggcgagagctataaggagaagcagcggaccatccaggccaagaaggaggtggagcagcggagagccggcggctacagccggaagtacgccagcaaagccaagaatctggcagacgatatggtgagaaacaccgctagagatctgctgtactacgccgtgacccaggatgccatgctgatcttcgccaacctgagccggggcttcggccggcagggcaagcggaccttcatggccgagagacagtacacacggatggaggactggctgaccgccaagctggcctacgagggcctgagcaagacctacctgtccaagacactggcccagtacacctccaagacatgcagcaactgtgggtttaccatcaccagcgccgactacgacagggtgctggagaagctgaagaagacagcaacaggctggatgaccacaattaacggcaaggagctgaaggtggagggccagattacctactacaacagatacaagagacagaacgtagtcaaggacctgtccgtcgagctggatagactgagcgaagaatctgtgaacaacgacatctcctcctggacaaagggcagaagcggagaagctctgagcctcctgaagaaaagattctcccatagacccgtgcaggagaagttcgtgtgcctgaactgcggcttcgagacacacgcagccgagcaagccgccctgaacatcgccagatcctggctgttcctgcggagccaggagtacaagaaataccagacaaacaagacaaccggcaacaccgataagagagccttcgtcgagacctggcagtccttttaccggaagaagcttaaggaggtgtggaaacctgccgtgcggtctggcggatctggcggaggctccaccagccccaagaaaaagagaaaagtctaagctgccttctgcggggcttgccttctggccatgcccttcttctctcccttgcacctgtacctcttggtctttgaataaagcctgagtaggaaggctagcaaaaaaaaaaaaaaaaaaaaaaaaaaaaaaaaaaaaaaaaaaaaaaaaaaaaaaaaaaaaaaaaaaaaaaaaaaaaaaaa

SEQ ID NO: 13482 - RNA, 5785 nt, synthetic construct
  source 1..5785: mol_type = other RNA
aggaaataagagagaaaagaagagtaagaagaaatataagagccaccatggcccctaagaagaagcgtaaagtgagccggatggaacgcctcgtctacgaggtgcggcagaagtgcagaaacatcgaggacatctgcatctcctgcggatctctgaacgtgaccctggagcacccactgttcatcggcggcatgtgccagaactgtaaaaactgttttctggagtgtgcctatcaatacgacgatgacggctaccagagctactgcaccatctgttgcggcggaagagaggtgctgatgtgtggaaataacaactgctgccggtgcttctgcgtggaatgcgtggacctgctggtgggccccggcgccgcccaggccgctattaaggaagatccttggaactgctacatgtgcggccacaagggcacatacggcctgctgagacggagagaggactggcctagcagactgcagatgttcttcgccaataaccacgaccaggagttcgacccccctaaggtgtaccctcccgtccccgccgagaagagaaagcccatccgggtcctgagcctgttcgatggcatcgccaccggtctgctggtgctgaaggacctgggcatccaggtggataggtacattgcctccgaggtgtgcgaggactccatcaccgtgggaatggtgcgtcatcagggcaagatcatgtacgtgggcgacgtgcggagcgtgacacagaagcatatccaggagtggggccctttcgacctggtgatcggcggcagcccttgcaatgacctgagcatcgtgaacccagcccggaagggcctgtacgagggaaccggcagactgttcttcgagttttacagactgctgcacgacgcccggcctaaggaaggcgacgaccggcccttcttttggctgttcgagaatgtggtggccatgggagtcagcgacaagcgggatattagccggttcctggagagcaaccccgtgatgatcgatgccaaggaagtgagcgccgcccaccgggccagatacttctggggcaatctgcctggcatgaacagacccctggccagcaccgtgaacgacaagctggagctgcaggagtgcctggagcacggccggatcgccaagttcagcaaggtgagaaccatcaccacccgaagcaacagcatcaaacaaggcaaggaccagcactttcctgtgttcatgaacgagaaggaggacatcctgtggtgtaccgagatggagagagtgttcgggttcccagtccactacacagatgtcagcaacatgtctagactggccagacagagactgctgggaagaagctggtccgtccctgtgatcagacacctgttcgcccctctgaaggagtacttcgcctgcgtgagcagcggcaacagcaacgccaacagccggggccccagcttctctagcggcctggtgccactgtccctgagagggagccacatgggccccatggagatctacaaaaccgtgagcgcctggaagcggcagcctgtgcgcgtgctgagcctgtttcggaatatcgataaagtcctgaaaagcctgggattcctggagagcggctctggctccggcggtggcaccctgaagtacgtggaggatgtgacaaacgtggtcagacgggatgtggagaagtggggccccttcgatctggtgtacggcagcacccaacccctgggcagctcttgtgaccggtgccctggctggtacatgtttcagttccaccggatcctgcagtacgccctgccgagacaggagtcccagcggccattcttttggattttcatggacaacttgctgctgaccgaggatgaccaggaaactaccactcggttcctgcagaccgaagccgtgaccctgcaggacgtgagaggccgggactaccagaacgccatgcgggtgtggtccaacatccctggactgaaaagcaagcacgcacctctgacccctaaagaagaggagtacctgcaggcccaggtgcggagcagaagcaagctggacgcccctaaggtggatctgctggtgaagaattgcctcctgcccctgagagagtacttcaagtatttcagccagaatagtctgcccctgggaggcagcggcggcggcagccagatccccctgaccttccaggacgtggccgtggacttcacctgggaggagtggggcctgctggagcccagccagaaggacatgtactgggacgtgatgctggagaactacgagaacttcgtgagcctgggcggcatccccgtgagcttccccgacgtgatcagccagatggagaggatcgaggccccctggatgaccgagaggggcgtgctggtgagcgccttcctggacagccccaacggcggcccaagcagcggcgcccctcctcccagcggcggcagcccagccggctccccaacctctaccgaggagggcacctctgagtccgccacccccgagagcggccctggcacctccaccgagcccagcgagggcagcgcacccggcagccctgccggcagccccacctccacagaggagggaaccagcaccgagcccagcgaaggcagcgccccaggcaccagcaccgagcctagtgagcaggagattaaacggatcaacaagatcagaagaagacttgtgaaagacagcaacaccaagaaggccggcaagacaggccccatgaaaaccctgctggttagagtgatgacacccgatctgagagagcggctggaaaacctgagaaagaagcctgaaaatatcccccagcccatcagcaatacatctagagccaacctgaataagctgctgaccgattacaccgaaatgaagaaggcgatcctgcatgtgtactgggaagagttccagaaggaccctgtgggcctgatgagccgggtggcccagcctgccagcaagaagatcgatcagaacaagctgaaacctgagatggacgagaagggcaacctgaccaccgccggctttgcctgctctcagtgtggccagcccctgttcgtgtacaagctggagcaggtgtctgagaagggcaaggcttacaccaactacttcggacggtgcaatgtggccgagcacgaaaagctgatcctgctggcccagctgaagcccgagaaggatagcgacgaagccgtgacatatagcctgggaaagtttgggcagagggccctggatttctacagcattcatgtgaccaaggagtccacccaccccgtgaagcccctggcccagatcgccggaaacagatacgcctccggacctgtgggaaaggccctgagcgacgcatgtatgggcacaatcgcctccttcctgtctaagtaccaggacatcatcatcgaacaccagaaggtggtgaagggcaaccagaagagactggagagcctgcgggagctggccggcaaggaaaacctggaataccctagcgtgaccctgccacctcagcctcacaccaaggagggcgttgatgcctacaacgaagtgatcgcccgggtgcgaatgtgggtgaacctgaacctgtggcagaagctgaagctaagcagagatgatgccaagcctctgctgagactgaagggattcccttcctttcctctggtcgagagacaggccaacgaagtggactggtgggacatggtgtgtaacgtgaagaagctgatcaacgagaaaaaggaggatggcaaggtgttttggcagaatctggctggctacaagagacaggaagccctgagaccatacctgagcagcgaggaagatcggaagaagggaaagaaattcgctcggtaccagctgggcgacctgctgctgcacctggaaaagaagcacggcgaggactggggaaaggtgtacgacgaggcctgggagcggattgacaagaaagtggaaggcctgagcaagcacatcaagctggaagaggaacggagaagcgaggacgcccagagcaaggccgccctgaccgactggctgcgggctaaggccagcttcgtgatcgagggcctgaaggaggccgacaaggacgagttctgcagatgcgagctgaagctgcagaagtggtacggggacctgcggggaaagcccttcgccatcgaagccgagaacagcatcctggacatcagcggcttcagcaagcagtacaactgtgccttcatctggcagaaggacggcgtgaagaagctgaacctgtacctgatcatcaactacttcaagggcggcaagctgcggttcaagaagatcaaacctgaagccttcgaagccaacagattctacaccgtgatcaacaaaaagagcggcgagatcgtgcccatggaggtgaacttcaacttcgacgaccccaacctgatcatcctgcctctggcctttggcaagagacagggcagagaattcatctggaacgacctgctgtccctggaaaccggcagcctgaagctggccaacggaagagtgatcgagaagacactgtacaacagaagaacccggcaggatgagcctgccctgttcgtggccctgaccttcgagcggcgggaggtcctggactcctccaatatcaaaccaatgaacctgatcggcgtggcaagaggcgaaaacatccccgccgtgatcgccctgaccgaccccgagggctgcccactgagccggtttaaggatagcctgggaaacccaacccacatcctgagaatcggcgagagctataaggagaagcagcggaccatccaggccaagaaggaggtggagcagcggagagccggcggctacagccggaagtacgccagcaaagccaagaatctggcagacgatatggtgagaaacaccgctagagatctgctgtactacgccgtgacccaggatgccatgctgatcttcgccaacctgagccggggcttcggccggcagggcaagcggaccttcatggccgagagacagtacacacggatggaggactggctgaccgccaagctggcctacgagggcctgagcaagacctacctgtccaagacactggcccagtacacctccaagacatgcagcaactgtgggtttaccatcaccagcgccgactacgacagggtgctggagaagctgaagaagacagcaacaggctggatgaccacaattaacggcaaggagctgaaggtggagggccagattacctactacaacagatacaagagacagaacgtagtcaaggacctgtccgtcgagctggatagactgagcgaagaatctgtgaacaacgacatctcctcctggacaaagggcagaagcggagaagctctgagcctcctgaagaaaagattctcccatagacccgtgcaggagaagttcgtgtgcctgaactgcggcttcgagacacacgcagccgagcaagccgccctgaacatcgccagatcctggctgttcctgcggagccaggagtacaagaaataccagacaaacaagacaaccggcaacaccgataagagagccttcgtcgagacctggcagtccttttaccggaagaagcttaaggaggtgtggaaacctgccgtgcggtctggcggatctggcggaggctccaccagccccaagaaaaagagaaaagtctaagctgccttctgcggggcttgccttctggccatgcccttcttctctcccttgcacctgtacctcttggtctttgaataaagcctgagtaggaaggctagcaaaaaaaaaaaaaaaaaaaaaaaaaaaaaaaaaaaaaaaaaaaaaaaaaaaaaaaaaaaaaaaaaaaaaaaaaaaaaaaa

SEQ ID NO: 13483 - RNA, 5785 nt, synthetic construct
  source 1..5785: mol_type = other RNA
aggaaataagagagaaaagaagagtaagaagaaatataagagccaccatggcccctaagaagaagcgtaaagtgagccggatggaacgcctcgtctacgaggtgcggcagaagtgcagaaacatcgaggacatctgcatctcctgcggatctctgaacgtgaccctggagcacccactgttcatcggcggcatgtgccagaactgtaaaaactgttttctggagtgtgcctatcaatacgacgatgacggctaccagagctactgcaccatctgttgcggcggaagagaggtgctgatgtgtggaaataacaactgctgccggtgcttctgcgtggaatgcgtggacctgctggtgggccccggcgccgcccaggccgctattaaggaagatccttggaactgctacatgtgcggccacaagggcacatacggcctgctgagacggagagaggactggcctagcagactgcagatgttcttcgccaataaccacgaccaggagttcgacccccctaaggtgtaccctcccgtccccgccgagaagagaaagcccatccgggtcctgagcctgttcgatggcatcgccaccggtctgctggtgctgaaggacctgggcatccaggtggataggtacattgcctccgaggtgtgcgaggactccatcaccgtgggaatggtgcgtcatcagggcaagatcatgtacgtgggcgacgtgcggagcgtgacacagaagcatatccaggagtggggccctttcgacctggtgatcggcggcagcccttgcaatgacctgagcatcgtgaacccagcccggaagggcctgtacgagggaaccggcagactgttcttcgagttttacagactgctgcacgacgcccggcctaaggaaggcgacgaccggcccttcttttggctgttcgagaatgtggtggccatgggagtcagcgacaagcgggatattagccggttcctggagagcaaccccgtgatgatcgatgccaaggaagtgagcgccgcccaccgggccagatacttctggggcaatctgcctggcatgaacagacccctggccagcaccgtgaacgacaagctggagctgcaggagtgcctggagcacggccggatcgccaagttcagcaaggtgagaaccatcaccacccgaagcaacagcatcaaacaaggcaaggaccagcactttcctgtgttcatgaacgagaaggaggacatcctgtggtgtaccgagatggagagagtgttcgggttcccagtccactacacagatgtcagcaacatgtctagactggccagacagagactgctgggaagaagctggtccgtccctgtgatcagacacctgttcgcccctctgaaggagtacttcgcctgcgtgagcagcggcaacagcaacgccaacagccggggccccagcttctctagcggcctggtgccactgtccctgagagggagccacatgggccccatggagatctacaaaaccgtgagcgcctggaagcggcagcctgtgcgcgtgctgagcctgtttcggaatatcgataaagtcctgaaaagcctgggattcctggagagcggctctggctccggcggtggcaccctgaagtacgtggaggatgtgacaaacgtggtcagacgggatgtggagaagtggggccccttcgatctggtgtacggcagcacccaacccctgggcagctcttgtgaccggtgccctggctggtacatgtttcagttccaccggatcctgcagtacgccctgccgagacaggagtcccagcggccattcttttggattttcatggacaacttgctgctgaccgaggatgaccaggaaactaccactcggttcctgcagaccgaagccgtgaccctgcaggacgtgagaggccgggactaccagaacgccatgcgggtgtggtccaacatccctggactgaaaagcaagcacgcacctctgacccctaaagaagaggagtacctgcaggcccaggtgcggagcagaagcaagctggacgcccctaaggtggatctgctggtgaagaattgcctcctgcccctgagagagtacttcaagtatttcagccagaatagtctgcccctgggaggcagcggcggcggcttccaggaggccgtgaccttcaaggacgtggccgtggccttcaccgaggaggagctgggcctgctggacagcgcccagaggaagctgtacagggacgtgatgctggagaacttcaggaacctggtgagcgtgggccaccagagcttcaagcccgacatgatcagccagctggagagggaggagaagctgtggatgaaggagttccagacccagaggggcaagcacagcggcttcctgtgcttcggcggcccaagcagcggcgcccctcctcccagcggcggcagcccagccggctccccaacctctaccgaggagggcacctctgagtccgccacccccgagagcggccctggcacctccaccgagcccagcgagggcagcgcacccggcagccctgccggcagccccacctccacagaggagggaaccagcaccgagcccagcgaaggcagcgccccaggcaccagcaccgagcctagtgagcaggagattaaacggatcaacaagatcagaagaagacttgtgaaagacagcaacaccaagaaggccggcaagacaggccccatgaaaaccctgctggttagagtgatgacacccgatctgagagagcggctggaaaacctgagaaagaagcctgaaaatatcccccagcccatcagcaatacatctagagccaacctgaataagctgctgaccgattacaccgaaatgaagaaggcgatcctgcatgtgtactgggaagagttccagaaggaccctgtgggcctgatgagccgggtggcccagcctgccagcaagaagatcgatcagaacaagctgaaacctgagatggacgagaagggcaacctgaccaccgccggctttgcctgctctcagtgtggccagcccctgttcgtgtacaagctggagcaggtgtctgagaagggcaaggcttacaccaactacttcggacggtgcaatgtggccgagcacgaaaagctgatcctgctggcccagctgaagcccgagaaggatagcgacgaagccgtgacatatagcctgggaaagtttgggcagagggccctggatttctacagcattcatgtgaccaaggagtccacccaccccgtgaagcccctggcccagatcgccggaaacagatacgcctccggacctgtgggaaaggccctgagcgacgcatgtatgggcacaatcgcctccttcctgtctaagtaccaggacatcatcatcgaacaccagaaggtggtgaagggcaaccagaagagactggagagcctgcgggagctggccggcaaggaaaacctggaataccctagcgtgaccctgccacctcagcctcacaccaaggagggcgttgatgcctacaacgaagtgatcgcccgggtgcgaatgtgggtgaacctgaacctgtggcagaagctgaagctaagcagagatgatgccaagcctctgctgagactgaagggattcccttcctttcctctggtcgagagacaggccaacgaagtggactggtgggacatggtgtgtaacgtgaagaagctgatcaacgagaaaaaggaggatggcaaggtgttttggcagaatctggctggctacaagagacaggaagccctgagaccatacctgagcagcgaggaagatcggaagaagggaaagaaattcgctcggtaccagctgggcgacctgctgctgcacctggaaaagaagcacggcgaggactggggaaaggtgtacgacgaggcctgggagcggattgacaagaaagtggaaggcctgagcaagcacatcaagctggaagaggaacggagaagcgaggacgcccagagcaaggccgccctgaccgactggctgcgggctaaggccagcttcgtgatcgagggcctgaaggaggccgacaaggacgagttctgcagatgcgagctgaagctgcagaagtggtacggggacctgcggggaaagcccttcgccatcgaagccgagaacagcatcctggacatcagcggcttcagcaagcagtacaactgtgccttcatctggcagaaggacggcgtgaagaagctgaacctgtacctgatcatcaactacttcaagggcggcaagctgcggttcaagaagatcaaacctgaagccttcgaagccaacagattctacaccgtgatcaacaaaaagagcggcgagatcgtgcccatggaggtgaacttcaacttcgacgaccccaacctgatcatcctgcctctggcctttggcaagagacagggcagagaattcatctggaacgacctgctgtccctggaaaccggcagcctgaagctggccaacggaagagtgatcgagaagacactgtacaacagaagaacccggcaggatgagcctgccctgttcgtggccctgaccttcgagcggcgggaggtcctggactcctccaatatcaaaccaatgaacctgatcggcgtggcaagaggcgaaaacatccccgccgtgatcgccctgaccgaccccgagggctgcccactgagccggtttaaggatagcctgggaaacccaacccacatcctgagaatcggcgagagctataaggagaagcagcggaccatccaggccaagaaggaggtggagcagcggagagccggcggctacagccggaagtacgccagcaaagccaagaatctggcagacgatatggtgagaaacaccgctagagatctgctgtactacgccgtgacccaggatgccatgctgatcttcgccaacctgagccggggcttcggccggcagggcaagcggaccttcatggccgagagacagtacacacggatggaggactggctgaccgccaagctggcctacgagggcctgagcaagacctacctgtccaagacactggcccagtacacctccaagacatgcagcaactgtgggtttaccatcaccagcgccgactacgacagggtgctggagaagctgaagaagacagcaacaggctggatgaccacaattaacggcaaggagctgaaggtggagggccagattacctactacaacagatacaagagacagaacgtagtcaaggacctgtccgtcgagctggatagactgagcgaagaatctgtgaacaacgacatctcctcctggacaaagggcagaagcggagaagctctgagcctcctgaagaaaagattctcccatagacccgtgcaggagaagttcgtgtgcctgaactgcggcttcgagacacacgcagccgagcaagccgccctgaacatcgccagatcctggctgttcctgcggagccaggagtacaagaaataccagacaaacaagacaaccggcaacaccgataagagagccttcgtcgagacctggcagtccttttaccggaagaagcttaaggaggtgtggaaacctgccgtgcggtctggcggatctggcggaggctccaccagccccaagaaaaagagaaaagtctaagctgccttctgcggggcttgccttctggccatgcccttcttctctcccttgcacctgtacctcttggtctttgaataaagcctgagtaggaaggctagcaaaaaaaaaaaaaaaaaaaaaaaaaaaaaaaaaaaaaaaaaaaaaaaaaaaaaaaaaaaaaaaaaaaaaaaaaaaaaaaa

SEQ ID NO: 13484 - RNA, 5785 nt, synthetic construct
  source 1..5785: mol_type = other RNA
aggaaataagagagaaaagaagagtaagaagaaatataagagccaccatggcccctaagaagaagcgtaaagtgagccggatggaacgcctcgtctacgaggtgcggcagaagtgcagaaacatcgaggacatctgcatctcctgcggatctctgaacgtgaccctggagcacccactgttcatcggcggcatgtgccagaactgtaaaaactgttttctggagtgtgcctatcaatacgacgatgacggctaccagagctactgcaccatctgttgcggcggaagagaggtgctgatgtgtggaaataacaactgctgccggtgcttctgcgtggaatgcgtggacctgctggtgggccccggcgccgcccaggccgctattaaggaagatccttggaactgctacatgtgcggccacaagggcacatacggcctgctgagacggagagaggactggcctagcagactgcagatgttcttcgccaataaccacgaccaggagttcgacccccctaaggtgtaccctcccgtccccgccgagaagagaaagcccatccgggtcctgagcctgttcgatggcatcgccaccggtctgctggtgctgaaggacctgggcatccaggtggataggtacattgcctccgaggtgtgcgaggactccatcaccgtgggaatggtgcgtcatcagggcaagatcatgtacgtgggcgacgtgcggagcgtgacacagaagcatatccaggagtggggccctttcgacctggtgatcggcggcagcccttgcaatgacctgagcatcgtgaacccagcccggaagggcctgtacgagggaaccggcagactgttcttcgagttttacagactgctgcacgacgcccggcctaaggaaggcgacgaccggcccttcttttggctgttcgagaatgtggtggccatgggagtcagcgacaagcgggatattagccggttcctggagagcaaccccgtgatgatcgatgccaaggaagtgagcgccgcccaccgggccagatacttctggggcaatctgcctggcatgaacagacccctggccagcaccgtgaacgacaagctggagctgcaggagtgcctggagcacggccggatcgccaagttcagcaaggtgagaaccatcaccacccgaagcaacagcatcaaacaaggcaaggaccagcactttcctgtgttcatgaacgagaaggaggacatcctgtggtgtaccgagatggagagagtgttcgggttcccagtccactacacagatgtcagcaacatgtctagactggccagacagagactgctgggaagaagctggtccgtccctgtgatcagacacctgttcgcccctctgaaggagtacttcgcctgcgtgagcagcggcaacagcaacgccaacagccggggccccagcttctctagcggcctggtgccactgtccctgagagggagccacatgggccccatggagatctacaaaaccgtgagcgcctggaagcggcagcctgtgcgcgtgctgagcctgtttcggaatatcgataaagtcctgaaaagcctgggattcctggagagcggctctggctccggcggtggcaccctgaagtacgtggaggatgtgacaaacgtggtcagacgggatgtggagaagtggggccccttcgatctggtgtacggcagcacccaacccctgggcagctcttgtgaccggtgccctggctggtacatgtttcagttccaccggatcctgcagtacgccctgccgagacaggagtcccagcggccattcttttggattttcatggacaacttgctgctgaccgaggatgaccaggaaactaccactcggttcctgcagaccgaagccgtgaccctgcaggacgtgagaggccgggactaccagaacgccatgcgggtgtggtccaacatccctggactgaaaagcaagcacgcacctctgacccctaaagaagaggagtacctgcaggcccaggtgcggagcagaagcaagctggacgcccctaaggtggatctgctggtgaagaattgcctcctgcccctgagagagtacttcaagtatttcagccagaatagtctgcccctgggaggcagcggcggcggcagcctgggcagcgtgaccttcaccgacgtggccatcgacttcagccaggacgagtgggagtggctgaacctggcccagaggagcctgtacaagaaggtgatgctggagaactacaggaacctggtgagcgtgggcctgtgcatcagcaagcccgtggtgatcagcctgctggagcaggagaaggacccctgggtgatcaagggcggcatgaacaggggcctgtgccccgacctggagtgcgtgggcggcccaagcagcggcgcccctcctcccagcggcggcagcccagccggctccccaacctctaccgaggagggcacctctgagtccgccacccccgagagcggccctggcacctccaccgagcccagcgagggcagcgcacccggcagccctgccggcagccccacctccacagaggagggaaccagcaccgagcccagcgaaggcagcgccccaggcaccagcaccgagcctagtgagcaggagattaaacggatcaacaagatcagaagaagacttgtgaaagacagcaacaccaagaaggccggcaagacaggccccatgaaaaccctgctggttagagtgatgacacccgatctgagagagcggctggaaaacctgagaaagaagcctgaaaatatcccccagcccatcagcaatacatctagagccaacctgaataagctgctgaccgattacaccgaaatgaagaaggcgatcctgcatgtgtactgggaagagttccagaaggaccctgtgggcctgatgagccgggtggcccagcctgccagcaagaagatcgatcagaacaagctgaaacctgagatggacgagaagggcaacctgaccaccgccggctttgcctgctctcagtgtggccagcccctgttcgtgtacaagctggagcaggtgtctgagaagggcaaggcttacaccaactacttcggacggtgcaatgtggccgagcacgaaaagctgatcctgctggcccagctgaagcccgagaaggatagcgacgaagccgtgacatatagcctgggaaagtttgggcagagggccctggatttctacagcattcatgtgaccaaggagtccacccaccccgtgaagcccctggcccagatcgccggaaacagatacgcctccggacctgtgggaaaggccctgagcgacgcatgtatgggcacaatcgcctccttcctgtctaagtaccaggacatcatcatcgaacaccagaaggtggtgaagggcaaccagaagagactggagagcctgcgggagctggccggcaaggaaaacctggaataccctagcgtgaccctgccacctcagcctcacaccaaggagggcgttgatgcctacaacgaagtgatcgcccgggtgcgaatgtgggtgaacctgaacctgtggcagaagctgaagctaagcagagatgatgccaagcctctgctgagactgaagggattcccttcctttcctctggtcgagagacaggccaacgaagtggactggtgggacatggtgtgtaacgtgaagaagctgatcaacgagaaaaaggaggatggcaaggtgttttggcagaatctggctggctacaagagacaggaagccctgagaccatacctgagcagcgaggaagatcggaagaagggaaagaaattcgctcggtaccagctgggcgacctgctgctgcacctggaaaagaagcacggcgaggactggggaaaggtgtacgacgaggcctgggagcggattgacaagaaagtggaaggcctgagcaagcacatcaagctggaagaggaacggagaagcgaggacgcccagagcaaggccgccctgaccgactggctgcgggctaaggccagcttcgtgatcgagggcctgaaggaggccgacaaggacgagttctgcagatgcgagctgaagctgcagaagtggtacggggacctgcggggaaagcccttcgccatcgaagccgagaacagcatcctggacatcagcggcttcagcaagcagtacaactgtgccttcatctggcagaaggacggcgtgaagaagctgaacctgtacctgatcatcaactacttcaagggcggcaagctgcggttcaagaagatcaaacctgaagccttcgaagccaacagattctacaccgtgatcaacaaaaagagcggcgagatcgtgcccatggaggtgaacttcaacttcgacgaccccaacctgatcatcctgcctctggcctttggcaagagacagggcagagaattcatctggaacgacctgctgtccctggaaaccggcagcctgaagctggccaacggaagagtgatcgagaagacactgtacaacagaagaacccggcaggatgagcctgccctgttcgtggccctgaccttcgagcggcgggaggtcctggactcctccaatatcaaaccaatgaacctgatcggcgtggcaagaggcgaaaacatccccgccgtgatcgccctgaccgaccccgagggctgcccactgagccggtttaaggatagcctgggaaacccaacccacatcctgagaatcggcgagagctataaggagaagcagcggaccatccaggccaagaaggaggtggagcagcggagagccggcggctacagccggaagtacgccagcaaagccaagaatctggcagacgatatggtgagaaacaccgctagagatctgctgtactacgccgtgacccaggatgccatgctgatcttcgccaacctgagccggggcttcggccggcagggcaagcggaccttcatggccgagagacagtacacacggatggaggactggctgaccgccaagctggcctacgagggcctgagcaagacctacctgtccaagacactggcccagtacacctccaagacatgcagcaactgtgggtttaccatcaccagcgccgactacgacagggtgctggagaagctgaagaagacagcaacaggctggatgaccacaattaacggcaaggagctgaaggtggagggccagattacctactacaacagatacaagagacagaacgtagtcaaggacctgtccgtcgagctggatagactgagcgaagaatctgtgaacaacgacatctcctcctggacaaagggcagaagcggagaagctctgagcctcctgaagaaaagattctcccatagacccgtgcaggagaagttcgtgtgcctgaactgcggcttcgagacacacgcagccgagcaagccgccctgaacatcgccagatcctggctgttcctgcggagccaggagtacaagaaataccagacaaacaagacaaccggcaacaccgataagagagccttcgtcgagacctggcagtccttttaccggaagaagcttaaggaggtgtggaaacctgccgtgcggtctggcggatctggcggaggctccaccagccccaagaaaaagagaaaagtctaagctgccttctgcggggcttgccttctggccatgcccttcttctctcccttgcacctgtacctcttggtctttgaataaagcctgagtaggaaggctagcaaaaaaaaaaaaaaaaaaaaaaaaaaaaaaaaaaaaaaaaaaaaaaaaaaaaaaaaaaaaaaaaaaaaaaaaaaaaaaaa

SEQ ID NO: 13485 - RNA, 5785 nt, synthetic construct
  source 1..5785: mol_type = other RNA
aggaaataagagagaaaagaagagtaagaagaaatataagagccaccatggcccctaagaagaagcgtaaagtgagccggatggaacgcctcgtctacgaggtgcggcagaagtgcagaaacatcgaggacatctgcatctcctgcggatctctgaacgtgaccctggagcacccactgttcatcggcggcatgtgccagaactgtaaaaactgttttctggagtgtgcctatcaatacgacgatgacggctaccagagctactgcaccatctgttgcggcggaagagaggtgctgatgtgtggaaataacaactgctgccggtgcttctgcgtggaatgcgtggacctgctggtgggccccggcgccgcccaggccgctattaaggaagatccttggaactgctacatgtgcggccacaagggcacatacggcctgctgagacggagagaggactggcctagcagactgcagatgttcttcgccaataaccacgaccaggagttcgacccccctaaggtgtaccctcccgtccccgccgagaagagaaagcccatccgggtcctgagcctgttcgatggcatcgccaccggtctgctggtgctgaaggacctgggcatccaggtggataggtacattgcctccgaggtgtgcgaggactccatcaccgtgggaatggtgcgtcatcagggcaagatcatgtacgtgggcgacgtgcggagcgtgacacagaagcatatccaggagtggggccctttcgacctggtgatcggcggcagcccttgcaatgacctgagcatcgtgaacccagcccggaagggcctgtacgagggaaccggcagactgttcttcgagttttacagactgctgcacgacgcccggcctaaggaaggcgacgaccggcccttcttttggctgttcgagaatgtggtggccatgggagtcagcgacaagcgggatattagccggttcctggagagcaaccccgtgatgatcgatgccaaggaagtgagcgccgcccaccgggccagatacttctggggcaatctgcctggcatgaacagacccctggccagcaccgtgaacgacaagctggagctgcaggagtgcctggagcacggccggatcgccaagttcagcaaggtgagaaccatcaccacccgaagcaacagcatcaaacaaggcaaggaccagcactttcctgtgttcatgaacgagaaggaggacatcctgtggtgtaccgagatggagagagtgttcgggttcccagtccactacacagatgtcagcaacatgtctagactggccagacagagactgctgggaagaagctggtccgtccctgtgatcagacacctgttcgcccctctgaaggagtacttcgcctgcgtgagcagcggcaacagcaacgccaacagccggggccccagcttctctagcggcctggtgccactgtccctgagagggagccacatgggccccatggagatctacaaaaccgtgagcgcctggaagcggcagcctgtgcgcgtgctgagcctgtttcggaatatcgataaagtcctgaaaagcctgggattcctggagagcggctctggctccggcggtggcaccctgaagtacgtggaggatgtgacaaacgtggtcagacgggatgtggagaagtggggccccttcgatctggtgtacggcagcacccaacccctgggcagctcttgtgaccggtgccctggctggtacatgtttcagttccaccggatcctgcagtacgccctgccgagacaggagtcccagcggccattcttttggattttcatggacaacttgctgctgaccgaggatgaccaggaaactaccactcggttcctgcagaccgaagccgtgaccctgcaggacgtgagaggccgggactaccagaacgccatgcgggtgtggtccaacatccctggactgaaaagcaagcacgcacctctgacccctaaagaagaggagtacctgcaggcccaggtgcggagcagaagcaagctggacgcccctaaggtggatctgctggtgaagaattgcctcctgcccctgagagagtacttcaagtatttcagccagaatagtctgcccctgggaggcagcggcggcggcatgggccccctgcagttcagggacgtggccatcgagttcagcctggaggagtggcactgcctggacaccgcccagaggaacctgtacaggaacgtgatgctggagaactacagcaacctggtgttcctgggcatcgtggtgagcaagcccgacctgatcaccaggctggagcagggcaagaagcccctgaccatgaagaggcacgagatggtggccaaccccagcggccccggcgtgttcgtgggcggcccaagcagcggcgcccctcctcccagcggcggcagcccagccggctccccaacctctaccgaggagggcacctctgagtccgccacccccgagagcggccctggcacctccaccgagcccagcgagggcagcgcacccggcagccctgccggcagccccacctccacagaggagggaaccagcaccgagcccagcgaaggcagcgccccaggcaccagcaccgagcctagtgagcaggagattaaacggatcaacaagatcagaagaagacttgtgaaagacagcaacaccaagaaggccggcaagacaggccccatgaaaaccctgctggttagagtgatgacacccgatctgagagagcggctggaaaacctgagaaagaagcctgaaaatatcccccagcccatcagcaatacatctagagccaacctgaataagctgctgaccgattacaccgaaatgaagaaggcgatcctgcatgtgtactgggaagagttccagaaggaccctgtgggcctgatgagccgggtggcccagcctgccagcaagaagatcgatcagaacaagctgaaacctgagatggacgagaagggcaacctgaccaccgccggctttgcctgctctcagtgtggccagcccctgttcgtgtacaagctggagcaggtgtctgagaagggcaaggcttacaccaactacttcggacggtgcaatgtggccgagcacgaaaagctgatcctgctggcccagctgaagcccgagaaggatagcgacgaagccgtgacatatagcctgggaaagtttgggcagagggccctggatttctacagcattcatgtgaccaaggagtccacccaccccgtgaagcccctggcccagatcgccggaaacagatacgcctccggacctgtgggaaaggccctgagcgacgcatgtatgggcacaatcgcctccttcctgtctaagtaccaggacatcatcatcgaacaccagaaggtggtgaagggcaaccagaagagactggagagcctgcgggagctggccggcaaggaaaacctggaataccctagcgtgaccctgccacctcagcctcacaccaaggagggcgttgatgcctacaacgaagtgatcgcccgggtgcgaatgtgggtgaacctgaacctgtggcagaagctgaagctaagcagagatgatgccaagcctctgctgagactgaagggattcccttcctttcctctggtcgagagacaggccaacgaagtggactggtgggacatggtgtgtaacgtgaagaagctgatcaacgagaaaaaggaggatggcaaggtgttttggcagaatctggctggctacaagagacaggaagccctgagaccatacctgagcagcgaggaagatcggaagaagggaaagaaattcgctcggtaccagctgggcgacctgctgctgcacctggaaaagaagcacggcgaggactggggaaaggtgtacgacgaggcctgggagcggattgacaagaaagtggaaggcctgagcaagcacatcaagctggaagaggaacggagaagcgaggacgcccagagcaaggccgccctgaccgactggctgcgggctaaggccagcttcgtgatcgagggcctgaaggaggccgacaaggacgagttctgcagatgcgagctgaagctgcagaagtggtacggggacctgcggggaaagcccttcgccatcgaagccgagaacagcatcctggacatcagcggcttcagcaagcagtacaactgtgccttcatctggcagaaggacggcgtgaagaagctgaacctgtacctgatcatcaactacttcaagggcggcaagctgcggttcaagaagatcaaacctgaagccttcgaagccaacagattctacaccgtgatcaacaaaaagagcggcgagatcgtgcccatggaggtgaacttcaacttcgacgaccccaacctgatcatcctgcctctggcctttggcaagagacagggcagagaattcatctggaacgacctgctgtccctggaaaccggcagcctgaagctggccaacggaagagtgatcgagaagacactgtacaacagaagaacccggcaggatgagcctgccctgttcgtggccctgaccttcgagcggcgggaggtcctggactcctccaatatcaaaccaatgaacctgatcggcgtggcaagaggcgaaaacatccccgccgtgatcgccctgaccgaccccgagggctgcccactgagccggtttaaggatagcctgggaaacccaacccacatcctgagaatcggcgagagctataaggagaagcagcggaccatccaggccaagaaggaggtggagcagcggagagccggcggctacagccggaagtacgccagcaaagccaagaatctggcagacgatatggtgagaaacaccgctagagatctgctgtactacgccgtgacccaggatgccatgctgatcttcgccaacctgagccggggcttcggccggcagggcaagcggaccttcatggccgagagacagtacacacggatggaggactggctgaccgccaagctggcctacgagggcctgagcaagacctacctgtccaagacactggcccagtacacctccaagacatgcagcaactgtgggtttaccatcaccagcgccgactacgacagggtgctggagaagctgaagaagacagcaacaggctggatgaccacaattaacggcaaggagctgaaggtggagggccagattacctactacaacagatacaagagacagaacgtagtcaaggacctgtccgtcgagctggatagactgagcgaagaatctgtgaacaacgacatctcctcctggacaaagggcagaagcggagaagctctgagcctcctgaagaaaagattctcccatagacccgtgcaggagaagttcgtgtgcctgaactgcggcttcgagacacacgcagccgagcaagccgccctgaacatcgccagatcctggctgttcctgcggagccaggagtacaagaaataccagacaaacaagacaaccggcaacaccgataagagagccttcgtcgagacctggcagtccttttaccggaagaagcttaaggaggtgtggaaacctgccgtgcggtctggcggatctggcggaggctccaccagccccaagaaaaagagaaaagtctaagctgccttctgcggggcttgccttctggccatgcccttcttctctcccttgcacctgtacctcttggtctttgaataaagcctgagtaggaaggctagcaaaaaaaaaaaaaaaaaaaaaaaaaaaaaaaaaaaaaaaaaaaaaaaaaaaaaaaaaaaaaaaaaaaaaaaaaaaaaaaa

SEQ ID NO: 13486 - RNA, 5785 nt, synthetic construct
  source 1..5785: mol_type = other RNA
aggaaataagagagaaaagaagagtaagaagaaatataagagccaccatggcccctaagaagaagcgtaaagtgagccggatggaacgcctcgtctacgaggtgcggcagaagtgcagaaacatcgaggacatctgcatctcctgcggatctctgaacgtgaccctggagcacccactgttcatcggcggcatgtgccagaactgtaaaaactgttttctggagtgtgcctatcaatacgacgatgacggctaccagagctactgcaccatctgttgcggcggaagagaggtgctgatgtgtggaaataacaactgctgccggtgcttctgcgtggaatgcgtggacctgctggtgggccccggcgccgcccaggccgctattaaggaagatccttggaactgctacatgtgcggccacaagggcacatacggcctgctgagacggagagaggactggcctagcagactgcagatgttcttcgccaataaccacgaccaggagttcgacccccctaaggtgtaccctcccgtccccgccgagaagagaaagcccatccgggtcctgagcctgttcgatggcatcgccaccggtctgctggtgctgaaggacctgggcatccaggtggataggtacattgcctccgaggtgtgcgaggactccatcaccgtgggaatggtgcgtcatcagggcaagatcatgtacgtgggcgacgtgcggagcgtgacacagaagcatatccaggagtggggccctttcgacctggtgatcggcggcagcccttgcaatgacctgagcatcgtgaacccagcccggaagggcctgtacgagggaaccggcagactgttcttcgagttttacagactgctgcacgacgcccggcctaaggaaggcgacgaccggcccttcttttggctgttcgagaatgtggtggccatgggagtcagcgacaagcgggatattagccggttcctggagagcaaccccgtgatgatcgatgccaaggaagtgagcgccgcccaccgggccagatacttctggggcaatctgcctggcatgaacagacccctggccagcaccgtgaacgacaagctggagctgcaggagtgcctggagcacggccggatcgccaagttcagcaaggtgagaaccatcaccacccgaagcaacagcatcaaacaaggcaaggaccagcactttcctgtgttcatgaacgagaaggaggacatcctgtggtgtaccgagatggagagagtgttcgggttcccagtccactacacagatgtcagcaacatgtctagactggccagacagagactgctgggaagaagctggtccgtccctgtgatcagacacctgttcgcccctctgaaggagtacttcgcctgcgtgagcagcggcaacagcaacgccaacagccggggccccagcttctctagcggcctggtgccactgtccctgagagggagccacatgggccccatggagatctacaaaaccgtgagcgcctggaagcggcagcctgtgcgcgtgctgagcctgtttcggaatatcgataaagtcctgaaaagcctgggattcctggagagcggctctggctccggcggtggcaccctgaagtacgtggaggatgtgacaaacgtggtcagacgggatgtggagaagtggggccccttcgatctggtgtacggcagcacccaacccctgggcagctcttgtgaccggtgccctggctggtacatgtttcagttccaccggatcctgcagtacgccctgccgagacaggagtcccagcggccattcttttggattttcatggacaacttgctgctgaccgaggatgaccaggaaactaccactcggttcctgcagaccgaagccgtgaccctgcaggacgtgagaggccgggactaccagaacgccatgcgggtgtggtccaacatccctggactgaaaagcaagcacgcacctctgacccctaaagaagaggagtacctgcaggcccaggtgcggagcagaagcaagctggacgcccctaaggtggatctgctggtgaagaattgcctcctgcccctgagagagtacttcaagtatttcagccagaatagtctgcccctgggaggcagcggcggcggctgctggggcctgctgagcttcaaggacatcagcatggacttcacctgggaggagtggcagctgctggacagcgcccagaagtacctgtacagggacgtgatcctggagaactacaggaacctggtgagcgtgggctaccacggcaccaagcccgacctgatcttcaagctggagcagggcgaggagccctggatcaggaacgccaagatcagcaggcccaggtgcagcgagggctggaaggagggcggcccaagcagcggcgcccctcctcccagcggcggcagcccagccggctccccaacctctaccgaggagggcacctctgagtccgccacccccgagagcggccctggcacctccaccgagcccagcgagggcagcgcacccggcagccctgccggcagccccacctccacagaggagggaaccagcaccgagcccagcgaaggcagcgccccaggcaccagcaccgagcctagtgagcaggagattaaacggatcaacaagatcagaagaagacttgtgaaagacagcaacaccaagaaggccggcaagacaggccccatgaaaaccctgctggttagagtgatgacacccgatctgagagagcggctggaaaacctgagaaagaagcctgaaaatatcccccagcccatcagcaatacatctagagccaacctgaataagctgctgaccgattacaccgaaatgaagaaggcgatcctgcatgtgtactgggaagagttccagaaggaccctgtgggcctgatgagccgggtggcccagcctgccagcaagaagatcgatcagaacaagctgaaacctgagatggacgagaagggcaacctgaccaccgccggctttgcctgctctcagtgtggccagcccctgttcgtgtacaagctggagcaggtgtctgagaagggcaaggcttacaccaactacttcggacggtgcaatgtggccgagcacgaaaagctgatcctgctggcccagctgaagcccgagaaggatagcgacgaagccgtgacatatagcctgggaaagtttgggcagagggccctggatttctacagcattcatgtgaccaaggagtccacccaccccgtgaagcccctggcccagatcgccggaaacagatacgcctccggacctgtgggaaaggccctgagcgacgcatgtatgggcacaatcgcctccttcctgtctaagtaccaggacatcatcatcgaacaccagaaggtggtgaagggcaaccagaagagactggagagcctgcgggagctggccggcaaggaaaacctggaataccctagcgtgaccctgccacctcagcctcacaccaaggagggcgttgatgcctacaacgaagtgatcgcccgggtgcgaatgtgggtgaacctgaacctgtggcagaagctgaagctaagcagagatgatgccaagcctctgctgagactgaagggattcccttcctttcctctggtcgagagacaggccaacgaagtggactggtgggacatggtgtgtaacgtgaagaagctgatcaacgagaaaaaggaggatggcaaggtgttttggcagaatctggctggctacaagagacaggaagccctgagaccatacctgagcagcgaggaagatcggaagaagggaaagaaattcgctcggtaccagctgggcgacctgctgctgcacctggaaaagaagcacggcgaggactggggaaaggtgtacgacgaggcctgggagcggattgacaagaaagtggaaggcctgagcaagcacatcaagctggaagaggaacggagaagcgaggacgcccagagcaaggccgccctgaccgactggctgcgggctaaggccagcttcgtgatcgagggcctgaaggaggccgacaaggacgagttctgcagatgcgagctgaagctgcagaagtggtacggggacctgcggggaaagcccttcgccatcgaagccgagaacagcatcctggacatcagcggcttcagcaagcagtacaactgtgccttcatctggcagaaggacggcgtgaagaagctgaacctgtacctgatcatcaactacttcaagggcggcaagctgcggttcaagaagatcaaacctgaagccttcgaagccaacagattctacaccgtgatcaacaaaaagagcggcgagatcgtgcccatggaggtgaacttcaacttcgacgaccccaacctgatcatcctgcctctggcctttggcaagagacagggcagagaattcatctggaacgacctgctgtccctggaaaccggcagcctgaagctggccaacggaagagtgatcgagaagacactgtacaacagaagaacccggcaggatgagcctgccctgttcgtggccctgaccttcgagcggcgggaggtcctggactcctccaatatcaaaccaatgaacctgatcggcgtggcaagaggcgaaaacatccccgccgtgatcgccctgaccgaccccgagggctgcccactgagccggtttaaggatagcctgggaaacccaacccacatcctgagaatcggcgagagctataaggagaagcagcggaccatccaggccaagaaggaggtggagcagcggagagccggcggctacagccggaagtacgccagcaaagccaagaatctggcagacgatatggtgagaaacaccgctagagatctgctgtactacgccgtgacccaggatgccatgctgatcttcgccaacctgagccggggcttcggccggcagggcaagcggaccttcatggccgagagacagtacacacggatggaggactggctgaccgccaagctggcctacgagggcctgagcaagacctacctgtccaagacactggcccagtacacctccaagacatgcagcaactgtgggtttaccatcaccagcgccgactacgacagggtgctggagaagctgaagaagacagcaacaggctggatgaccacaattaacggcaaggagctgaaggtggagggccagattacctactacaacagatacaagagacagaacgtagtcaaggacctgtccgtcgagctggatagactgagcgaagaatctgtgaacaacgacatctcctcctggacaaagggcagaagcggagaagctctgagcctcctgaagaaaagattctcccatagacccgtgcaggagaagttcgtgtgcctgaactgcggcttcgagacacacgcagccgagcaagccgccctgaacatcgccagatcctggctgttcctgcggagccaggagtacaagaaataccagacaaacaagacaaccggcaacaccgataagagagccttcgtcgagacctggcagtccttttaccggaagaagcttaaggaggtgtggaaacctgccgtgcggtctggcggatctggcggaggctccaccagccccaagaaaaagagaaaagtctaagctgccttctgcggggcttgccttctggccatgcccttcttctctcccttgcacctgtacctcttggtctttgaataaagcctgagtaggaaggctagcaaaaaaaaaaaaaaaaaaaaaaaaaaaaaaaaaaaaaaaaaaaaaaaaaaaaaaaaaaaaaaaaaaaaaaaaaaaaaaaa

SEQ ID NO: 13487 - RNA, 5785 nt, synthetic construct
  source 1..5785: mol_type = other RNA
aggaaataagagagaaaagaagagtaagaagaaatataagagccaccatggcccctaagaagaagcgtaaagtgagccggatggaacgcctcgtctacgaggtgcggcagaagtgcagaaacatcgaggacatctgcatctcctgcggatctctgaacgtgaccctggagcacccactgttcatcggcggcatgtgccagaactgtaaaaactgttttctggagtgtgcctatcaatacgacgatgacggctaccagagctactgcaccatctgttgcggcggaagagaggtgctgatgtgtggaaataacaactgctgccggtgcttctgcgtggaatgcgtggacctgctggtgggccccggcgccgcccaggccgctattaaggaagatccttggaactgctacatgtgcggccacaagggcacatacggcctgctgagacggagagaggactggcctagcagactgcagatgttcttcgccaataaccacgaccaggagttcgacccccctaaggtgtaccctcccgtccccgccgagaagagaaagcccatccgggtcctgagcctgttcgatggcatcgccaccggtctgctggtgctgaaggacctgggcatccaggtggataggtacattgcctccgaggtgtgcgaggactccatcaccgtgggaatggtgcgtcatcagggcaagatcatgtacgtgggcgacgtgcggagcgtgacacagaagcatatccaggagtggggccctttcgacctggtgatcggcggcagcccttgcaatgacctgagcatcgtgaacccagcccggaagggcctgtacgagggaaccggcagactgttcttcgagttttacagactgctgcacgacgcccggcctaaggaaggcgacgaccggcccttcttttggctgttcgagaatgtggtggccatgggagtcagcgacaagcgggatattagccggttcctggagagcaaccccgtgatgatcgatgccaaggaagtgagcgccgcccaccgggccagatacttctggggcaatctgcctggcatgaacagacccctggccagcaccgtgaacgacaagctggagctgcaggagtgcctggagcacggccggatcgccaagttcagcaaggtgagaaccatcaccacccgaagcaacagcatcaaacaaggcaaggaccagcactttcctgtgttcatgaacgagaaggaggacatcctgtggtgtaccgagatggagagagtgttcgggttcccagtccactacacagatgtcagcaacatgtctagactggccagacagagactgctgggaagaagctggtccgtccctgtgatcagacacctgttcgcccctctgaaggagtacttcgcctgcgtgagcagcggcaacagcaacgccaacagccggggccccagcttctctagcggcctggtgccactgtccctgagagggagccacatgggccccatggagatctacaaaaccgtgagcgcctggaagcggcagcctgtgcgcgtgctgagcctgtttcggaatatcgataaagtcctgaaaagcctgggattcctggagagcggctctggctccggcggtggcaccctgaagtacgtggaggatgtgacaaacgtggtcagacgggatgtggagaagtggggccccttcgatctggtgtacggcagcacccaacccctgggcagctcttgtgaccggtgccctggctggtacatgtttcagttccaccggatcctgcagtacgccctgccgagacaggagtcccagcggccattcttttggattttcatggacaacttgctgctgaccgaggatgaccaggaaactaccactcggttcctgcagaccgaagccgtgaccctgcaggacgtgagaggccgggactaccagaacgccatgcgggtgtggtccaacatccctggactgaaaagcaagcacgcacctctgacccctaaagaagaggagtacctgcaggcccaggtgcggagcagaagcaagctggacgcccctaaggtggatctgctggtgaagaattgcctcctgcccctgagagagtacttcaagtatttcagccagaatagtctgcccctgggaggcagcggcggcggccccatcaccttcgacgacgtggccatcatcttcagccccgaggagtgggagtgcctggacagcgcccagagggacctgtacagggacgtgatggtggagaactgcaggaacctgctgagcgtggaggccagcaggcacggcaccaagggcttcagcagcaagaaggacatgaagaggagcttccaggaggagctgagcaggaggctgagcaagtgcggcgccgacatcttccaccccaggaagggcggcccaagcagcggcgcccctcctcccagcggcggcagcccagccggctccccaacctctaccgaggagggcacctctgagtccgccacccccgagagcggccctggcacctccaccgagcccagcgagggcagcgcacccggcagccctgccggcagccccacctccacagaggagggaaccagcaccgagcccagcgaaggcagcgccccaggcaccagcaccgagcctagtgagcaggagattaaacggatcaacaagatcagaagaagacttgtgaaagacagcaacaccaagaaggccggcaagacaggccccatgaaaaccctgctggttagagtgatgacacccgatctgagagagcggctggaaaacctgagaaagaagcctgaaaatatcccccagcccatcagcaatacatctagagccaacctgaataagctgctgaccgattacaccgaaatgaagaaggcgatcctgcatgtgtactgggaagagttccagaaggaccctgtgggcctgatgagccgggtggcccagcctgccagcaagaagatcgatcagaacaagctgaaacctgagatggacgagaagggcaacctgaccaccgccggctttgcctgctctcagtgtggccagcccctgttcgtgtacaagctggagcaggtgtctgagaagggcaaggcttacaccaactacttcggacggtgcaatgtggccgagcacgaaaagctgatcctgctggcccagctgaagcccgagaaggatagcgacgaagccgtgacatatagcctgggaaagtttgggcagagggccctggatttctacagcattcatgtgaccaaggagtccacccaccccgtgaagcccctggcccagatcgccggaaacagatacgcctccggacctgtgggaaaggccctgagcgacgcatgtatgggcacaatcgcctccttcctgtctaagtaccaggacatcatcatcgaacaccagaaggtggtgaagggcaaccagaagagactggagagcctgcgggagctggccggcaaggaaaacctggaataccctagcgtgaccctgccacctcagcctcacaccaaggagggcgttgatgcctacaacgaagtgatcgcccgggtgcgaatgtgggtgaacctgaacctgtggcagaagctgaagctaagcagagatgatgccaagcctctgctgagactgaagggattcccttcctttcctctggtcgagagacaggccaacgaagtggactggtgggacatggtgtgtaacgtgaagaagctgatcaacgagaaaaaggaggatggcaaggtgttttggcagaatctggctggctacaagagacaggaagccctgagaccatacctgagcagcgaggaagatcggaagaagggaaagaaattcgctcggtaccagctgggcgacctgctgctgcacctggaaaagaagcacggcgaggactggggaaaggtgtacgacgaggcctgggagcggattgacaagaaagtggaaggcctgagcaagcacatcaagctggaagaggaacggagaagcgaggacgcccagagcaaggccgccctgaccgactggctgcgggctaaggccagcttcgtgatcgagggcctgaaggaggccgacaaggacgagttctgcagatgcgagctgaagctgcagaagtggtacggggacctgcggggaaagcccttcgccatcgaagccgagaacagcatcctggacatcagcggcttcagcaagcagtacaactgtgccttcatctggcagaaggacggcgtgaagaagctgaacctgtacctgatcatcaactacttcaagggcggcaagctgcggttcaagaagatcaaacctgaagccttcgaagccaacagattctacaccgtgatcaacaaaaagagcggcgagatcgtgcccatggaggtgaacttcaacttcgacgaccccaacctgatcatcctgcctctggcctttggcaagagacagggcagagaattcatctggaacgacctgctgtccctggaaaccggcagcctgaagctggccaacggaagagtgatcgagaagacactgtacaacagaagaacccggcaggatgagcctgccctgttcgtggccctgaccttcgagcggcgggaggtcctggactcctccaatatcaaaccaatgaacctgatcggcgtggcaagaggcgaaaacatccccgccgtgatcgccctgaccgaccccgagggctgcccactgagccggtttaaggatagcctgggaaacccaacccacatcctgagaatcggcgagagctataaggagaagcagcggaccatccaggccaagaaggaggtggagcagcggagagccggcggctacagccggaagtacgccagcaaagccaagaatctggcagacgatatggtgagaaacaccgctagagatctgctgtactacgccgtgacccaggatgccatgctgatcttcgccaacctgagccggggcttcggccggcagggcaagcggaccttcatggccgagagacagtacacacggatggaggactggctgaccgccaagctggcctacgagggcctgagcaagacctacctgtccaagacactggcccagtacacctccaagacatgcagcaactgtgggtttaccatcaccagcgccgactacgacagggtgctggagaagctgaagaagacagcaacaggctggatgaccacaattaacggcaaggagctgaaggtggagggccagattacctactacaacagatacaagagacagaacgtagtcaaggacctgtccgtcgagctggatagactgagcgaagaatctgtgaacaacgacatctcctcctggacaaagggcagaagcggagaagctctgagcctcctgaagaaaagattctcccatagacccgtgcaggagaagttcgtgtgcctgaactgcggcttcgagacacacgcagccgagcaagccgccctgaacatcgccagatcctggctgttcctgcggagccaggagtacaagaaataccagacaaacaagacaaccggcaacaccgataagagagccttcgtcgagacctggcagtccttttaccggaagaagcttaaggaggtgtggaaacctgccgtgcggtctggcggatctggcggaggctccaccagccccaagaaaaagagaaaagtctaagctgccttctgcggggcttgccttctggccatgcccttcttctctcccttgcacctgtacctcttggtctttgaataaagcctgagtaggaaggctagcaaaaaaaaaaaaaaaaaaaaaaaaaaaaaaaaaaaaaaaaaaaaaaaaaaaaaaaaaaaaaaaaaaaaaaaaaaaaaaaa

SEQ ID NO: 13488 - RNA, 5785 nt, synthetic construct
  source 1..5785: mol_type = other RNA
aggaaataagagagaaaagaagagtaagaagaaatataagagccaccatggcccctaagaagaagcgtaaagtgagccggatggaacgcctcgtctacgaggtgcggcagaagtgcagaaacatcgaggacatctgcatctcctgcggatctctgaacgtgaccctggagcacccactgttcatcggcggcatgtgccagaactgtaaaaactgttttctggagtgtgcctatcaatacgacgatgacggctaccagagctactgcaccatctgttgcggcggaagagaggtgctgatgtgtggaaataacaactgctgccggtgcttctgcgtggaatgcgtggacctgctggtgggccccggcgccgcccaggccgctattaaggaagatccttggaactgctacatgtgcggccacaagggcacatacggcctgctgagacggagagaggactggcctagcagactgcagatgttcttcgccaataaccacgaccaggagttcgacccccctaaggtgtaccctcccgtccccgccgagaagagaaagcccatccgggtcctgagcctgttcgatggcatcgccaccggtctgctggtgctgaaggacctgggcatccaggtggataggtacattgcctccgaggtgtgcgaggactccatcaccgtgggaatggtgcgtcatcagggcaagatcatgtacgtgggcgacgtgcggagcgtgacacagaagcatatccaggagtggggccctttcgacctggtgatcggcggcagcccttgcaatgacctgagcatcgtgaacccagcccggaagggcctgtacgagggaaccggcagactgttcttcgagttttacagactgctgcacgacgcccggcctaaggaaggcgacgaccggcccttcttttggctgttcgagaatgtggtggccatgggagtcagcgacaagcgggatattagccggttcctggagagcaaccccgtgatgatcgatgccaaggaagtgagcgccgcccaccgggccagatacttctggggcaatctgcctggcatgaacagacccctggccagcaccgtgaacgacaagctggagctgcaggagtgcctggagcacggccggatcgccaagttcagcaaggtgagaaccatcaccacccgaagcaacagcatcaaacaaggcaaggaccagcactttcctgtgttcatgaacgagaaggaggacatcctgtggtgtaccgagatggagagagtgttcgggttcccagtccactacacagatgtcagcaacatgtctagactggccagacagagactgctgggaagaagctggtccgtccctgtgatcagacacctgttcgcccctctgaaggagtacttcgcctgcgtgagcagcggcaacagcaacgccaacagccggggccccagcttctctagcggcctggtgccactgtccctgagagggagccacatgggccccatggagatctacaaaaccgtgagcgcctggaagcggcagcctgtgcgcgtgctgagcctgtttcggaatatcgataaagtcctgaaaagcctgggattcctggagagcggctctggctccggcggtggcaccctgaagtacgtggaggatgtgacaaacgtggtcagacgggatgtggagaagtggggccccttcgatctggtgtacggcagcacccaacccctgggcagctcttgtgaccggtgccctggctggtacatgtttcagttccaccggatcctgcagtacgccctgccgagacaggagtcccagcggccattcttttggattttcatggacaacttgctgctgaccgaggatgaccaggaaactaccactcggttcctgcagaccgaagccgtgaccctgcaggacgtgagaggccgggactaccagaacgccatgcgggtgtggtccaacatccctggactgaaaagcaagcacgcacctctgacccctaaagaagaggagtacctgcaggcccaggtgcggagcagaagcaagctggacgcccctaaggtggatctgctggtgaagaattgcctcctgcccctgagagagtacttcaagtatttcagccagaatagtctgcccctgggaggcagcggcggcggcccccaggagagcgtggccttcgacgacgtggccgtgtacttcaccaagaaggagtgggccatcatggtgcccgaccagagggccctgtacagggacgtgatgctggagaactacgaggccgtggccttcgtggtgccccccaccagcaagcccgccctggtgagccacctggagcagggcaaggagccctgcttcacccagccccagggcgtgctgagcaggagcaactggagggccggcttcggcggcccaagcagcggcgcccctcctcccagcggcggcagcccagccggctccccaacctctaccgaggagggcacctctgagtccgccacccccgagagcggccctggcacctccaccgagcccagcgagggcagcgcacccggcagccctgccggcagccccacctccacagaggagggaaccagcaccgagcccagcgaaggcagcgccccaggcaccagcaccgagcctagtgagcaggagattaaacggatcaacaagatcagaagaagacttgtgaaagacagcaacaccaagaaggccggcaagacaggccccatgaaaaccctgctggttagagtgatgacacccgatctgagagagcggctggaaaacctgagaaagaagcctgaaaatatcccccagcccatcagcaatacatctagagccaacctgaataagctgctgaccgattacaccgaaatgaagaaggcgatcctgcatgtgtactgggaagagttccagaaggaccctgtgggcctgatgagccgggtggcccagcctgccagcaagaagatcgatcagaacaagctgaaacctgagatggacgagaagggcaacctgaccaccgccggctttgcctgctctcagtgtggccagcccctgttcgtgtacaagctggagcaggtgtctgagaagggcaaggcttacaccaactacttcggacggtgcaatgtggccgagcacgaaaagctgatcctgctggcccagctgaagcccgagaaggatagcgacgaagccgtgacatatagcctgggaaagtttgggcagagggccctggatttctacagcattcatgtgaccaaggagtccacccaccccgtgaagcccctggcccagatcgccggaaacagatacgcctccggacctgtgggaaaggccctgagcgacgcatgtatgggcacaatcgcctccttcctgtctaagtaccaggacatcatcatcgaacaccagaaggtggtgaagggcaaccagaagagactggagagcctgcgggagctggccggcaaggaaaacctggaataccctagcgtgaccctgccacctcagcctcacaccaaggagggcgttgatgcctacaacgaagtgatcgcccgggtgcgaatgtgggtgaacctgaacctgtggcagaagctgaagctaagcagagatgatgccaagcctctgctgagactgaagggattcccttcctttcctctggtcgagagacaggccaacgaagtggactggtgggacatggtgtgtaacgtgaagaagctgatcaacgagaaaaaggaggatggcaaggtgttttggcagaatctggctggctacaagagacaggaagccctgagaccatacctgagcagcgaggaagatcggaagaagggaaagaaattcgctcggtaccagctgggcgacctgctgctgcacctggaaaagaagcacggcgaggactggggaaaggtgtacgacgaggcctgggagcggattgacaagaaagtggaaggcctgagcaagcacatcaagctggaagaggaacggagaagcgaggacgcccagagcaaggccgccctgaccgactggctgcgggctaaggccagcttcgtgatcgagggcctgaaggaggccgacaaggacgagttctgcagatgcgagctgaagctgcagaagtggtacggggacctgcggggaaagcccttcgccatcgaagccgagaacagcatcctggacatcagcggcttcagcaagcagtacaactgtgccttcatctggcagaaggacggcgtgaagaagctgaacctgtacctgatcatcaactacttcaagggcggcaagctgcggttcaagaagatcaaacctgaagccttcgaagccaacagattctacaccgtgatcaacaaaaagagcggcgagatcgtgcccatggaggtgaacttcaacttcgacgaccccaacctgatcatcctgcctctggcctttggcaagagacagggcagagaattcatctggaacgacctgctgtccctggaaaccggcagcctgaagctggccaacggaagagtgatcgagaagacactgtacaacagaagaacccggcaggatgagcctgccctgttcgtggccctgaccttcgagcggcgggaggtcctggactcctccaatatcaaaccaatgaacctgatcggcgtggcaagaggcgaaaacatccccgccgtgatcgccctgaccgaccccgagggctgcccactgagccggtttaaggatagcctgggaaacccaacccacatcctgagaatcggcgagagctataaggagaagcagcggaccatccaggccaagaaggaggtggagcagcggagagccggcggctacagccggaagtacgccagcaaagccaagaatctggcagacgatatggtgagaaacaccgctagagatctgctgtactacgccgtgacccaggatgccatgctgatcttcgccaacctgagccggggcttcggccggcagggcaagcggaccttcatggccgagagacagtacacacggatggaggactggctgaccgccaagctggcctacgagggcctgagcaagacctacctgtccaagacactggcccagtacacctccaagacatgcagcaactgtgggtttaccatcaccagcgccgactacgacagggtgctggagaagctgaagaagacagcaacaggctggatgaccacaattaacggcaaggagctgaaggtggagggccagattacctactacaacagatacaagagacagaacgtagtcaaggacctgtccgtcgagctggatagactgagcgaagaatctgtgaacaacgacatctcctcctggacaaagggcagaagcggagaagctctgagcctcctgaagaaaagattctcccatagacccgtgcaggagaagttcgtgtgcctgaactgcggcttcgagacacacgcagccgagcaagccgccctgaacatcgccagatcctggctgttcctgcggagccaggagtacaagaaataccagacaaacaagacaaccggcaacaccgataagagagccttcgtcgagacctggcagtccttttaccggaagaagcttaaggaggtgtggaaacctgccgtgcggtctggcggatctggcggaggctccaccagccccaagaaaaagagaaaagtctaagctgccttctgcggggcttgccttctggccatgcccttcttctctcccttgcacctgtacctcttggtctttgaataaagcctgagtaggaaggctagcaaaaaaaaaaaaaaaaaaaaaaaaaaaaaaaaaaaaaaaaaaaaaaaaaaaaaaaaaaaaaaaaaaaaaaaaaaaaaaaa

SEQ ID NO: 13489 - RNA, 5785 nt, synthetic construct
  source 1..5785: mol_type = other RNA
aggaaataagagagaaaagaagagtaagaagaaatataagagccaccatggcccctaagaagaagcgtaaagtgagccggatggaacgcctcgtctacgaggtgcggcagaagtgcagaaacatcgaggacatctgcatctcctgcggatctctgaacgtgaccctggagcacccactgttcatcggcggcatgtgccagaactgtaaaaactgttttctggagtgtgcctatcaatacgacgatgacggctaccagagctactgcaccatctgttgcggcggaagagaggtgctgatgtgtggaaataacaactgctgccggtgcttctgcgtggaatgcgtggacctgctggtgggccccggcgccgcccaggccgctattaaggaagatccttggaactgctacatgtgcggccacaagggcacatacggcctgctgagacggagagaggactggcctagcagactgcagatgttcttcgccaataaccacgaccaggagttcgacccccctaaggtgtaccctcccgtccccgccgagaagagaaagcccatccgggtcctgagcctgttcgatggcatcgccaccggtctgctggtgctgaaggacctgggcatccaggtggataggtacattgcctccgaggtgtgcgaggactccatcaccgtgggaatggtgcgtcatcagggcaagatcatgtacgtgggcgacgtgcggagcgtgacacagaagcatatccaggagtggggccctttcgacctggtgatcggcggcagcccttgcaatgacctgagcatcgtgaacccagcccggaagggcctgtacgagggaaccggcagactgttcttcgagttttacagactgctgcacgacgcccggcctaaggaaggcgacgaccggcccttcttttggctgttcgagaatgtggtggccatgggagtcagcgacaagcgggatattagccggttcctggagagcaaccccgtgatgatcgatgccaaggaagtgagcgccgcccaccgggccagatacttctggggcaatctgcctggcatgaacagacccctggccagcaccgtgaacgacaagctggagctgcaggagtgcctggagcacggccggatcgccaagttcagcaaggtgagaaccatcaccacccgaagcaacagcatcaaacaaggcaaggaccagcactttcctgtgttcatgaacgagaaggaggacatcctgtggtgtaccgagatggagagagtgttcgggttcccagtccactacacagatgtcagcaacatgtctagactggccagacagagactgctgggaagaagctggtccgtccctgtgatcagacacctgttcgcccctctgaaggagtacttcgcctgcgtgagcagcggcaacagcaacgccaacagccggggccccagcttctctagcggcctggtgccactgtccctgagagggagccacatgggccccatggagatctacaaaaccgtgagcgcctggaagcggcagcctgtgcgcgtgctgagcctgtttcggaatatcgataaagtcctgaaaagcctgggattcctggagagcggctctggctccggcggtggcaccctgaagtacgtggaggatgtgacaaacgtggtcagacgggatgtggagaagtggggccccttcgatctggtgtacggcagcacccaacccctgggcagctcttgtgaccggtgccctggctggtacatgtttcagttccaccggatcctgcagtacgccctgccgagacaggagtcccagcggccattcttttggattttcatggacaacttgctgctgaccgaggatgaccaggaaactaccactcggttcctgcagaccgaagccgtgaccctgcaggacgtgagaggccgggactaccagaacgccatgcgggtgtggtccaacatccctggactgaaaagcaagcacgcacctctgacccctaaagaagaggagtacctgcaggcccaggtgcggagcagaagcaagctggacgcccctaaggtggatctgctggtgaagaattgcctcctgcccctgagagagtacttcaagtatttcagccagaatagtctgcccctgggaggcagcggcggcggcagccagggccacgtgaccttcgaggacatcgccgtgtacttcagccaggaggagtggggcctgctggacgaggcccagaggtgcctgtaccacgacgtgatgctggagaacttcagcctgatgaccagcgtggccggcctgagccagaacaaccacaaggacagctgcctgcagtggaaggtgcccgtgagcatgaacaacgtggcccagtgcagccccgacgaggtgcactacacccccatgggcggcccaagcagcggcgcccctcctcccagcggcggcagcccagccggctccccaacctctaccgaggagggcacctctgagtccgccacccccgagagcggccctggcacctccaccgagcccagcgagggcagcgcacccggcagccctgccggcagccccacctccacagaggagggaaccagcaccgagcccagcgaaggcagcgccccaggcaccagcaccgagcctagtgagcaggagattaaacggatcaacaagatcagaagaagacttgtgaaagacagcaacaccaagaaggccggcaagacaggccccatgaaaaccctgctggttagagtgatgacacccgatctgagagagcggctggaaaacctgagaaagaagcctgaaaatatcccccagcccatcagcaatacatctagagccaacctgaataagctgctgaccgattacaccgaaatgaagaaggcgatcctgcatgtgtactgggaagagttccagaaggaccctgtgggcctgatgagccgggtggcccagcctgccagcaagaagatcgatcagaacaagctgaaacctgagatggacgagaagggcaacctgaccaccgccggctttgcctgctctcagtgtggccagcccctgttcgtgtacaagctggagcaggtgtctgagaagggcaaggcttacaccaactacttcggacggtgcaatgtggccgagcacgaaaagctgatcctgctggcccagctgaagcccgagaaggatagcgacgaagccgtgacatatagcctgggaaagtttgggcagagggccctggatttctacagcattcatgtgaccaaggagtccacccaccccgtgaagcccctggcccagatcgccggaaacagatacgcctccggacctgtgggaaaggccctgagcgacgcatgtatgggcacaatcgcctccttcctgtctaagtaccaggacatcatcatcgaacaccagaaggtggtgaagggcaaccagaagagactggagagcctgcgggagctggccggcaaggaaaacctggaataccctagcgtgaccctgccacctcagcctcacaccaaggagggcgttgatgcctacaacgaagtgatcgcccgggtgcgaatgtgggtgaacctgaacctgtggcagaagctgaagctaagcagagatgatgccaagcctctgctgagactgaagggattcccttcctttcctctggtcgagagacaggccaacgaagtggactggtgggacatggtgtgtaacgtgaagaagctgatcaacgagaaaaaggaggatggcaaggtgttttggcagaatctggctggctacaagagacaggaagccctgagaccatacctgagcagcgaggaagatcggaagaagggaaagaaattcgctcggtaccagctgggcgacctgctgctgcacctggaaaagaagcacggcgaggactggggaaaggtgtacgacgaggcctgggagcggattgacaagaaagtggaaggcctgagcaagcacatcaagctggaagaggaacggagaagcgaggacgcccagagcaaggccgccctgaccgactggctgcgggctaaggccagcttcgtgatcgagggcctgaaggaggccgacaaggacgagttctgcagatgcgagctgaagctgcagaagtggtacggggacctgcggggaaagcccttcgccatcgaagccgagaacagcatcctggacatcagcggcttcagcaagcagtacaactgtgccttcatctggcagaaggacggcgtgaagaagctgaacctgtacctgatcatcaactacttcaagggcggcaagctgcggttcaagaagatcaaacctgaagccttcgaagccaacagattctacaccgtgatcaacaaaaagagcggcgagatcgtgcccatggaggtgaacttcaacttcgacgaccccaacctgatcatcctgcctctggcctttggcaagagacagggcagagaattcatctggaacgacctgctgtccctggaaaccggcagcctgaagctggccaacggaagagtgatcgagaagacactgtacaacagaagaacccggcaggatgagcctgccctgttcgtggccctgaccttcgagcggcgggaggtcctggactcctccaatatcaaaccaatgaacctgatcggcgtggcaagaggcgaaaacatccccgccgtgatcgccctgaccgaccccgagggctgcccactgagccggtttaaggatagcctgggaaacccaacccacatcctgagaatcggcgagagctataaggagaagcagcggaccatccaggccaagaaggaggtggagcagcggagagccggcggctacagccggaagtacgccagcaaagccaagaatctggcagacgatatggtgagaaacaccgctagagatctgctgtactacgccgtgacccaggatgccatgctgatcttcgccaacctgagccggggcttcggccggcagggcaagcggaccttcatggccgagagacagtacacacggatggaggactggctgaccgccaagctggcctacgagggcctgagcaagacctacctgtccaagacactggcccagtacacctccaagacatgcagcaactgtgggtttaccatcaccagcgccgactacgacagggtgctggagaagctgaagaagacagcaacaggctggatgaccacaattaacggcaaggagctgaaggtggagggccagattacctactacaacagatacaagagacagaacgtagtcaaggacctgtccgtcgagctggatagactgagcgaagaatctgtgaacaacgacatctcctcctggacaaagggcagaagcggagaagctctgagcctcctgaagaaaagattctcccatagacccgtgcaggagaagttcgtgtgcctgaactgcggcttcgagacacacgcagccgagcaagccgccctgaacatcgccagatcctggctgttcctgcggagccaggagtacaagaaataccagacaaacaagacaaccggcaacaccgataagagagccttcgtcgagacctggcagtccttttaccggaagaagcttaaggaggtgtggaaacctgccgtgcggtctggcggatctggcggaggctccaccagccccaagaaaaagagaaaagtctaagctgccttctgcggggcttgccttctggccatgcccttcttctctcccttgcacctgtacctcttggtctttgaataaagcctgagtaggaaggctagcaaaaaaaaaaaaaaaaaaaaaaaaaaaaaaaaaaaaaaaaaaaaaaaaaaaaaaaaaaaaaaaaaaaaaaaaaaaaaaaa

SEQ ID NO: 13490 - RNA, 5785 nt, synthetic construct
  source 1..5785: mol_type = other RNA
aggaaataagagagaaaagaagagtaagaagaaatataagagccaccatggcccctaagaagaagcgtaaagtgagccggatggaacgcctcgtctacgaggtgcggcagaagtgcagaaacatcgaggacatctgcatctcctgcggatctctgaacgtgaccctggagcacccactgttcatcggcggcatgtgccagaactgtaaaaactgttttctggagtgtgcctatcaatacgacgatgacggctaccagagctactgcaccatctgttgcggcggaagagaggtgctgatgtgtggaaataacaactgctgccggtgcttctgcgtggaatgcgtggacctgctggtgggccccggcgccgcccaggccgctattaaggaagatccttggaactgctacatgtgcggccacaagggcacatacggcctgctgagacggagagaggactggcctagcagactgcagatgttcttcgccaataaccacgaccaggagttcgacccccctaaggtgtaccctcccgtccccgccgagaagagaaagcccatccgggtcctgagcctgttcgatggcatcgccaccggtctgctggtgctgaaggacctgggcatccaggtggataggtacattgcctccgaggtgtgcgaggactccatcaccgtgggaatggtgcgtcatcagggcaagatcatgtacgtgggcgacgtgcggagcgtgacacagaagcatatccaggagtggggccctttcgacctggtgatcggcggcagcccttgcaatgacctgagcatcgtgaacccagcccggaagggcctgtacgagggaaccggcagactgttcttcgagttttacagactgctgcacgacgcccggcctaaggaaggcgacgaccggcccttcttttggctgttcgagaatgtggtggccatgggagtcagcgacaagcgggatattagccggttcctggagagcaaccccgtgatgatcgatgccaaggaagtgagcgccgcccaccgggccagatacttctggggcaatctgcctggcatgaacagacccctggccagcaccgtgaacgacaagctggagctgcaggagtgcctggagcacggccggatcgccaagttcagcaaggtgagaaccatcaccacccgaagcaacagcatcaaacaaggcaaggaccagcactttcctgtgttcatgaacgagaaggaggacatcctgtggtgtaccgagatggagagagtgttcgggttcccagtccactacacagatgtcagcaacatgtctagactggccagacagagactgctgggaagaagctggtccgtccctgtgatcagacacctgttcgcccctctgaaggagtacttcgcctgcgtgagcagcggcaacagcaacgccaacagccggggccccagcttctctagcggcctggtgccactgtccctgagagggagccacatgggccccatggagatctacaaaaccgtgagcgcctggaagcggcagcctgtgcgcgtgctgagcctgtttcggaatatcgataaagtcctgaaaagcctgggattcctggagagcggctctggctccggcggtggcaccctgaagtacgtggaggatgtgacaaacgtggtcagacgggatgtggagaagtggggccccttcgatctggtgtacggcagcacccaacccctgggcagctcttgtgaccggtgccctggctggtacatgtttcagttccaccggatcctgcagtacgccctgccgagacaggagtcccagcggccattcttttggattttcatggacaacttgctgctgaccgaggatgaccaggaaactaccactcggttcctgcagaccgaagccgtgaccctgcaggacgtgagaggccgggactaccagaacgccatgcgggtgtggtccaacatccctggactgaaaagcaagcacgcacctctgacccctaaagaagaggagtacctgcaggcccaggtgcggagcagaagcaagctggacgcccctaaggtggatctgctggtgaagaattgcctcctgcccctgagagagtacttcaagtatttcagccagaatagtctgcccctgggaggcagcggcggcggcgtgcacggcagcgtgaccttcagggacgtggccatcgacttctgccaggaggagtgggagtgcctgggccccatccagagggacctgtacagggacgtgatgctggagaactacagcaacctgatcgccgtgggcagcaccatcagcaagcccgacgtgatcgccctgctggagcagggcaccgagccctggatgggcgtgaggaaggacaggagcaggtggtaccccggcctgaacagcggcggcggcccaagcagcggcgcccctcctcccagcggcggcagcccagccggctccccaacctctaccgaggagggcacctctgagtccgccacccccgagagcggccctggcacctccaccgagcccagcgagggcagcgcacccggcagccctgccggcagccccacctccacagaggagggaaccagcaccgagcccagcgaaggcagcgccccaggcaccagcaccgagcctagtgagcaggagattaaacggatcaacaagatcagaagaagacttgtgaaagacagcaacaccaagaaggccggcaagacaggccccatgaaaaccctgctggttagagtgatgacacccgatctgagagagcggctggaaaacctgagaaagaagcctgaaaatatcccccagcccatcagcaatacatctagagccaacctgaataagctgctgaccgattacaccgaaatgaagaaggcgatcctgcatgtgtactgggaagagttccagaaggaccctgtgggcctgatgagccgggtggcccagcctgccagcaagaagatcgatcagaacaagctgaaacctgagatggacgagaagggcaacctgaccaccgccggctttgcctgctctcagtgtggccagcccctgttcgtgtacaagctggagcaggtgtctgagaagggcaaggcttacaccaactacttcggacggtgcaatgtggccgagcacgaaaagctgatcctgctggcccagctgaagcccgagaaggatagcgacgaagccgtgacatatagcctgggaaagtttgggcagagggccctggatttctacagcattcatgtgaccaaggagtccacccaccccgtgaagcccctggcccagatcgccggaaacagatacgcctccggacctgtgggaaaggccctgagcgacgcatgtatgggcacaatcgcctccttcctgtctaagtaccaggacatcatcatcgaacaccagaaggtggtgaagggcaaccagaagagactggagagcctgcgggagctggccggcaaggaaaacctggaataccctagcgtgaccctgccacctcagcctcacaccaaggagggcgttgatgcctacaacgaagtgatcgcccgggtgcgaatgtgggtgaacctgaacctgtggcagaagctgaagctaagcagagatgatgccaagcctctgctgagactgaagggattcccttcctttcctctggtcgagagacaggccaacgaagtggactggtgggacatggtgtgtaacgtgaagaagctgatcaacgagaaaaaggaggatggcaaggtgttttggcagaatctggctggctacaagagacaggaagccctgagaccatacctgagcagcgaggaagatcggaagaagggaaagaaattcgctcggtaccagctgggcgacctgctgctgcacctggaaaagaagcacggcgaggactggggaaaggtgtacgacgaggcctgggagcggattgacaagaaagtggaaggcctgagcaagcacatcaagctggaagaggaacggagaagcgaggacgcccagagcaaggccgccctgaccgactggctgcgggctaaggccagcttcgtgatcgagggcctgaaggaggccgacaaggacgagttctgcagatgcgagctgaagctgcagaagtggtacggggacctgcggggaaagcccttcgccatcgaagccgagaacagcatcctggacatcagcggcttcagcaagcagtacaactgtgccttcatctggcagaaggacggcgtgaagaagctgaacctgtacctgatcatcaactacttcaagggcggcaagctgcggttcaagaagatcaaacctgaagccttcgaagccaacagattctacaccgtgatcaacaaaaagagcggcgagatcgtgcccatggaggtgaacttcaacttcgacgaccccaacctgatcatcctgcctctggcctttggcaagagacagggcagagaattcatctggaacgacctgctgtccctggaaaccggcagcctgaagctggccaacggaagagtgatcgagaagacactgtacaacagaagaacccggcaggatgagcctgccctgttcgtggccctgaccttcgagcggcgggaggtcctggactcctccaatatcaaaccaatgaacctgatcggcgtggcaagaggcgaaaacatccccgccgtgatcgccctgaccgaccccgagggctgcccactgagccggtttaaggatagcctgggaaacccaacccacatcctgagaatcggcgagagctataaggagaagcagcggaccatccaggccaagaaggaggtggagcagcggagagccggcggctacagccggaagtacgccagcaaagccaagaatctggcagacgatatggtgagaaacaccgctagagatctgctgtactacgccgtgacccaggatgccatgctgatcttcgccaacctgagccggggcttcggccggcagggcaagcggaccttcatggccgagagacagtacacacggatggaggactggctgaccgccaagctggcctacgagggcctgagcaagacctacctgtccaagacactggcccagtacacctccaagacatgcagcaactgtgggtttaccatcaccagcgccgactacgacagggtgctggagaagctgaagaagacagcaacaggctggatgaccacaattaacggcaaggagctgaaggtggagggccagattacctactacaacagatacaagagacagaacgtagtcaaggacctgtccgtcgagctggatagactgagcgaagaatctgtgaacaacgacatctcctcctggacaaagggcagaagcggagaagctctgagcctcctgaagaaaagattctcccatagacccgtgcaggagaagttcgtgtgcctgaactgcggcttcgagacacacgcagccgagcaagccgccctgaacatcgccagatcctggctgttcctgcggagccaggagtacaagaaataccagacaaacaagacaaccggcaacaccgataagagagccttcgtcgagacctggcagtccttttaccggaagaagcttaaggaggtgtggaaacctgccgtgcggtctggcggatctggcggaggctccaccagccccaagaaaaagagaaaagtctaagctgccttctgcggggcttgccttctggccatgcccttcttctctcccttgcacctgtacctcttggtctttgaataaagcctgagtaggaaggctagcaaaaaaaaaaaaaaaaaaaaaaaaaaaaaaaaaaaaaaaaaaaaaaaaaaaaaaaaaaaaaaaaaaaaaaaaaaaaaaaa

SEQ ID NO: 13491 - RNA, 5785 nt, synthetic construct
  source 1..5785: mol_type = other RNA
aggaaataagagagaaaagaagagtaagaagaaatataagagccaccatggcccctaagaagaagcgtaaagtgagccggatggaacgcctcgtctacgaggtgcggcagaagtgcagaaacatcgaggacatctgcatctcctgcggatctctgaacgtgaccctggagcacccactgttcatcggcggcatgtgccagaactgtaaaaactgttttctggagtgtgcctatcaatacgacgatgacggctaccagagctactgcaccatctgttgcggcggaagagaggtgctgatgtgtggaaataacaactgctgccggtgcttctgcgtggaatgcgtggacctgctggtgggccccggcgccgcccaggccgctattaaggaagatccttggaactgctacatgtgcggccacaagggcacatacggcctgctgagacggagagaggactggcctagcagactgcagatgttcttcgccaataaccacgaccaggagttcgacccccctaaggtgtaccctcccgtccccgccgagaagagaaagcccatccgggtcctgagcctgttcgatggcatcgccaccggtctgctggtgctgaaggacctgggcatccaggtggataggtacattgcctccgaggtgtgcgaggactccatcaccgtgggaatggtgcgtcatcagggcaagatcatgtacgtgggcgacgtgcggagcgtgacacagaagcatatccaggagtggggccctttcgacctggtgatcggcggcagcccttgcaatgacctgagcatcgtgaacccagcccggaagggcctgtacgagggaaccggcagactgttcttcgagttttacagactgctgcacgacgcccggcctaaggaaggcgacgaccggcccttcttttggctgttcgagaatgtggtggccatgggagtcagcgacaagcgggatattagccggttcctggagagcaaccccgtgatgatcgatgccaaggaagtgagcgccgcccaccgggccagatacttctggggcaatctgcctggcatgaacagacccctggccagcaccgtgaacgacaagctggagctgcaggagtgcctggagcacggccggatcgccaagttcagcaaggtgagaaccatcaccacccgaagcaacagcatcaaacaaggcaaggaccagcactttcctgtgttcatgaacgagaaggaggacatcctgtggtgtaccgagatggagagagtgttcgggttcccagtccactacacagatgtcagcaacatgtctagactggccagacagagactgctgggaagaagctggtccgtccctgtgatcagacacctgttcgcccctctgaaggagtacttcgcctgcgtgagcagcggcaacagcaacgccaacagccggggccccagcttctctagcggcctggtgccactgtccctgagagggagccacatgggccccatggagatctacaaaaccgtgagcgcctggaagcggcagcctgtgcgcgtgctgagcctgtttcggaatatcgataaagtcctgaaaagcctgggattcctggagagcggctctggctccggcggtggcaccctgaagtacgtggaggatgtgacaaacgtggtcagacgggatgtggagaagtggggccccttcgatctggtgtacggcagcacccaacccctgggcagctcttgtgaccggtgccctggctggtacatgtttcagttccaccggatcctgcagtacgccctgccgagacaggagtcccagcggccattcttttggattttcatggacaacttgctgctgaccgaggatgaccaggaaactaccactcggttcctgcagaccgaagccgtgaccctgcaggacgtgagaggccgggactaccagaacgccatgcgggtgtggtccaacatccctggactgaaaagcaagcacgcacctctgacccctaaagaagaggagtacctgcaggcccaggtgcggagcagaagcaagctggacgcccctaaggtggatctgctggtgaagaattgcctcctgcccctgagagagtacttcaagtatttcagccagaatagtctgcccctgggaggcagcggcggcggcttccaggaggccgtgaccttcaaggacgtggccgtggtgttcagcgaggaggagctgggcctgctggaccccacccagaggaagctgtacagggacgtgatgctggagaacttcaggaacctggtgagcctgggccacagcagcagcaagcccgacgtgatcagccagctggagagggaggagaagctgtgcaccaaggagttccacacccagggcggcggcaggaaccagaaggagatggagggcggcccaagcagcggcgcccctcctcccagcggcggcagcccagccggctccccaacctctaccgaggagggcacctctgagtccgccacccccgagagcggccctggcacctccaccgagcccagcgagggcagcgcacccggcagccctgccggcagccccacctccacagaggagggaaccagcaccgagcccagcgaaggcagcgccccaggcaccagcaccgagcctagtgagcaggagattaaacggatcaacaagatcagaagaagacttgtgaaagacagcaacaccaagaaggccggcaagacaggccccatgaaaaccctgctggttagagtgatgacacccgatctgagagagcggctggaaaacctgagaaagaagcctgaaaatatcccccagcccatcagcaatacatctagagccaacctgaataagctgctgaccgattacaccgaaatgaagaaggcgatcctgcatgtgtactgggaagagttccagaaggaccctgtgggcctgatgagccgggtggcccagcctgccagcaagaagatcgatcagaacaagctgaaacctgagatggacgagaagggcaacctgaccaccgccggctttgcctgctctcagtgtggccagcccctgttcgtgtacaagctggagcaggtgtctgagaagggcaaggcttacaccaactacttcggacggtgcaatgtggccgagcacgaaaagctgatcctgctggcccagctgaagcccgagaaggatagcgacgaagccgtgacatatagcctgggaaagtttgggcagagggccctggatttctacagcattcatgtgaccaaggagtccacccaccccgtgaagcccctggcccagatcgccggaaacagatacgcctccggacctgtgggaaaggccctgagcgacgcatgtatgggcacaatcgcctccttcctgtctaagtaccaggacatcatcatcgaacaccagaaggtggtgaagggcaaccagaagagactggagagcctgcgggagctggccggcaaggaaaacctggaataccctagcgtgaccctgccacctcagcctcacaccaaggagggcgttgatgcctacaacgaagtgatcgcccgggtgcgaatgtgggtgaacctgaacctgtggcagaagctgaagctaagcagagatgatgccaagcctctgctgagactgaagggattcccttcctttcctctggtcgagagacaggccaacgaagtggactggtgggacatggtgtgtaacgtgaagaagctgatcaacgagaaaaaggaggatggcaaggtgttttggcagaatctggctggctacaagagacaggaagccctgagaccatacctgagcagcgaggaagatcggaagaagggaaagaaattcgctcggtaccagctgggcgacctgctgctgcacctggaaaagaagcacggcgaggactggggaaaggtgtacgacgaggcctgggagcggattgacaagaaagtggaaggcctgagcaagcacatcaagctggaagaggaacggagaagcgaggacgcccagagcaaggccgccctgaccgactggctgcgggctaaggccagcttcgtgatcgagggcctgaaggaggccgacaaggacgagttctgcagatgcgagctgaagctgcagaagtggtacggggacctgcggggaaagcccttcgccatcgaagccgagaacagcatcctggacatcagcggcttcagcaagcagtacaactgtgccttcatctggcagaaggacggcgtgaagaagctgaacctgtacctgatcatcaactacttcaagggcggcaagctgcggttcaagaagatcaaacctgaagccttcgaagccaacagattctacaccgtgatcaacaaaaagagcggcgagatcgtgcccatggaggtgaacttcaacttcgacgaccccaacctgatcatcctgcctctggcctttggcaagagacagggcagagaattcatctggaacgacctgctgtccctggaaaccggcagcctgaagctggccaacggaagagtgatcgagaagacactgtacaacagaagaacccggcaggatgagcctgccctgttcgtggccctgaccttcgagcggcgggaggtcctggactcctccaatatcaaaccaatgaacctgatcggcgtggcaagaggcgaaaacatccccgccgtgatcgccctgaccgaccccgagggctgcccactgagccggtttaaggatagcctgggaaacccaacccacatcctgagaatcggcgagagctataaggagaagcagcggaccatccaggccaagaaggaggtggagcagcggagagccggcggctacagccggaagtacgccagcaaagccaagaatctggcagacgatatggtgagaaacaccgctagagatctgctgtactacgccgtgacccaggatgccatgctgatcttcgccaacctgagccggggcttcggccggcagggcaagcggaccttcatggccgagagacagtacacacggatggaggactggctgaccgccaagctggcctacgagggcctgagcaagacctacctgtccaagacactggcccagtacacctccaagacatgcagcaactgtgggtttaccatcaccagcgccgactacgacagggtgctggagaagctgaagaagacagcaacaggctggatgaccacaattaacggcaaggagctgaaggtggagggccagattacctactacaacagatacaagagacagaacgtagtcaaggacctgtccgtcgagctggatagactgagcgaagaatctgtgaacaacgacatctcctcctggacaaagggcagaagcggagaagctctgagcctcctgaagaaaagattctcccatagacccgtgcaggagaagttcgtgtgcctgaactgcggcttcgagacacacgcagccgagcaagccgccctgaacatcgccagatcctggctgttcctgcggagccaggagtacaagaaataccagacaaacaagacaaccggcaacaccgataagagagccttcgtcgagacctggcagtccttttaccggaagaagcttaaggaggtgtggaaacctgccgtgcggtctggcggatctggcggaggctccaccagccccaagaaaaagagaaaagtctaagctgccttctgcggggcttgccttctggccatgcccttcttctctcccttgcacctgtacctcttggtctttgaataaagcctgagtaggaaggctagcaaaaaaaaaaaaaaaaaaaaaaaaaaaaaaaaaaaaaaaaaaaaaaaaaaaaaaaaaaaaaaaaaaaaaaaaaaaaaaaa

SEQ ID NO: 13492 - RNA, 5785 nt, synthetic construct
  source 1..5785: mol_type = other RNA
aggaaataagagagaaaagaagagtaagaagaaatataagagccaccatggcccctaagaagaagcgtaaagtgagccggatggaacgcctcgtctacgaggtgcggcagaagtgcagaaacatcgaggacatctgcatctcctgcggatctctgaacgtgaccctggagcacccactgttcatcggcggcatgtgccagaactgtaaaaactgttttctggagtgtgcctatcaatacgacgatgacggctaccagagctactgcaccatctgttgcggcggaagagaggtgctgatgtgtggaaataacaactgctgccggtgcttctgcgtggaatgcgtggacctgctggtgggccccggcgccgcccaggccgctattaaggaagatccttggaactgctacatgtgcggccacaagggcacatacggcctgctgagacggagagaggactggcctagcagactgcagatgttcttcgccaataaccacgaccaggagttcgacccccctaaggtgtaccctcccgtccccgccgagaagagaaagcccatccgggtcctgagcctgttcgatggcatcgccaccggtctgctggtgctgaaggacctgggcatccaggtggataggtacattgcctccgaggtgtgcgaggactccatcaccgtgggaatggtgcgtcatcagggcaagatcatgtacgtgggcgacgtgcggagcgtgacacagaagcatatccaggagtggggccctttcgacctggtgatcggcggcagcccttgcaatgacctgagcatcgtgaacccagcccggaagggcctgtacgagggaaccggcagactgttcttcgagttttacagactgctgcacgacgcccggcctaaggaaggcgacgaccggcccttcttttggctgttcgagaatgtggtggccatgggagtcagcgacaagcgggatattagccggttcctggagagcaaccccgtgatgatcgatgccaaggaagtgagcgccgcccaccgggccagatacttctggggcaatctgcctggcatgaacagacccctggccagcaccgtgaacgacaagctggagctgcaggagtgcctggagcacggccggatcgccaagttcagcaaggtgagaaccatcaccacccgaagcaacagcatcaaacaaggcaaggaccagcactttcctgtgttcatgaacgagaaggaggacatcctgtggtgtaccgagatggagagagtgttcgggttcccagtccactacacagatgtcagcaacatgtctagactggccagacagagactgctgggaagaagctggtccgtccctgtgatcagacacctgttcgcccctctgaaggagtacttcgcctgcgtgagcagcggcaacagcaacgccaacagccggggccccagcttctctagcggcctggtgccactgtccctgagagggagccacatgggccccatggagatctacaaaaccgtgagcgcctggaagcggcagcctgtgcgcgtgctgagcctgtttcggaatatcgataaagtcctgaaaagcctgggattcctggagagcggctctggctccggcggtggcaccctgaagtacgtggaggatgtgacaaacgtggtcagacgggatgtggagaagtggggccccttcgatctggtgtacggcagcacccaacccctgggcagctcttgtgaccggtgccctggctggtacatgtttcagttccaccggatcctgcagtacgccctgccgagacaggagtcccagcggccattcttttggattttcatggacaacttgctgctgaccgaggatgaccaggaaactaccactcggttcctgcagaccgaagccgtgaccctgcaggacgtgagaggccgggactaccagaacgccatgcgggtgtggtccaacatccctggactgaaaagcaagcacgcacctctgacccctaaagaagaggagtacctgcaggcccaggtgcggagcagaagcaagctggacgcccctaaggtggatctgctggtgaagaattgcctcctgcccctgagagagtacttcaagtatttcagccagaatagtctgcccctgggaggcagcggcggcggccagctgcaggagaccatgaccttcaaggacgtggaggtgaccttcagccaggacgagtggggcctgctggacagcgcccagaggaacctgtacagggacgtgatgctggagaactacaggaacatggccttcctggtgggccccttcaccaagcccgccctgatcagctggctggaggccagggagccctggggcctgaacgtgcaggtggcccagcccaagaggaaccccggcgccgcccccggcggcccaagcagcggcgcccctcctcccagcggcggcagcccagccggctccccaacctctaccgaggagggcacctctgagtccgccacccccgagagcggccctggcacctccaccgagcccagcgagggcagcgcacccggcagccctgccggcagccccacctccacagaggagggaaccagcaccgagcccagcgaaggcagcgccccaggcaccagcaccgagcctagtgagcaggagattaaacggatcaacaagatcagaagaagacttgtgaaagacagcaacaccaagaaggccggcaagacaggccccatgaaaaccctgctggttagagtgatgacacccgatctgagagagcggctggaaaacctgagaaagaagcctgaaaatatcccccagcccatcagcaatacatctagagccaacctgaataagctgctgaccgattacaccgaaatgaagaaggcgatcctgcatgtgtactgggaagagttccagaaggaccctgtgggcctgatgagccgggtggcccagcctgccagcaagaagatcgatcagaacaagctgaaacctgagatggacgagaagggcaacctgaccaccgccggctttgcctgctctcagtgtggccagcccctgttcgtgtacaagctggagcaggtgtctgagaagggcaaggcttacaccaactacttcggacggtgcaatgtggccgagcacgaaaagctgatcctgctggcccagctgaagcccgagaaggatagcgacgaagccgtgacatatagcctgggaaagtttgggcagagggccctggatttctacagcattcatgtgaccaaggagtccacccaccccgtgaagcccctggcccagatcgccggaaacagatacgcctccggacctgtgggaaaggccctgagcgacgcatgtatgggcacaatcgcctccttcctgtctaagtaccaggacatcatcatcgaacaccagaaggtggtgaagggcaaccagaagagactggagagcctgcgggagctggccggcaaggaaaacctggaataccctagcgtgaccctgccacctcagcctcacaccaaggagggcgttgatgcctacaacgaagtgatcgcccgggtgcgaatgtgggtgaacctgaacctgtggcagaagctgaagctaagcagagatgatgccaagcctctgctgagactgaagggattcccttcctttcctctggtcgagagacaggccaacgaagtggactggtgggacatggtgtgtaacgtgaagaagctgatcaacgagaaaaaggaggatggcaaggtgttttggcagaatctggctggctacaagagacaggaagccctgagaccatacctgagcagcgaggaagatcggaagaagggaaagaaattcgctcggtaccagctgggcgacctgctgctgcacctggaaaagaagcacggcgaggactggggaaaggtgtacgacgaggcctgggagcggattgacaagaaagtggaaggcctgagcaagcacatcaagctggaagaggaacggagaagcgaggacgcccagagcaaggccgccctgaccgactggctgcgggctaaggccagcttcgtgatcgagggcctgaaggaggccgacaaggacgagttctgcagatgcgagctgaagctgcagaagtggtacggggacctgcggggaaagcccttcgccatcgaagccgagaacagcatcctggacatcagcggcttcagcaagcagtacaactgtgccttcatctggcagaaggacggcgtgaagaagctgaacctgtacctgatcatcaactacttcaagggcggcaagctgcggttcaagaagatcaaacctgaagccttcgaagccaacagattctacaccgtgatcaacaaaaagagcggcgagatcgtgcccatggaggtgaacttcaacttcgacgaccccaacctgatcatcctgcctctggcctttggcaagagacagggcagagaattcatctggaacgacctgctgtccctggaaaccggcagcctgaagctggccaacggaagagtgatcgagaagacactgtacaacagaagaacccggcaggatgagcctgccctgttcgtggccctgaccttcgagcggcgggaggtcctggactcctccaatatcaaaccaatgaacctgatcggcgtggcaagaggcgaaaacatccccgccgtgatcgccctgaccgaccccgagggctgcccactgagccggtttaaggatagcctgggaaacccaacccacatcctgagaatcggcgagagctataaggagaagcagcggaccatccaggccaagaaggaggtggagcagcggagagccggcggctacagccggaagtacgccagcaaagccaagaatctggcagacgatatggtgagaaacaccgctagagatctgctgtactacgccgtgacccaggatgccatgctgatcttcgccaacctgagccggggcttcggccggcagggcaagcggaccttcatggccgagagacagtacacacggatggaggactggctgaccgccaagctggcctacgagggcctgagcaagacctacctgtccaagacactggcccagtacacctccaagacatgcagcaactgtgggtttaccatcaccagcgccgactacgacagggtgctggagaagctgaagaagacagcaacaggctggatgaccacaattaacggcaaggagctgaaggtggagggccagattacctactacaacagatacaagagacagaacgtagtcaaggacctgtccgtcgagctggatagactgagcgaagaatctgtgaacaacgacatctcctcctggacaaagggcagaagcggagaagctctgagcctcctgaagaaaagattctcccatagacccgtgcaggagaagttcgtgtgcctgaactgcggcttcgagacacacgcagccgagcaagccgccctgaacatcgccagatcctggctgttcctgcggagccaggagtacaagaaataccagacaaacaagacaaccggcaacaccgataagagagccttcgtcgagacctggcagtccttttaccggaagaagcttaaggaggtgtggaaacctgccgtgcggtctggcggatctggcggaggctccaccagccccaagaaaaagagaaaagtctaagctgccttctgcggggcttgccttctggccatgcccttcttctctcccttgcacctgtacctcttggtctttgaataaagcctgagtaggaaggctagcaaaaaaaaaaaaaaaaaaaaaaaaaaaaaaaaaaaaaaaaaaaaaaaaaaaaaaaaaaaaaaaaaaaaaaaaaaaaaaaa

SEQ ID NO: 13493 - RNA, 5785 nt, synthetic construct
  source 1..5785: mol_type = other RNA
aggaaataagagagaaaagaagagtaagaagaaatataagagccaccatggcccctaagaagaagcgtaaagtgagccggatggaacgcctcgtctacgaggtgcggcagaagtgcagaaacatcgaggacatctgcatctcctgcggatctctgaacgtgaccctggagcacccactgttcatcggcggcatgtgccagaactgtaaaaactgttttctggagtgtgcctatcaatacgacgatgacggctaccagagctactgcaccatctgttgcggcggaagagaggtgctgatgtgtggaaataacaactgctgccggtgcttctgcgtggaatgcgtggacctgctggtgggccccggcgccgcccaggccgctattaaggaagatccttggaactgctacatgtgcggccacaagggcacatacggcctgctgagacggagagaggactggcctagcagactgcagatgttcttcgccaataaccacgaccaggagttcgacccccctaaggtgtaccctcccgtccccgccgagaagagaaagcccatccgggtcctgagcctgttcgatggcatcgccaccggtctgctggtgctgaaggacctgggcatccaggtggataggtacattgcctccgaggtgtgcgaggactccatcaccgtgggaatggtgcgtcatcagggcaagatcatgtacgtgggcgacgtgcggagcgtgacacagaagcatatccaggagtggggccctttcgacctggtgatcggcggcagcccttgcaatgacctgagcatcgtgaacccagcccggaagggcctgtacgagggaaccggcagactgttcttcgagttttacagactgctgcacgacgcccggcctaaggaaggcgacgaccggcccttcttttggctgttcgagaatgtggtggccatgggagtcagcgacaagcgggatattagccggttcctggagagcaaccccgtgatgatcgatgccaaggaagtgagcgccgcccaccgggccagatacttctggggcaatctgcctggcatgaacagacccctggccagcaccgtgaacgacaagctggagctgcaggagtgcctggagcacggccggatcgccaagttcagcaaggtgagaaccatcaccacccgaagcaacagcatcaaacaaggcaaggaccagcactttcctgtgttcatgaacgagaaggaggacatcctgtggtgtaccgagatggagagagtgttcgggttcccagtccactacacagatgtcagcaacatgtctagactggccagacagagactgctgggaagaagctggtccgtccctgtgatcagacacctgttcgcccctctgaaggagtacttcgcctgcgtgagcagcggcaacagcaacgccaacagccggggccccagcttctctagcggcctggtgccactgtccctgagagggagccacatgggccccatggagatctacaaaaccgtgagcgcctggaagcggcagcctgtgcgcgtgctgagcctgtttcggaatatcgataaagtcctgaaaagcctgggattcctggagagcggctctggctccggcggtggcaccctgaagtacgtggaggatgtgacaaacgtggtcagacgggatgtggagaagtggggccccttcgatctggtgtacggcagcacccaacccctgggcagctcttgtgaccggtgccctggctggtacatgtttcagttccaccggatcctgcagtacgccctgccgagacaggagtcccagcggccattcttttggattttcatggacaacttgctgctgaccgaggatgaccaggaaactaccactcggttcctgcagaccgaagccgtgaccctgcaggacgtgagaggccgggactaccagaacgccatgcgggtgtggtccaacatccctggactgaaaagcaagcacgcacctctgacccctaaagaagaggagtacctgcaggcccaggtgcggagcagaagcaagctggacgcccctaaggtggatctgctggtgaagaattgcctcctgcccctgagagagtacttcaagtatttcagccagaatagtctgcccctgggaggcagcggcggcggccagatcctggagagcctgaccttccaggacgtggccgtggacttcaccagggaggagtgggaccagctgtaccccgcccagaagaacctgtacagggacgtgatgctggagaactacaggaacctggtggccctgggccaccagctgtacaagcccgaggtgatcacccagctggagcaggaggagaggtggatgatgggcagggtgagcccccccgacacccaccccgacggcgagaacaggggcggcccaagcagcggcgcccctcctcccagcggcggcagcccagccggctccccaacctctaccgaggagggcacctctgagtccgccacccccgagagcggccctggcacctccaccgagcccagcgagggcagcgcacccggcagccctgccggcagccccacctccacagaggagggaaccagcaccgagcccagcgaaggcagcgccccaggcaccagcaccgagcctagtgagcaggagattaaacggatcaacaagatcagaagaagacttgtgaaagacagcaacaccaagaaggccggcaagacaggccccatgaaaaccctgctggttagagtgatgacacccgatctgagagagcggctggaaaacctgagaaagaagcctgaaaatatcccccagcccatcagcaatacatctagagccaacctgaataagctgctgaccgattacaccgaaatgaagaaggcgatcctgcatgtgtactgggaagagttccagaaggaccctgtgggcctgatgagccgggtggcccagcctgccagcaagaagatcgatcagaacaagctgaaacctgagatggacgagaagggcaacctgaccaccgccggctttgcctgctctcagtgtggccagcccctgttcgtgtacaagctggagcaggtgtctgagaagggcaaggcttacaccaactacttcggacggtgcaatgtggccgagcacgaaaagctgatcctgctggcccagctgaagcccgagaaggatagcgacgaagccgtgacatatagcctgggaaagtttgggcagagggccctggatttctacagcattcatgtgaccaaggagtccacccaccccgtgaagcccctggcccagatcgccggaaacagatacgcctccggacctgtgggaaaggccctgagcgacgcatgtatgggcacaatcgcctccttcctgtctaagtaccaggacatcatcatcgaacaccagaaggtggtgaagggcaaccagaagagactggagagcctgcgggagctggccggcaaggaaaacctggaataccctagcgtgaccctgccacctcagcctcacaccaaggagggcgttgatgcctacaacgaagtgatcgcccgggtgcgaatgtgggtgaacctgaacctgtggcagaagctgaagctaagcagagatgatgccaagcctctgctgagactgaagggattcccttcctttcctctggtcgagagacaggccaacgaagtggactggtgggacatggtgtgtaacgtgaagaagctgatcaacgagaaaaaggaggatggcaaggtgttttggcagaatctggctggctacaagagacaggaagccctgagaccatacctgagcagcgaggaagatcggaagaagggaaagaaattcgctcggtaccagctgggcgacctgctgctgcacctggaaaagaagcacggcgaggactggggaaaggtgtacgacgaggcctgggagcggattgacaagaaagtggaaggcctgagcaagcacatcaagctggaagaggaacggagaagcgaggacgcccagagcaaggccgccctgaccgactggctgcgggctaaggccagcttcgtgatcgagggcctgaaggaggccgacaaggacgagttctgcagatgcgagctgaagctgcagaagtggtacggggacctgcggggaaagcccttcgccatcgaagccgagaacagcatcctggacatcagcggcttcagcaagcagtacaactgtgccttcatctggcagaaggacggcgtgaagaagctgaacctgtacctgatcatcaactacttcaagggcggcaagctgcggttcaagaagatcaaacctgaagccttcgaagccaacagattctacaccgtgatcaacaaaaagagcggcgagatcgtgcccatggaggtgaacttcaacttcgacgaccccaacctgatcatcctgcctctggcctttggcaagagacagggcagagaattcatctggaacgacctgctgtccctggaaaccggcagcctgaagctggccaacggaagagtgatcgagaagacactgtacaacagaagaacccggcaggatgagcctgccctgttcgtggccctgaccttcgagcggcgggaggtcctggactcctccaatatcaaaccaatgaacctgatcggcgtggcaagaggcgaaaacatccccgccgtgatcgccctgaccgaccccgagggctgcccactgagccggtttaaggatagcctgggaaacccaacccacatcctgagaatcggcgagagctataaggagaagcagcggaccatccaggccaagaaggaggtggagcagcggagagccggcggctacagccggaagtacgccagcaaagccaagaatctggcagacgatatggtgagaaacaccgctagagatctgctgtactacgccgtgacccaggatgccatgctgatcttcgccaacctgagccggggcttcggccggcagggcaagcggaccttcatggccgagagacagtacacacggatggaggactggctgaccgccaagctggcctacgagggcctgagcaagacctacctgtccaagacactggcccagtacacctccaagacatgcagcaactgtgggtttaccatcaccagcgccgactacgacagggtgctggagaagctgaagaagacagcaacaggctggatgaccacaattaacggcaaggagctgaaggtggagggccagattacctactacaacagatacaagagacagaacgtagtcaaggacctgtccgtcgagctggatagactgagcgaagaatctgtgaacaacgacatctcctcctggacaaagggcagaagcggagaagctctgagcctcctgaagaaaagattctcccatagacccgtgcaggagaagttcgtgtgcctgaactgcggcttcgagacacacgcagccgagcaagccgccctgaacatcgccagatcctggctgttcctgcggagccaggagtacaagaaataccagacaaacaagacaaccggcaacaccgataagagagccttcgtcgagacctggcagtccttttaccggaagaagcttaaggaggtgtggaaacctgccgtgcggtctggcggatctggcggaggctccaccagccccaagaaaaagagaaaagtctaagctgccttctgcggggcttgccttctggccatgcccttcttctctcccttgcacctgtacctcttggtctttgaataaagcctgagtaggaaggctagcaaaaaaaaaaaaaaaaaaaaaaaaaaaaaaaaaaaaaaaaaaaaaaaaaaaaaaaaaaaaaaaaaaaaaaaaaaaaaaaa

SEQ ID NO: 13494 - RNA, 5785 nt, synthetic construct
  source 1..5785: mol_type = other RNA
aggaaataagagagaaaagaagagtaagaagaaatataagagccaccatggcccctaagaagaagcgtaaagtgagccggatggaacgcctcgtctacgaggtgcggcagaagtgcagaaacatcgaggacatctgcatctcctgcggatctctgaacgtgaccctggagcacccactgttcatcggcggcatgtgccagaactgtaaaaactgttttctggagtgtgcctatcaatacgacgatgacggctaccagagctactgcaccatctgttgcggcggaagagaggtgctgatgtgtggaaataacaactgctgccggtgcttctgcgtggaatgcgtggacctgctggtgggccccggcgccgcccaggccgctattaaggaagatccttggaactgctacatgtgcggccacaagggcacatacggcctgctgagacggagagaggactggcctagcagactgcagatgttcttcgccaataaccacgaccaggagttcgacccccctaaggtgtaccctcccgtccccgccgagaagagaaagcccatccgggtcctgagcctgttcgatggcatcgccaccggtctgctggtgctgaaggacctgggcatccaggtggataggtacattgcctccgaggtgtgcgaggactccatcaccgtgggaatggtgcgtcatcagggcaagatcatgtacgtgggcgacgtgcggagcgtgacacagaagcatatccaggagtggggccctttcgacctggtgatcggcggcagcccttgcaatgacctgagcatcgtgaacccagcccggaagggcctgtacgagggaaccggcagactgttcttcgagttttacagactgctgcacgacgcccggcctaaggaaggcgacgaccggcccttcttttggctgttcgagaatgtggtggccatgggagtcagcgacaagcgggatattagccggttcctggagagcaaccccgtgatgatcgatgccaaggaagtgagcgccgcccaccgggccagatacttctggggcaatctgcctggcatgaacagacccctggccagcaccgtgaacgacaagctggagctgcaggagtgcctggagcacggccggatcgccaagttcagcaaggtgagaaccatcaccacccgaagcaacagcatcaaacaaggcaaggaccagcactttcctgtgttcatgaacgagaaggaggacatcctgtggtgtaccgagatggagagagtgttcgggttcccagtccactacacagatgtcagcaacatgtctagactggccagacagagactgctgggaagaagctggtccgtccctgtgatcagacacctgttcgcccctctgaaggagtacttcgcctgcgtgagcagcggcaacagcaacgccaacagccggggccccagcttctctagcggcctggtgccactgtccctgagagggagccacatgggccccatggagatctacaaaaccgtgagcgcctggaagcggcagcctgtgcgcgtgctgagcctgtttcggaatatcgataaagtcctgaaaagcctgggattcctggagagcggctctggctccggcggtggcaccctgaagtacgtggaggatgtgacaaacgtggtcagacgggatgtggagaagtggggccccttcgatctggtgtacggcagcacccaacccctgggcagctcttgtgaccggtgccctggctggtacatgtttcagttccaccggatcctgcagtacgccctgccgagacaggagtcccagcggccattcttttggattttcatggacaacttgctgctgaccgaggatgaccaggaaactaccactcggttcctgcagaccgaagccgtgaccctgcaggacgtgagaggccgggactaccagaacgccatgcgggtgtggtccaacatccctggactgaaaagcaagcacgcacctctgacccctaaagaagaggagtacctgcaggcccaggtgcggagcagaagcaagctggacgcccctaaggtggatctgctggtgaagaattgcctcctgcccctgagagagtacttcaagtatttcagccagaatagtctgcccctgggaggcagcggcggcggcatggccttcatggacgtggccgtggacttcacccaggaggagtggaggctgctgagccccgcccagaggaccctgtacagggaggtgatgctggagaactacagcaacctggtgagcctgggcatccccttcagcaagcccaagctgatcaccctgctggagcaggagaaggtgacctggagggagaagaggaagtgccccctggccacctgccccgccgagcccgagcccgagcccgagctgggcggcccaagcagcggcgcccctcctcccagcggcggcagcccagccggctccccaacctctaccgaggagggcacctctgagtccgccacccccgagagcggccctggcacctccaccgagcccagcgagggcagcgcacccggcagccctgccggcagccccacctccacagaggagggaaccagcaccgagcccagcgaaggcagcgccccaggcaccagcaccgagcctagtgagcaggagattaaacggatcaacaagatcagaagaagacttgtgaaagacagcaacaccaagaaggccggcaagacaggccccatgaaaaccctgctggttagagtgatgacacccgatctgagagagcggctggaaaacctgagaaagaagcctgaaaatatcccccagcccatcagcaatacatctagagccaacctgaataagctgctgaccgattacaccgaaatgaagaaggcgatcctgcatgtgtactgggaagagttccagaaggaccctgtgggcctgatgagccgggtggcccagcctgccagcaagaagatcgatcagaacaagctgaaacctgagatggacgagaagggcaacctgaccaccgccggctttgcctgctctcagtgtggccagcccctgttcgtgtacaagctggagcaggtgtctgagaagggcaaggcttacaccaactacttcggacggtgcaatgtggccgagcacgaaaagctgatcctgctggcccagctgaagcccgagaaggatagcgacgaagccgtgacatatagcctgggaaagtttgggcagagggccctggatttctacagcattcatgtgaccaaggagtccacccaccccgtgaagcccctggcccagatcgccggaaacagatacgcctccggacctgtgggaaaggccctgagcgacgcatgtatgggcacaatcgcctccttcctgtctaagtaccaggacatcatcatcgaacaccagaaggtggtgaagggcaaccagaagagactggagagcctgcgggagctggccggcaaggaaaacctggaataccctagcgtgaccctgccacctcagcctcacaccaaggagggcgttgatgcctacaacgaagtgatcgcccgggtgcgaatgtgggtgaacctgaacctgtggcagaagctgaagctaagcagagatgatgccaagcctctgctgagactgaagggattcccttcctttcctctggtcgagagacaggccaacgaagtggactggtgggacatggtgtgtaacgtgaagaagctgatcaacgagaaaaaggaggatggcaaggtgttttggcagaatctggctggctacaagagacaggaagccctgagaccatacctgagcagcgaggaagatcggaagaagggaaagaaattcgctcggtaccagctgggcgacctgctgctgcacctggaaaagaagcacggcgaggactggggaaaggtgtacgacgaggcctgggagcggattgacaagaaagtggaaggcctgagcaagcacatcaagctggaagaggaacggagaagcgaggacgcccagagcaaggccgccctgaccgactggctgcgggctaaggccagcttcgtgatcgagggcctgaaggaggccgacaaggacgagttctgcagatgcgagctgaagctgcagaagtggtacggggacctgcggggaaagcccttcgccatcgaagccgagaacagcatcctggacatcagcggcttcagcaagcagtacaactgtgccttcatctggcagaaggacggcgtgaagaagctgaacctgtacctgatcatcaactacttcaagggcggcaagctgcggttcaagaagatcaaacctgaagccttcgaagccaacagattctacaccgtgatcaacaaaaagagcggcgagatcgtgcccatggaggtgaacttcaacttcgacgaccccaacctgatcatcctgcctctggcctttggcaagagacagggcagagaattcatctggaacgacctgctgtccctggaaaccggcagcctgaagctggccaacggaagagtgatcgagaagacactgtacaacagaagaacccggcaggatgagcctgccctgttcgtggccctgaccttcgagcggcgggaggtcctggactcctccaatatcaaaccaatgaacctgatcggcgtggcaagaggcgaaaacatccccgccgtgatcgccctgaccgaccccgagggctgcccactgagccggtttaaggatagcctgggaaacccaacccacatcctgagaatcggcgagagctataaggagaagcagcggaccatccaggccaagaaggaggtggagcagcggagagccggcggctacagccggaagtacgccagcaaagccaagaatctggcagacgatatggtgagaaacaccgctagagatctgctgtactacgccgtgacccaggatgccatgctgatcttcgccaacctgagccggggcttcggccggcagggcaagcggaccttcatggccgagagacagtacacacggatggaggactggctgaccgccaagctggcctacgagggcctgagcaagacctacctgtccaagacactggcccagtacacctccaagacatgcagcaactgtgggtttaccatcaccagcgccgactacgacagggtgctggagaagctgaagaagacagcaacaggctggatgaccacaattaacggcaaggagctgaaggtggagggccagattacctactacaacagatacaagagacagaacgtagtcaaggacctgtccgtcgagctggatagactgagcgaagaatctgtgaacaacgacatctcctcctggacaaagggcagaagcggagaagctctgagcctcctgaagaaaagattctcccatagacccgtgcaggagaagttcgtgtgcctgaactgcggcttcgagacacacgcagccgagcaagccgccctgaacatcgccagatcctggctgttcctgcggagccaggagtacaagaaataccagacaaacaagacaaccggcaacaccgataagagagccttcgtcgagacctggcagtccttttaccggaagaagcttaaggaggtgtggaaacctgccgtgcggtctggcggatctggcggaggctccaccagccccaagaaaaagagaaaagtctaagctgccttctgcggggcttgccttctggccatgcccttcttctctcccttgcacctgtacctcttggtctttgaataaagcctgagtaggaaggctagcaaaaaaaaaaaaaaaaaaaaaaaaaaaaaaaaaaaaaaaaaaaaaaaaaaaaaaaaaaaaaaaaaaaaaaaaaaaaaaaa

SEQ ID NO: 13495 - RNA, 5785 nt, synthetic construct
  source 1..5785: mol_type = other RNA
aggaaataagagagaaaagaagagtaagaagaaatataagagccaccatggcccctaagaagaagcgtaaagtgagccggatggaacgcctcgtctacgaggtgcggcagaagtgcagaaacatcgaggacatctgcatctcctgcggatctctgaacgtgaccctggagcacccactgttcatcggcggcatgtgccagaactgtaaaaactgttttctggagtgtgcctatcaatacgacgatgacggctaccagagctactgcaccatctgttgcggcggaagagaggtgctgatgtgtggaaataacaactgctgccggtgcttctgcgtggaatgcgtggacctgctggtgggccccggcgccgcccaggccgctattaaggaagatccttggaactgctacatgtgcggccacaagggcacatacggcctgctgagacggagagaggactggcctagcagactgcagatgttcttcgccaataaccacgaccaggagttcgacccccctaaggtgtaccctcccgtccccgccgagaagagaaagcccatccgggtcctgagcctgttcgatggcatcgccaccggtctgctggtgctgaaggacctgggcatccaggtggataggtacattgcctccgaggtgtgcgaggactccatcaccgtgggaatggtgcgtcatcagggcaagatcatgtacgtgggcgacgtgcggagcgtgacacagaagcatatccaggagtggggccctttcgacctggtgatcggcggcagcccttgcaatgacctgagcatcgtgaacccagcccggaagggcctgtacgagggaaccggcagactgttcttcgagttttacagactgctgcacgacgcccggcctaaggaaggcgacgaccggcccttcttttggctgttcgagaatgtggtggccatgggagtcagcgacaagcgggatattagccggttcctggagagcaaccccgtgatgatcgatgccaaggaagtgagcgccgcccaccgggccagatacttctggggcaatctgcctggcatgaacagacccctggccagcaccgtgaacgacaagctggagctgcaggagtgcctggagcacggccggatcgccaagttcagcaaggtgagaaccatcaccacccgaagcaacagcatcaaacaaggcaaggaccagcactttcctgtgttcatgaacgagaaggaggacatcctgtggtgtaccgagatggagagagtgttcgggttcccagtccactacacagatgtcagcaacatgtctagactggccagacagagactgctgggaagaagctggtccgtccctgtgatcagacacctgttcgcccctctgaaggagtacttcgcctgcgtgagcagcggcaacagcaacgccaacagccggggccccagcttctctagcggcctggtgccactgtccctgagagggagccacatgggccccatggagatctacaaaaccgtgagcgcctggaagcggcagcctgtgcgcgtgctgagcctgtttcggaatatcgataaagtcctgaaaagcctgggattcctggagagcggctctggctccggcggtggcaccctgaagtacgtggaggatgtgacaaacgtggtcagacgggatgtggagaagtggggccccttcgatctggtgtacggcagcacccaacccctgggcagctcttgtgaccggtgccctggctggtacatgtttcagttccaccggatcctgcagtacgccctgccgagacaggagtcccagcggccattcttttggattttcatggacaacttgctgctgaccgaggatgaccaggaaactaccactcggttcctgcagaccgaagccgtgaccctgcaggacgtgagaggccgggactaccagaacgccatgcgggtgtggtccaacatccctggactgaaaagcaagcacgcacctctgacccctaaagaagaggagtacctgcaggcccaggtgcggagcagaagcaagctggacgcccctaaggtggatctgctggtgaagaattgcctcctgcccctgagagagtacttcaagtatttcagccagaatagtctgcccctgggaggcagcggcggcggcaggcccggcgccgtgagcttcgccgacgtggccgtgtacttcagccccgaggagtgggagtgcctgaggcccgcccagagggccctgtacagggacgtgatgagggagaccttcggccacctgggcgccctgggcttcagcggccccaagcccgccttcatcagctgggtggagggcgaggtggaggcctggagccccgagagccaggaccccgacggcgagagcagcgccgccttcagcaggggcggcccaagcagcggcgcccctcctcccagcggcggcagcccagccggctccccaacctctaccgaggagggcacctctgagtccgccacccccgagagcggccctggcacctccaccgagcccagcgagggcagcgcacccggcagccctgccggcagccccacctccacagaggagggaaccagcaccgagcccagcgaaggcagcgccccaggcaccagcaccgagcctagtgagcaggagattaaacggatcaacaagatcagaagaagacttgtgaaagacagcaacaccaagaaggccggcaagacaggccccatgaaaaccctgctggttagagtgatgacacccgatctgagagagcggctggaaaacctgagaaagaagcctgaaaatatcccccagcccatcagcaatacatctagagccaacctgaataagctgctgaccgattacaccgaaatgaagaaggcgatcctgcatgtgtactgggaagagttccagaaggaccctgtgggcctgatgagccgggtggcccagcctgccagcaagaagatcgatcagaacaagctgaaacctgagatggacgagaagggcaacctgaccaccgccggctttgcctgctctcagtgtggccagcccctgttcgtgtacaagctggagcaggtgtctgagaagggcaaggcttacaccaactacttcggacggtgcaatgtggccgagcacgaaaagctgatcctgctggcccagctgaagcccgagaaggatagcgacgaagccgtgacatatagcctgggaaagtttgggcagagggccctggatttctacagcattcatgtgaccaaggagtccacccaccccgtgaagcccctggcccagatcgccggaaacagatacgcctccggacctgtgggaaaggccctgagcgacgcatgtatgggcacaatcgcctccttcctgtctaagtaccaggacatcatcatcgaacaccagaaggtggtgaagggcaaccagaagagactggagagcctgcgggagctggccggcaaggaaaacctggaataccctagcgtgaccctgccacctcagcctcacaccaaggagggcgttgatgcctacaacgaagtgatcgcccgggtgcgaatgtgggtgaacctgaacctgtggcagaagctgaagctaagcagagatgatgccaagcctctgctgagactgaagggattcccttcctttcctctggtcgagagacaggccaacgaagtggactggtgggacatggtgtgtaacgtgaagaagctgatcaacgagaaaaaggaggatggcaaggtgttttggcagaatctggctggctacaagagacaggaagccctgagaccatacctgagcagcgaggaagatcggaagaagggaaagaaattcgctcggtaccagctgggcgacctgctgctgcacctggaaaagaagcacggcgaggactggggaaaggtgtacgacgaggcctgggagcggattgacaagaaagtggaaggcctgagcaagcacatcaagctggaagaggaacggagaagcgaggacgcccagagcaaggccgccctgaccgactggctgcgggctaaggccagcttcgtgatcgagggcctgaaggaggccgacaaggacgagttctgcagatgcgagctgaagctgcagaagtggtacggggacctgcggggaaagcccttcgccatcgaagccgagaacagcatcctggacatcagcggcttcagcaagcagtacaactgtgccttcatctggcagaaggacggcgtgaagaagctgaacctgtacctgatcatcaactacttcaagggcggcaagctgcggttcaagaagatcaaacctgaagccttcgaagccaacagattctacaccgtgatcaacaaaaagagcggcgagatcgtgcccatggaggtgaacttcaacttcgacgaccccaacctgatcatcctgcctctggcctttggcaagagacagggcagagaattcatctggaacgacctgctgtccctggaaaccggcagcctgaagctggccaacggaagagtgatcgagaagacactgtacaacagaagaacccggcaggatgagcctgccctgttcgtggccctgaccttcgagcggcgggaggtcctggactcctccaatatcaaaccaatgaacctgatcggcgtggcaagaggcgaaaacatccccgccgtgatcgccctgaccgaccccgagggctgcccactgagccggtttaaggatagcctgggaaacccaacccacatcctgagaatcggcgagagctataaggagaagcagcggaccatccaggccaagaaggaggtggagcagcggagagccggcggctacagccggaagtacgccagcaaagccaagaatctggcagacgatatggtgagaaacaccgctagagatctgctgtactacgccgtgacccaggatgccatgctgatcttcgccaacctgagccggggcttcggccggcagggcaagcggaccttcatggccgagagacagtacacacggatggaggactggctgaccgccaagctggcctacgagggcctgagcaagacctacctgtccaagacactggcccagtacacctccaagacatgcagcaactgtgggtttaccatcaccagcgccgactacgacagggtgctggagaagctgaagaagacagcaacaggctggatgaccacaattaacggcaaggagctgaaggtggagggccagattacctactacaacagatacaagagacagaacgtagtcaaggacctgtccgtcgagctggatagactgagcgaagaatctgtgaacaacgacatctcctcctggacaaagggcagaagcggagaagctctgagcctcctgaagaaaagattctcccatagacccgtgcaggagaagttcgtgtgcctgaactgcggcttcgagacacacgcagccgagcaagccgccctgaacatcgccagatcctggctgttcctgcggagccaggagtacaagaaataccagacaaacaagacaaccggcaacaccgataagagagccttcgtcgagacctggcagtccttttaccggaagaagcttaaggaggtgtggaaacctgccgtgcggtctggcggatctggcggaggctccaccagccccaagaaaaagagaaaagtctaagctgccttctgcggggcttgccttctggccatgcccttcttctctcccttgcacctgtacctcttggtctttgaataaagcctgagtaggaaggctagcaaaaaaaaaaaaaaaaaaaaaaaaaaaaaaaaaaaaaaaaaaaaaaaaaaaaaaaaaaaaaaaaaaaaaaaaaaaaaaaa

SEQ ID NO: 13496 - RNA, 5785 nt, synthetic construct
  source 1..5785: mol_type = other RNA
aggaaataagagagaaaagaagagtaagaagaaatataagagccaccatggcccctaagaagaagcgtaaagtgagccggatggaacgcctcgtctacgaggtgcggcagaagtgcagaaacatcgaggacatctgcatctcctgcggatctctgaacgtgaccctggagcacccactgttcatcggcggcatgtgccagaactgtaaaaactgttttctggagtgtgcctatcaatacgacgatgacggctaccagagctactgcaccatctgttgcggcggaagagaggtgctgatgtgtggaaataacaactgctgccggtgcttctgcgtggaatgcgtggacctgctggtgggccccggcgccgcccaggccgctattaaggaagatccttggaactgctacatgtgcggccacaagggcacatacggcctgctgagacggagagaggactggcctagcagactgcagatgttcttcgccaataaccacgaccaggagttcgacccccctaaggtgtaccctcccgtccccgccgagaagagaaagcccatccgggtcctgagcctgttcgatggcatcgccaccggtctgctggtgctgaaggacctgggcatccaggtggataggtacattgcctccgaggtgtgcgaggactccatcaccgtgggaatggtgcgtcatcagggcaagatcatgtacgtgggcgacgtgcggagcgtgacacagaagcatatccaggagtggggccctttcgacctggtgatcggcggcagcccttgcaatgacctgagcatcgtgaacccagcccggaagggcctgtacgagggaaccggcagactgttcttcgagttttacagactgctgcacgacgcccggcctaaggaaggcgacgaccggcccttcttttggctgttcgagaatgtggtggccatgggagtcagcgacaagcgggatattagccggttcctggagagcaaccccgtgatgatcgatgccaaggaagtgagcgccgcccaccgggccagatacttctggggcaatctgcctggcatgaacagacccctggccagcaccgtgaacgacaagctggagctgcaggagtgcctggagcacggccggatcgccaagttcagcaaggtgagaaccatcaccacccgaagcaacagcatcaaacaaggcaaggaccagcactttcctgtgttcatgaacgagaaggaggacatcctgtggtgtaccgagatggagagagtgttcgggttcccagtccactacacagatgtcagcaacatgtctagactggccagacagagactgctgggaagaagctggtccgtccctgtgatcagacacctgttcgcccctctgaaggagtacttcgcctgcgtgagcagcggcaacagcaacgccaacagccggggccccagcttctctagcggcctggtgccactgtccctgagagggagccacatgggccccatggagatctacaaaaccgtgagcgcctggaagcggcagcctgtgcgcgtgctgagcctgtttcggaatatcgataaagtcctgaaaagcctgggattcctggagagcggctctggctccggcggtggcaccctgaagtacgtggaggatgtgacaaacgtggtcagacgggatgtggagaagtggggccccttcgatctggtgtacggcagcacccaacccctgggcagctcttgtgaccggtgccctggctggtacatgtttcagttccaccggatcctgcagtacgccctgccgagacaggagtcccagcggccattcttttggattttcatggacaacttgctgctgaccgaggatgaccaggaaactaccactcggttcctgcagaccgaagccgtgaccctgcaggacgtgagaggccgggactaccagaacgccatgcgggtgtggtccaacatccctggactgaaaagcaagcacgcacctctgacccctaaagaagaggagtacctgcaggcccaggtgcggagcagaagcaagctggacgcccctaaggtggatctgctggtgaagaattgcctcctgcccctgagagagtacttcaagtatttcagccagaatagtctgcccctgggaggcagcggcggcggcgcccacgccctggtgaccttcagggacgtggccatcgacttcagccagaaggagtgggagtgcctggacaccacccagaggaagctgtacagggacgtgatgctggagaactacagcaacctggtgagcctgggctacagcggcagcaagcccgacgtgatcaccctgctggagcagggcaaggagccctgcgtggccgtgagggacgtgaccggcacccagtaccccggcctgctgagcaggggcggcccaagcagcggcgcccctcctcccagcggcggcagcccagccggctccccaacctctaccgaggagggcacctctgagtccgccacccccgagagcggccctggcacctccaccgagcccagcgagggcagcgcacccggcagccctgccggcagccccacctccacagaggagggaaccagcaccgagcccagcgaaggcagcgccccaggcaccagcaccgagcctagtgagcaggagattaaacggatcaacaagatcagaagaagacttgtgaaagacagcaacaccaagaaggccggcaagacaggccccatgaaaaccctgctggttagagtgatgacacccgatctgagagagcggctggaaaacctgagaaagaagcctgaaaatatcccccagcccatcagcaatacatctagagccaacctgaataagctgctgaccgattacaccgaaatgaagaaggcgatcctgcatgtgtactgggaagagttccagaaggaccctgtgggcctgatgagccgggtggcccagcctgccagcaagaagatcgatcagaacaagctgaaacctgagatggacgagaagggcaacctgaccaccgccggctttgcctgctctcagtgtggccagcccctgttcgtgtacaagctggagcaggtgtctgagaagggcaaggcttacaccaactacttcggacggtgcaatgtggccgagcacgaaaagctgatcctgctggcccagctgaagcccgagaaggatagcgacgaagccgtgacatatagcctgggaaagtttgggcagagggccctggatttctacagcattcatgtgaccaaggagtccacccaccccgtgaagcccctggcccagatcgccggaaacagatacgcctccggacctgtgggaaaggccctgagcgacgcatgtatgggcacaatcgcctccttcctgtctaagtaccaggacatcatcatcgaacaccagaaggtggtgaagggcaaccagaagagactggagagcctgcgggagctggccggcaaggaaaacctggaataccctagcgtgaccctgccacctcagcctcacaccaaggagggcgttgatgcctacaacgaagtgatcgcccgggtgcgaatgtgggtgaacctgaacctgtggcagaagctgaagctaagcagagatgatgccaagcctctgctgagactgaagggattcccttcctttcctctggtcgagagacaggccaacgaagtggactggtgggacatggtgtgtaacgtgaagaagctgatcaacgagaaaaaggaggatggcaaggtgttttggcagaatctggctggctacaagagacaggaagccctgagaccatacctgagcagcgaggaagatcggaagaagggaaagaaattcgctcggtaccagctgggcgacctgctgctgcacctggaaaagaagcacggcgaggactggggaaaggtgtacgacgaggcctgggagcggattgacaagaaagtggaaggcctgagcaagcacatcaagctggaagaggaacggagaagcgaggacgcccagagcaaggccgccctgaccgactggctgcgggctaaggccagcttcgtgatcgagggcctgaaggaggccgacaaggacgagttctgcagatgcgagctgaagctgcagaagtggtacggggacctgcggggaaagcccttcgccatcgaagccgagaacagcatcctggacatcagcggcttcagcaagcagtacaactgtgccttcatctggcagaaggacggcgtgaagaagctgaacctgtacctgatcatcaactacttcaagggcggcaagctgcggttcaagaagatcaaacctgaagccttcgaagccaacagattctacaccgtgatcaacaaaaagagcggcgagatcgtgcccatggaggtgaacttcaacttcgacgaccccaacctgatcatcctgcctctggcctttggcaagagacagggcagagaattcatctggaacgacctgctgtccctggaaaccggcagcctgaagctggccaacggaagagtgatcgagaagacactgtacaacagaagaacccggcaggatgagcctgccctgttcgtggccctgaccttcgagcggcgggaggtcctggactcctccaatatcaaaccaatgaacctgatcggcgtggcaagaggcgaaaacatccccgccgtgatcgccctgaccgaccccgagggctgcccactgagccggtttaaggatagcctgggaaacccaacccacatcctgagaatcggcgagagctataaggagaagcagcggaccatccaggccaagaaggaggtggagcagcggagagccggcggctacagccggaagtacgccagcaaagccaagaatctggcagacgatatggtgagaaacaccgctagagatctgctgtactacgccgtgacccaggatgccatgctgatcttcgccaacctgagccggggcttcggccggcagggcaagcggaccttcatggccgagagacagtacacacggatggaggactggctgaccgccaagctggcctacgagggcctgagcaagacctacctgtccaagacactggcccagtacacctccaagacatgcagcaactgtgggtttaccatcaccagcgccgactacgacagggtgctggagaagctgaagaagacagcaacaggctggatgaccacaattaacggcaaggagctgaaggtggagggccagattacctactacaacagatacaagagacagaacgtagtcaaggacctgtccgtcgagctggatagactgagcgaagaatctgtgaacaacgacatctcctcctggacaaagggcagaagcggagaagctctgagcctcctgaagaaaagattctcccatagacccgtgcaggagaagttcgtgtgcctgaactgcggcttcgagacacacgcagccgagcaagccgccctgaacatcgccagatcctggctgttcctgcggagccaggagtacaagaaataccagacaaacaagacaaccggcaacaccgataagagagccttcgtcgagacctggcagtccttttaccggaagaagcttaaggaggtgtggaaacctgccgtgcggtctggcggatctggcggaggctccaccagccccaagaaaaagagaaaagtctaagctgccttctgcggggcttgccttctggccatgcccttcttctctcccttgcacctgtacctcttggtctttgaataaagcctgagtaggaaggctagcaaaaaaaaaaaaaaaaaaaaaaaaaaaaaaaaaaaaaaaaaaaaaaaaaaaaaaaaaaaaaaaaaaaaaaaaaaaaaaaa

SEQ ID NO: 13497 - RNA, 5785 nt, synthetic construct
  source 1..5785: mol_type = other RNA
aggaaataagagagaaaagaagagtaagaagaaatataagagccaccatggcccctaagaagaagcgtaaagtgagccggatggaacgcctcgtctacgaggtgcggcagaagtgcagaaacatcgaggacatctgcatctcctgcggatctctgaacgtgaccctggagcacccactgttcatcggcggcatgtgccagaactgtaaaaactgttttctggagtgtgcctatcaatacgacgatgacggctaccagagctactgcaccatctgttgcggcggaagagaggtgctgatgtgtggaaataacaactgctgccggtgcttctgcgtggaatgcgtggacctgctggtgggccccggcgccgcccaggccgctattaaggaagatccttggaactgctacatgtgcggccacaagggcacatacggcctgctgagacggagagaggactggcctagcagactgcagatgttcttcgccaataaccacgaccaggagttcgacccccctaaggtgtaccctcccgtccccgccgagaagagaaagcccatccgggtcctgagcctgttcgatggcatcgccaccggtctgctggtgctgaaggacctgggcatccaggtggataggtacattgcctccgaggtgtgcgaggactccatcaccgtgggaatggtgcgtcatcagggcaagatcatgtacgtgggcgacgtgcggagcgtgacacagaagcatatccaggagtggggccctttcgacctggtgatcggcggcagcccttgcaatgacctgagcatcgtgaacccagcccggaagggcctgtacgagggaaccggcagactgttcttcgagttttacagactgctgcacgacgcccggcctaaggaaggcgacgaccggcccttcttttggctgttcgagaatgtggtggccatgggagtcagcgacaagcgggatattagccggttcctggagagcaaccccgtgatgatcgatgccaaggaagtgagcgccgcccaccgggccagatacttctggggcaatctgcctggcatgaacagacccctggccagcaccgtgaacgacaagctggagctgcaggagtgcctggagcacggccggatcgccaagttcagcaaggtgagaaccatcaccacccgaagcaacagcatcaaacaaggcaaggaccagcactttcctgtgttcatgaacgagaaggaggacatcctgtggtgtaccgagatggagagagtgttcgggttcccagtccactacacagatgtcagcaacatgtctagactggccagacagagactgctgggaagaagctggtccgtccctgtgatcagacacctgttcgcccctctgaaggagtacttcgcctgcgtgagcagcggcaacagcaacgccaacagccggggccccagcttctctagcggcctggtgccactgtccctgagagggagccacatgggccccatggagatctacaaaaccgtgagcgcctggaagcggcagcctgtgcgcgtgctgagcctgtttcggaatatcgataaagtcctgaaaagcctgggattcctggagagcggctctggctccggcggtggcaccctgaagtacgtggaggatgtgacaaacgtggtcagacgggatgtggagaagtggggccccttcgatctggtgtacggcagcacccaacccctgggcagctcttgtgaccggtgccctggctggtacatgtttcagttccaccggatcctgcagtacgccctgccgagacaggagtcccagcggccattcttttggattttcatggacaacttgctgctgaccgaggatgaccaggaaactaccactcggttcctgcagaccgaagccgtgaccctgcaggacgtgagaggccgggactaccagaacgccatgcgggtgtggtccaacatccctggactgaaaagcaagcacgcacctctgacccctaaagaagaggagtacctgcaggcccaggtgcggagcagaagcaagctggacgcccctaaggtggatctgctggtgaagaattgcctcctgcccctgagagagtacttcaagtatttcagccagaatagtctgcccctgggaggcagcggcggcggcttccagggcagcgtgaccttcagggacgtggccatcgacttcagccaggaggagtgggagtggctgcagcccgcccagagggacctgtacaggcacgtgatgctggagaactacggccacctggtgagcctggccggcttcaacatcagcaagccctacgtggtgagcctgctggagcagggcagggagccctggctggtgaagggcgacgtgaggagggaccccttcagcgagagcaacggcggcggcccaagcagcggcgcccctcctcccagcggcggcagcccagccggctccccaacctctaccgaggagggcacctctgagtccgccacccccgagagcggccctggcacctccaccgagcccagcgagggcagcgcacccggcagccctgccggcagccccacctccacagaggagggaaccagcaccgagcccagcgaaggcagcgccccaggcaccagcaccgagcctagtgagcaggagattaaacggatcaacaagatcagaagaagacttgtgaaagacagcaacaccaagaaggccggcaagacaggccccatgaaaaccctgctggttagagtgatgacacccgatctgagagagcggctggaaaacctgagaaagaagcctgaaaatatcccccagcccatcagcaatacatctagagccaacctgaataagctgctgaccgattacaccgaaatgaagaaggcgatcctgcatgtgtactgggaagagttccagaaggaccctgtgggcctgatgagccgggtggcccagcctgccagcaagaagatcgatcagaacaagctgaaacctgagatggacgagaagggcaacctgaccaccgccggctttgcctgctctcagtgtggccagcccctgttcgtgtacaagctggagcaggtgtctgagaagggcaaggcttacaccaactacttcggacggtgcaatgtggccgagcacgaaaagctgatcctgctggcccagctgaagcccgagaaggatagcgacgaagccgtgacatatagcctgggaaagtttgggcagagggccctggatttctacagcattcatgtgaccaaggagtccacccaccccgtgaagcccctggcccagatcgccggaaacagatacgcctccggacctgtgggaaaggccctgagcgacgcatgtatgggcacaatcgcctccttcctgtctaagtaccaggacatcatcatcgaacaccagaaggtggtgaagggcaaccagaagagactggagagcctgcgggagctggccggcaaggaaaacctggaataccctagcgtgaccctgccacctcagcctcacaccaaggagggcgttgatgcctacaacgaagtgatcgcccgggtgcgaatgtgggtgaacctgaacctgtggcagaagctgaagctaagcagagatgatgccaagcctctgctgagactgaagggattcccttcctttcctctggtcgagagacaggccaacgaagtggactggtgggacatggtgtgtaacgtgaagaagctgatcaacgagaaaaaggaggatggcaaggtgttttggcagaatctggctggctacaagagacaggaagccctgagaccatacctgagcagcgaggaagatcggaagaagggaaagaaattcgctcggtaccagctgggcgacctgctgctgcacctggaaaagaagcacggcgaggactggggaaaggtgtacgacgaggcctgggagcggattgacaagaaagtggaaggcctgagcaagcacatcaagctggaagaggaacggagaagcgaggacgcccagagcaaggccgccctgaccgactggctgcgggctaaggccagcttcgtgatcgagggcctgaaggaggccgacaaggacgagttctgcagatgcgagctgaagctgcagaagtggtacggggacctgcggggaaagcccttcgccatcgaagccgagaacagcatcctggacatcagcggcttcagcaagcagtacaactgtgccttcatctggcagaaggacggcgtgaagaagctgaacctgtacctgatcatcaactacttcaagggcggcaagctgcggttcaagaagatcaaacctgaagccttcgaagccaacagattctacaccgtgatcaacaaaaagagcggcgagatcgtgcccatggaggtgaacttcaacttcgacgaccccaacctgatcatcctgcctctggcctttggcaagagacagggcagagaattcatctggaacgacctgctgtccctggaaaccggcagcctgaagctggccaacggaagagtgatcgagaagacactgtacaacagaagaacccggcaggatgagcctgccctgttcgtggccctgaccttcgagcggcgggaggtcctggactcctccaatatcaaaccaatgaacctgatcggcgtggcaagaggcgaaaacatccccgccgtgatcgccctgaccgaccccgagggctgcccactgagccggtttaaggatagcctgggaaacccaacccacatcctgagaatcggcgagagctataaggagaagcagcggaccatccaggccaagaaggaggtggagcagcggagagccggcggctacagccggaagtacgccagcaaagccaagaatctggcagacgatatggtgagaaacaccgctagagatctgctgtactacgccgtgacccaggatgccatgctgatcttcgccaacctgagccggggcttcggccggcagggcaagcggaccttcatggccgagagacagtacacacggatggaggactggctgaccgccaagctggcctacgagggcctgagcaagacctacctgtccaagacactggcccagtacacctccaagacatgcagcaactgtgggtttaccatcaccagcgccgactacgacagggtgctggagaagctgaagaagacagcaacaggctggatgaccacaattaacggcaaggagctgaaggtggagggccagattacctactacaacagatacaagagacagaacgtagtcaaggacctgtccgtcgagctggatagactgagcgaagaatctgtgaacaacgacatctcctcctggacaaagggcagaagcggagaagctctgagcctcctgaagaaaagattctcccatagacccgtgcaggagaagttcgtgtgcctgaactgcggcttcgagacacacgcagccgagcaagccgccctgaacatcgccagatcctggctgttcctgcggagccaggagtacaagaaataccagacaaacaagacaaccggcaacaccgataagagagccttcgtcgagacctggcagtccttttaccggaagaagcttaaggaggtgtggaaacctgccgtgcggtctggcggatctggcggaggctccaccagccccaagaaaaagagaaaagtctaagctgccttctgcggggcttgccttctggccatgcccttcttctctcccttgcacctgtacctcttggtctttgaataaagcctgagtaggaaggctagcaaaaaaaaaaaaaaaaaaaaaaaaaaaaaaaaaaaaaaaaaaaaaaaaaaaaaaaaaaaaaaaaaaaaaaaaaaaaaaaa

SEQ ID NO: 13498 - RNA, 5785 nt, synthetic construct
  source 1..5785: mol_type = other RNA
aggaaataagagagaaaagaagagtaagaagaaatataagagccaccatggcccctaagaagaagcgtaaagtgagccggatggaacgcctcgtctacgaggtgcggcagaagtgcagaaacatcgaggacatctgcatctcctgcggatctctgaacgtgaccctggagcacccactgttcatcggcggcatgtgccagaactgtaaaaactgttttctggagtgtgcctatcaatacgacgatgacggctaccagagctactgcaccatctgttgcggcggaagagaggtgctgatgtgtggaaataacaactgctgccggtgcttctgcgtggaatgcgtggacctgctggtgggccccggcgccgcccaggccgctattaaggaagatccttggaactgctacatgtgcggccacaagggcacatacggcctgctgagacggagagaggactggcctagcagactgcagatgttcttcgccaataaccacgaccaggagttcgacccccctaaggtgtaccctcccgtccccgccgagaagagaaagcccatccgggtcctgagcctgttcgatggcatcgccaccggtctgctggtgctgaaggacctgggcatccaggtggataggtacattgcctccgaggtgtgcgaggactccatcaccgtgggaatggtgcgtcatcagggcaagatcatgtacgtgggcgacgtgcggagcgtgacacagaagcatatccaggagtggggccctttcgacctggtgatcggcggcagcccttgcaatgacctgagcatcgtgaacccagcccggaagggcctgtacgagggaaccggcagactgttcttcgagttttacagactgctgcacgacgcccggcctaaggaaggcgacgaccggcccttcttttggctgttcgagaatgtggtggccatgggagtcagcgacaagcgggatattagccggttcctggagagcaaccccgtgatgatcgatgccaaggaagtgagcgccgcccaccgggccagatacttctggggcaatctgcctggcatgaacagacccctggccagcaccgtgaacgacaagctggagctgcaggagtgcctggagcacggccggatcgccaagttcagcaaggtgagaaccatcaccacccgaagcaacagcatcaaacaaggcaaggaccagcactttcctgtgttcatgaacgagaaggaggacatcctgtggtgtaccgagatggagagagtgttcgggttcccagtccactacacagatgtcagcaacatgtctagactggccagacagagactgctgggaagaagctggtccgtccctgtgatcagacacctgttcgcccctctgaaggagtacttcgcctgcgtgagcagcggcaacagcaacgccaacagccggggccccagcttctctagcggcctggtgccactgtccctgagagggagccacatgggccccatggagatctacaaaaccgtgagcgcctggaagcggcagcctgtgcgcgtgctgagcctgtttcggaatatcgataaagtcctgaaaagcctgggattcctggagagcggctctggctccggcggtggcaccctgaagtacgtggaggatgtgacaaacgtggtcagacgggatgtggagaagtggggccccttcgatctggtgtacggcagcacccaacccctgggcagctcttgtgaccggtgccctggctggtacatgtttcagttccaccggatcctgcagtacgccctgccgagacaggagtcccagcggccattcttttggattttcatggacaacttgctgctgaccgaggatgaccaggaaactaccactcggttcctgcagaccgaagccgtgaccctgcaggacgtgagaggccgggactaccagaacgccatgcgggtgtggtccaacatccctggactgaaaagcaagcacgcacctctgacccctaaagaagaggagtacctgcaggcccaggtgcggagcagaagcaagctggacgcccctaaggtggatctgctggtgaagaattgcctcctgcccctgagagagtacttcaagtatttcagccagaatagtctgcccctgggaggcagcggcggcggcgtggtggagctgctgaccttcgaggaggtggccgtgtacttcagcaaggaggagtgggccctgctggaccccggccagagggccctgtacagggacgtgatgcaggagaactacgaggccgtgagctggctgggcttccccgtgagcaagaccgacgtgatcagctgggtggagagggaggaggagttctgggtgcccgaccccaggagctgcgaggagggcgtgatcatcagcaacacccacggcggcccaagcagcggcgcccctcctcccagcggcggcagcccagccggctccccaacctctaccgaggagggcacctctgagtccgccacccccgagagcggccctggcacctccaccgagcccagcgagggcagcgcacccggcagccctgccggcagccccacctccacagaggagggaaccagcaccgagcccagcgaaggcagcgccccaggcaccagcaccgagcctagtgagcaggagattaaacggatcaacaagatcagaagaagacttgtgaaagacagcaacaccaagaaggccggcaagacaggccccatgaaaaccctgctggttagagtgatgacacccgatctgagagagcggctggaaaacctgagaaagaagcctgaaaatatcccccagcccatcagcaatacatctagagccaacctgaataagctgctgaccgattacaccgaaatgaagaaggcgatcctgcatgtgtactgggaagagttccagaaggaccctgtgggcctgatgagccgggtggcccagcctgccagcaagaagatcgatcagaacaagctgaaacctgagatggacgagaagggcaacctgaccaccgccggctttgcctgctctcagtgtggccagcccctgttcgtgtacaagctggagcaggtgtctgagaagggcaaggcttacaccaactacttcggacggtgcaatgtggccgagcacgaaaagctgatcctgctggcccagctgaagcccgagaaggatagcgacgaagccgtgacatatagcctgggaaagtttgggcagagggccctggatttctacagcattcatgtgaccaaggagtccacccaccccgtgaagcccctggcccagatcgccggaaacagatacgcctccggacctgtgggaaaggccctgagcgacgcatgtatgggcacaatcgcctccttcctgtctaagtaccaggacatcatcatcgaacaccagaaggtggtgaagggcaaccagaagagactggagagcctgcgggagctggccggcaaggaaaacctggaataccctagcgtgaccctgccacctcagcctcacaccaaggagggcgttgatgcctacaacgaagtgatcgcccgggtgcgaatgtgggtgaacctgaacctgtggcagaagctgaagctaagcagagatgatgccaagcctctgctgagactgaagggattcccttcctttcctctggtcgagagacaggccaacgaagtggactggtgggacatggtgtgtaacgtgaagaagctgatcaacgagaaaaaggaggatggcaaggtgttttggcagaatctggctggctacaagagacaggaagccctgagaccatacctgagcagcgaggaagatcggaagaagggaaagaaattcgctcggtaccagctgggcgacctgctgctgcacctggaaaagaagcacggcgaggactggggaaaggtgtacgacgaggcctgggagcggattgacaagaaagtggaaggcctgagcaagcacatcaagctggaagaggaacggagaagcgaggacgcccagagcaaggccgccctgaccgactggctgcgggctaaggccagcttcgtgatcgagggcctgaaggaggccgacaaggacgagttctgcagatgcgagctgaagctgcagaagtggtacggggacctgcggggaaagcccttcgccatcgaagccgagaacagcatcctggacatcagcggcttcagcaagcagtacaactgtgccttcatctggcagaaggacggcgtgaagaagctgaacctgtacctgatcatcaactacttcaagggcggcaagctgcggttcaagaagatcaaacctgaagccttcgaagccaacagattctacaccgtgatcaacaaaaagagcggcgagatcgtgcccatggaggtgaacttcaacttcgacgaccccaacctgatcatcctgcctctggcctttggcaagagacagggcagagaattcatctggaacgacctgctgtccctggaaaccggcagcctgaagctggccaacggaagagtgatcgagaagacactgtacaacagaagaacccggcaggatgagcctgccctgttcgtggccctgaccttcgagcggcgggaggtcctggactcctccaatatcaaaccaatgaacctgatcggcgtggcaagaggcgaaaacatccccgccgtgatcgccctgaccgaccccgagggctgcccactgagccggtttaaggatagcctgggaaacccaacccacatcctgagaatcggcgagagctataaggagaagcagcggaccatccaggccaagaaggaggtggagcagcggagagccggcggctacagccggaagtacgccagcaaagccaagaatctggcagacgatatggtgagaaacaccgctagagatctgctgtactacgccgtgacccaggatgccatgctgatcttcgccaacctgagccggggcttcggccggcagggcaagcggaccttcatggccgagagacagtacacacggatggaggactggctgaccgccaagctggcctacgagggcctgagcaagacctacctgtccaagacactggcccagtacacctccaagacatgcagcaactgtgggtttaccatcaccagcgccgactacgacagggtgctggagaagctgaagaagacagcaacaggctggatgaccacaattaacggcaaggagctgaaggtggagggccagattacctactacaacagatacaagagacagaacgtagtcaaggacctgtccgtcgagctggatagactgagcgaagaatctgtgaacaacgacatctcctcctggacaaagggcagaagcggagaagctctgagcctcctgaagaaaagattctcccatagacccgtgcaggagaagttcgtgtgcctgaactgcggcttcgagacacacgcagccgagcaagccgccctgaacatcgccagatcctggctgttcctgcggagccaggagtacaagaaataccagacaaacaagacaaccggcaacaccgataagagagccttcgtcgagacctggcagtccttttaccggaagaagcttaaggaggtgtggaaacctgccgtgcggtctggcggatctggcggaggctccaccagccccaagaaaaagagaaaagtctaagctgccttctgcggggcttgccttctggccatgcccttcttctctcccttgcacctgtacctcttggtctttgaataaagcctgagtaggaaggctagcaaaaaaaaaaaaaaaaaaaaaaaaaaaaaaaaaaaaaaaaaaaaaaaaaaaaaaaaaaaaaaaaaaaaaaaaaaaaaaaa

SEQ ID NO: 13499 - RNA, 5785 nt, synthetic construct
  source 1..5785: mol_type = other RNA
aggaaataagagagaaaagaagagtaagaagaaatataagagccaccatggcccctaagaagaagcgtaaagtgagccggatggaacgcctcgtctacgaggtgcggcagaagtgcagaaacatcgaggacatctgcatctcctgcggatctctgaacgtgaccctggagcacccactgttcatcggcggcatgtgccagaactgtaaaaactgttttctggagtgtgcctatcaatacgacgatgacggctaccagagctactgcaccatctgttgcggcggaagagaggtgctgatgtgtggaaataacaactgctgccggtgcttctgcgtggaatgcgtggacctgctggtgggccccggcgccgcccaggccgctattaaggaagatccttggaactgctacatgtgcggccacaagggcacatacggcctgctgagacggagagaggactggcctagcagactgcagatgttcttcgccaataaccacgaccaggagttcgacccccctaaggtgtaccctcccgtccccgccgagaagagaaagcccatccgggtcctgagcctgttcgatggcatcgccaccggtctgctggtgctgaaggacctgggcatccaggtggataggtacattgcctccgaggtgtgcgaggactccatcaccgtgggaatggtgcgtcatcagggcaagatcatgtacgtgggcgacgtgcggagcgtgacacagaagcatatccaggagtggggccctttcgacctggtgatcggcggcagcccttgcaatgacctgagcatcgtgaacccagcccggaagggcctgtacgagggaaccggcagactgttcttcgagttttacagactgctgcacgacgcccggcctaaggaaggcgacgaccggcccttcttttggctgttcgagaatgtggtggccatgggagtcagcgacaagcgggatattagccggttcctggagagcaaccccgtgatgatcgatgccaaggaagtgagcgccgcccaccgggccagatacttctggggcaatctgcctggcatgaacagacccctggccagcaccgtgaacgacaagctggagctgcaggagtgcctggagcacggccggatcgccaagttcagcaaggtgagaaccatcaccacccgaagcaacagcatcaaacaaggcaaggaccagcactttcctgtgttcatgaacgagaaggaggacatcctgtggtgtaccgagatggagagagtgttcgggttcccagtccactacacagatgtcagcaacatgtctagactggccagacagagactgctgggaagaagctggtccgtccctgtgatcagacacctgttcgcccctctgaaggagtacttcgcctgcgtgagcagcggcaacagcaacgccaacagccggggccccagcttctctagcggcctggtgccactgtccctgagagggagccacatgggccccatggagatctacaaaaccgtgagcgcctggaagcggcagcctgtgcgcgtgctgagcctgtttcggaatatcgataaagtcctgaaaagcctgggattcctggagagcggctctggctccggcggtggcaccctgaagtacgtggaggatgtgacaaacgtggtcagacgggatgtggagaagtggggccccttcgatctggtgtacggcagcacccaacccctgggcagctcttgtgaccggtgccctggctggtacatgtttcagttccaccggatcctgcagtacgccctgccgagacaggagtcccagcggccattcttttggattttcatggacaacttgctgctgaccgaggatgaccaggaaactaccactcggttcctgcagaccgaagccgtgaccctgcaggacgtgagaggccgggactaccagaacgccatgcgggtgtggtccaacatccctggactgaaaagcaagcacgcacctctgacccctaaagaagaggagtacctgcaggcccaggtgcggagcagaagcaagctggacgcccctaaggtggatctgctggtgaagaattgcctcctgcccctgagagagtacttcaagtatttcagccagaatagtctgcccctgggaggcagcggcggcggcagcaaggtgcccgtgaccttcggcgacctggccatctacttcagccaggaggagtgggagtggctgcaccccgcccagagggacctgtacaggcacgtgatgctggagaactacggccacctggtgagcctgggcctgaacatcagcaagccctacgtggtgagcctgctggagcagggcagggacccctggctggacaacagggacgtgaggagggacctgttcagcgagagcaagggcgagggcggcccaagcagcggcgcccctcctcccagcggcggcagcccagccggctccccaacctctaccgaggagggcacctctgagtccgccacccccgagagcggccctggcacctccaccgagcccagcgagggcagcgcacccggcagccctgccggcagccccacctccacagaggagggaaccagcaccgagcccagcgaaggcagcgccccaggcaccagcaccgagcctagtgagcaggagattaaacggatcaacaagatcagaagaagacttgtgaaagacagcaacaccaagaaggccggcaagacaggccccatgaaaaccctgctggttagagtgatgacacccgatctgagagagcggctggaaaacctgagaaagaagcctgaaaatatcccccagcccatcagcaatacatctagagccaacctgaataagctgctgaccgattacaccgaaatgaagaaggcgatcctgcatgtgtactgggaagagttccagaaggaccctgtgggcctgatgagccgggtggcccagcctgccagcaagaagatcgatcagaacaagctgaaacctgagatggacgagaagggcaacctgaccaccgccggctttgcctgctctcagtgtggccagcccctgttcgtgtacaagctggagcaggtgtctgagaagggcaaggcttacaccaactacttcggacggtgcaatgtggccgagcacgaaaagctgatcctgctggcccagctgaagcccgagaaggatagcgacgaagccgtgacatatagcctgggaaagtttgggcagagggccctggatttctacagcattcatgtgaccaaggagtccacccaccccgtgaagcccctggcccagatcgccggaaacagatacgcctccggacctgtgggaaaggccctgagcgacgcatgtatgggcacaatcgcctccttcctgtctaagtaccaggacatcatcatcgaacaccagaaggtggtgaagggcaaccagaagagactggagagcctgcgggagctggccggcaaggaaaacctggaataccctagcgtgaccctgccacctcagcctcacaccaaggagggcgttgatgcctacaacgaagtgatcgcccgggtgcgaatgtgggtgaacctgaacctgtggcagaagctgaagctaagcagagatgatgccaagcctctgctgagactgaagggattcccttcctttcctctggtcgagagacaggccaacgaagtggactggtgggacatggtgtgtaacgtgaagaagctgatcaacgagaaaaaggaggatggcaaggtgttttggcagaatctggctggctacaagagacaggaagccctgagaccatacctgagcagcgaggaagatcggaagaagggaaagaaattcgctcggtaccagctgggcgacctgctgctgcacctggaaaagaagcacggcgaggactggggaaaggtgtacgacgaggcctgggagcggattgacaagaaagtggaaggcctgagcaagcacatcaagctggaagaggaacggagaagcgaggacgcccagagcaaggccgccctgaccgactggctgcgggctaaggccagcttcgtgatcgagggcctgaaggaggccgacaaggacgagttctgcagatgcgagctgaagctgcagaagtggtacggggacctgcggggaaagcccttcgccatcgaagccgagaacagcatcctggacatcagcggcttcagcaagcagtacaactgtgccttcatctggcagaaggacggcgtgaagaagctgaacctgtacctgatcatcaactacttcaagggcggcaagctgcggttcaagaagatcaaacctgaagccttcgaagccaacagattctacaccgtgatcaacaaaaagagcggcgagatcgtgcccatggaggtgaacttcaacttcgacgaccccaacctgatcatcctgcctctggcctttggcaagagacagggcagagaattcatctggaacgacctgctgtccctggaaaccggcagcctgaagctggccaacggaagagtgatcgagaagacactgtacaacagaagaacccggcaggatgagcctgccctgttcgtggccctgaccttcgagcggcgggaggtcctggactcctccaatatcaaaccaatgaacctgatcggcgtggcaagaggcgaaaacatccccgccgtgatcgccctgaccgaccccgagggctgcccactgagccggtttaaggatagcctgggaaacccaacccacatcctgagaatcggcgagagctataaggagaagcagcggaccatccaggccaagaaggaggtggagcagcggagagccggcggctacagccggaagtacgccagcaaagccaagaatctggcagacgatatggtgagaaacaccgctagagatctgctgtactacgccgtgacccaggatgccatgctgatcttcgccaacctgagccggggcttcggccggcagggcaagcggaccttcatggccgagagacagtacacacggatggaggactggctgaccgccaagctggcctacgagggcctgagcaagacctacctgtccaagacactggcccagtacacctccaagacatgcagcaactgtgggtttaccatcaccagcgccgactacgacagggtgctggagaagctgaagaagacagcaacaggctggatgaccacaattaacggcaaggagctgaaggtggagggccagattacctactacaacagatacaagagacagaacgtagtcaaggacctgtccgtcgagctggatagactgagcgaagaatctgtgaacaacgacatctcctcctggacaaagggcagaagcggagaagctctgagcctcctgaagaaaagattctcccatagacccgtgcaggagaagttcgtgtgcctgaactgcggcttcgagacacacgcagccgagcaagccgccctgaacatcgccagatcctggctgttcctgcggagccaggagtacaagaaataccagacaaacaagacaaccggcaacaccgataagagagccttcgtcgagacctggcagtccttttaccggaagaagcttaaggaggtgtggaaacctgccgtgcggtctggcggatctggcggaggctccaccagccccaagaaaaagagaaaagtctaagctgccttctgcggggcttgccttctggccatgcccttcttctctcccttgcacctgtacctcttggtctttgaataaagcctgagtaggaaggctagcaaaaaaaaaaaaaaaaaaaaaaaaaaaaaaaaaaaaaaaaaaaaaaaaaaaaaaaaaaaaaaaaaaaaaaaaaaaaaaaa

SEQ ID NO: 13500 - RNA, 5785 nt, synthetic construct
  source 1..5785: mol_type = other RNA
aggaaataagagagaaaagaagagtaagaagaaatataagagccaccatggcccctaagaagaagcgtaaagtgagccggatggaacgcctcgtctacgaggtgcggcagaagtgcagaaacatcgaggacatctgcatctcctgcggatctctgaacgtgaccctggagcacccactgttcatcggcggcatgtgccagaactgtaaaaactgttttctggagtgtgcctatcaatacgacgatgacggctaccagagctactgcaccatctgttgcggcggaagagaggtgctgatgtgtggaaataacaactgctgccggtgcttctgcgtggaatgcgtggacctgctggtgggccccggcgccgcccaggccgctattaaggaagatccttggaactgctacatgtgcggccacaagggcacatacggcctgctgagacggagagaggactggcctagcagactgcagatgttcttcgccaataaccacgaccaggagttcgacccccctaaggtgtaccctcccgtccccgccgagaagagaaagcccatccgggtcctgagcctgttcgatggcatcgccaccggtctgctggtgctgaaggacctgggcatccaggtggataggtacattgcctccgaggtgtgcgaggactccatcaccgtgggaatggtgcgtcatcagggcaagatcatgtacgtgggcgacgtgcggagcgtgacacagaagcatatccaggagtggggccctttcgacctggtgatcggcggcagcccttgcaatgacctgagcatcgtgaacccagcccggaagggcctgtacgagggaaccggcagactgttcttcgagttttacagactgctgcacgacgcccggcctaaggaaggcgacgaccggcccttcttttggctgttcgagaatgtggtggccatgggagtcagcgacaagcgggatattagccggttcctggagagcaaccccgtgatgatcgatgccaaggaagtgagcgccgcccaccgggccagatacttctggggcaatctgcctggcatgaacagacccctggccagcaccgtgaacgacaagctggagctgcaggagtgcctggagcacggccggatcgccaagttcagcaaggtgagaaccatcaccacccgaagcaacagcatcaaacaaggcaaggaccagcactttcctgtgttcatgaacgagaaggaggacatcctgtggtgtaccgagatggagagagtgttcgggttcccagtccactacacagatgtcagcaacatgtctagactggccagacagagactgctgggaagaagctggtccgtccctgtgatcagacacctgttcgcccctctgaaggagtacttcgcctgcgtgagcagcggcaacagcaacgccaacagccggggccccagcttctctagcggcctggtgccactgtccctgagagggagccacatgggccccatggagatctacaaaaccgtgagcgcctggaagcggcagcctgtgcgcgtgctgagcctgtttcggaatatcgataaagtcctgaaaagcctgggattcctggagagcggctctggctccggcggtggcaccctgaagtacgtggaggatgtgacaaacgtggtcagacgggatgtggagaagtggggccccttcgatctggtgtacggcagcacccaacccctgggcagctcttgtgaccggtgccctggctggtacatgtttcagttccaccggatcctgcagtacgccctgccgagacaggagtcccagcggccattcttttggattttcatggacaacttgctgctgaccgaggatgaccaggaaactaccactcggttcctgcagaccgaagccgtgaccctgcaggacgtgagaggccgggactaccagaacgccatgcgggtgtggtccaacatccctggactgaaaagcaagcacgcacctctgacccctaaagaagaggagtacctgcaggcccaggtgcggagcagaagcaagctggacgcccctaaggtggatctgctggtgaagaattgcctcctgcccctgagagagtacttcaagtatttcagccagaatagtctgcccctgggaggcagcggcggcggcttccaggagctggtgaccttcagggacgtggccatcgacttcagcaggcaggagtgggagtacctggaccccaaccagagggacctgtacagggacgtgatgctggagaactacagcaacctggtgagcctgggccacagcatcagcaagcccgacgtggtggacctgctggagcagggcaaggagccctggatgctgctgggcgaggagacccagtacagcggcagcaaccccgagcccgtgggcggcccaagcagcggcgcccctcctcccagcggcggcagcccagccggctccccaacctctaccgaggagggcacctctgagtccgccacccccgagagcggccctggcacctccaccgagcccagcgagggcagcgcacccggcagccctgccggcagccccacctccacagaggagggaaccagcaccgagcccagcgaaggcagcgccccaggcaccagcaccgagcctagtgagcaggagattaaacggatcaacaagatcagaagaagacttgtgaaagacagcaacaccaagaaggccggcaagacaggccccatgaaaaccctgctggttagagtgatgacacccgatctgagagagcggctggaaaacctgagaaagaagcctgaaaatatcccccagcccatcagcaatacatctagagccaacctgaataagctgctgaccgattacaccgaaatgaagaaggcgatcctgcatgtgtactgggaagagttccagaaggaccctgtgggcctgatgagccgggtggcccagcctgccagcaagaagatcgatcagaacaagctgaaacctgagatggacgagaagggcaacctgaccaccgccggctttgcctgctctcagtgtggccagcccctgttcgtgtacaagctggagcaggtgtctgagaagggcaaggcttacaccaactacttcggacggtgcaatgtggccgagcacgaaaagctgatcctgctggcccagctgaagcccgagaaggatagcgacgaagccgtgacatatagcctgggaaagtttgggcagagggccctggatttctacagcattcatgtgaccaaggagtccacccaccccgtgaagcccctggcccagatcgccggaaacagatacgcctccggacctgtgggaaaggccctgagcgacgcatgtatgggcacaatcgcctccttcctgtctaagtaccaggacatcatcatcgaacaccagaaggtggtgaagggcaaccagaagagactggagagcctgcgggagctggccggcaaggaaaacctggaataccctagcgtgaccctgccacctcagcctcacaccaaggagggcgttgatgcctacaacgaagtgatcgcccgggtgcgaatgtgggtgaacctgaacctgtggcagaagctgaagctaagcagagatgatgccaagcctctgctgagactgaagggattcccttcctttcctctggtcgagagacaggccaacgaagtggactggtgggacatggtgtgtaacgtgaagaagctgatcaacgagaaaaaggaggatggcaaggtgttttggcagaatctggctggctacaagagacaggaagccctgagaccatacctgagcagcgaggaagatcggaagaagggaaagaaattcgctcggtaccagctgggcgacctgctgctgcacctggaaaagaagcacggcgaggactggggaaaggtgtacgacgaggcctgggagcggattgacaagaaagtggaaggcctgagcaagcacatcaagctggaagaggaacggagaagcgaggacgcccagagcaaggccgccctgaccgactggctgcgggctaaggccagcttcgtgatcgagggcctgaaggaggccgacaaggacgagttctgcagatgcgagctgaagctgcagaagtggtacggggacctgcggggaaagcccttcgccatcgaagccgagaacagcatcctggacatcagcggcttcagcaagcagtacaactgtgccttcatctggcagaaggacggcgtgaagaagctgaacctgtacctgatcatcaactacttcaagggcggcaagctgcggttcaagaagatcaaacctgaagccttcgaagccaacagattctacaccgtgatcaacaaaaagagcggcgagatcgtgcccatggaggtgaacttcaacttcgacgaccccaacctgatcatcctgcctctggcctttggcaagagacagggcagagaattcatctggaacgacctgctgtccctggaaaccggcagcctgaagctggccaacggaagagtgatcgagaagacactgtacaacagaagaacccggcaggatgagcctgccctgttcgtggccctgaccttcgagcggcgggaggtcctggactcctccaatatcaaaccaatgaacctgatcggcgtggcaagaggcgaaaacatccccgccgtgatcgccctgaccgaccccgagggctgcccactgagccggtttaaggatagcctgggaaacccaacccacatcctgagaatcggcgagagctataaggagaagcagcggaccatccaggccaagaaggaggtggagcagcggagagccggcggctacagccggaagtacgccagcaaagccaagaatctggcagacgatatggtgagaaacaccgctagagatctgctgtactacgccgtgacccaggatgccatgctgatcttcgccaacctgagccggggcttcggccggcagggcaagcggaccttcatggccgagagacagtacacacggatggaggactggctgaccgccaagctggcctacgagggcctgagcaagacctacctgtccaagacactggcccagtacacctccaagacatgcagcaactgtgggtttaccatcaccagcgccgactacgacagggtgctggagaagctgaagaagacagcaacaggctggatgaccacaattaacggcaaggagctgaaggtggagggccagattacctactacaacagatacaagagacagaacgtagtcaaggacctgtccgtcgagctggatagactgagcgaagaatctgtgaacaacgacatctcctcctggacaaagggcagaagcggagaagctctgagcctcctgaagaaaagattctcccatagacccgtgcaggagaagttcgtgtgcctgaactgcggcttcgagacacacgcagccgagcaagccgccctgaacatcgccagatcctggctgttcctgcggagccaggagtacaagaaataccagacaaacaagacaaccggcaacaccgataagagagccttcgtcgagacctggcagtccttttaccggaagaagcttaaggaggtgtggaaacctgccgtgcggtctggcggatctggcggaggctccaccagccccaagaaaaagagaaaagtctaagctgccttctgcggggcttgccttctggccatgcccttcttctctcccttgcacctgtacctcttggtctttgaataaagcctgagtaggaaggctagcaaaaaaaaaaaaaaaaaaaaaaaaaaaaaaaaaaaaaaaaaaaaaaaaaaaaaaaaaaaaaaaaaaaaaaaaaaaaaaaa

SEQ ID NO: 13501 - RNA, 5785 nt, synthetic construct
  source 1..5785: mol_type = other RNA
aggaaataagagagaaaagaagagtaagaagaaatataagagccaccatggcccctaagaagaagcgtaaagtgagccggatggaacgcctcgtctacgaggtgcggcagaagtgcagaaacatcgaggacatctgcatctcctgcggatctctgaacgtgaccctggagcacccactgttcatcggcggcatgtgccagaactgtaaaaactgttttctggagtgtgcctatcaatacgacgatgacggctaccagagctactgcaccatctgttgcggcggaagagaggtgctgatgtgtggaaataacaactgctgccggtgcttctgcgtggaatgcgtggacctgctggtgggccccggcgccgcccaggccgctattaaggaagatccttggaactgctacatgtgcggccacaagggcacatacggcctgctgagacggagagaggactggcctagcagactgcagatgttcttcgccaataaccacgaccaggagttcgacccccctaaggtgtaccctcccgtccccgccgagaagagaaagcccatccgggtcctgagcctgttcgatggcatcgccaccggtctgctggtgctgaaggacctgggcatccaggtggataggtacattgcctccgaggtgtgcgaggactccatcaccgtgggaatggtgcgtcatcagggcaagatcatgtacgtgggcgacgtgcggagcgtgacacagaagcatatccaggagtggggccctttcgacctggtgatcggcggcagcccttgcaatgacctgagcatcgtgaacccagcccggaagggcctgtacgagggaaccggcagactgttcttcgagttttacagactgctgcacgacgcccggcctaaggaaggcgacgaccggcccttcttttggctgttcgagaatgtggtggccatgggagtcagcgacaagcgggatattagccggttcctggagagcaaccccgtgatgatcgatgccaaggaagtgagcgccgcccaccgggccagatacttctggggcaatctgcctggcatgaacagacccctggccagcaccgtgaacgacaagctggagctgcaggagtgcctggagcacggccggatcgccaagttcagcaaggtgagaaccatcaccacccgaagcaacagcatcaaacaaggcaaggaccagcactttcctgtgttcatgaacgagaaggaggacatcctgtggtgtaccgagatggagagagtgttcgggttcccagtccactacacagatgtcagcaacatgtctagactggccagacagagactgctgggaagaagctggtccgtccctgtgatcagacacctgttcgcccctctgaaggagtacttcgcctgcgtgagcagcggcaacagcaacgccaacagccggggccccagcttctctagcggcctggtgccactgtccctgagagggagccacatgggccccatggagatctacaaaaccgtgagcgcctggaagcggcagcctgtgcgcgtgctgagcctgtttcggaatatcgataaagtcctgaaaagcctgggattcctggagagcggctctggctccggcggtggcaccctgaagtacgtggaggatgtgacaaacgtggtcagacgggatgtggagaagtggggccccttcgatctggtgtacggcagcacccaacccctgggcagctcttgtgaccggtgccctggctggtacatgtttcagttccaccggatcctgcagtacgccctgccgagacaggagtcccagcggccattcttttggattttcatggacaacttgctgctgaccgaggatgaccaggaaactaccactcggttcctgcagaccgaagccgtgaccctgcaggacgtgagaggccgggactaccagaacgccatgcgggtgtggtccaacatccctggactgaaaagcaagcacgcacctctgacccctaaagaagaggagtacctgcaggcccaggtgcggagcagaagcaagctggacgcccctaaggtggatctgctggtgaagaattgcctcctgcccctgagagagtacttcaagtatttcagccagaatagtctgcccctgggaggcagcggcggcggcgccaggggccccgtgagcttcgccgacgtggccgtgtacttcagccccgaggagtggggcaggctgaggcccgcccagagggccctgtacagggacgtgatgagggagacctacggccacctgggcgccctgggcttccccggccccaagcccgccctgatgtgctggatggacgaggagaccgaggtgtggggccccgacgccagggaccccgaggaggccggcgagaagggcaccgagaacggcggcccaagcagcggcgcccctcctcccagcggcggcagcccagccggctccccaacctctaccgaggagggcacctctgagtccgccacccccgagagcggccctggcacctccaccgagcccagcgagggcagcgcacccggcagccctgccggcagccccacctccacagaggagggaaccagcaccgagcccagcgaaggcagcgccccaggcaccagcaccgagcctagtgagcaggagattaaacggatcaacaagatcagaagaagacttgtgaaagacagcaacaccaagaaggccggcaagacaggccccatgaaaaccctgctggttagagtgatgacacccgatctgagagagcggctggaaaacctgagaaagaagcctgaaaatatcccccagcccatcagcaatacatctagagccaacctgaataagctgctgaccgattacaccgaaatgaagaaggcgatcctgcatgtgtactgggaagagttccagaaggaccctgtgggcctgatgagccgggtggcccagcctgccagcaagaagatcgatcagaacaagctgaaacctgagatggacgagaagggcaacctgaccaccgccggctttgcctgctctcagtgtggccagcccctgttcgtgtacaagctggagcaggtgtctgagaagggcaaggcttacaccaactacttcggacggtgcaatgtggccgagcacgaaaagctgatcctgctggcccagctgaagcccgagaaggatagcgacgaagccgtgacatatagcctgggaaagtttgggcagagggccctggatttctacagcattcatgtgaccaaggagtccacccaccccgtgaagcccctggcccagatcgccggaaacagatacgcctccggacctgtgggaaaggccctgagcgacgcatgtatgggcacaatcgcctccttcctgtctaagtaccaggacatcatcatcgaacaccagaaggtggtgaagggcaaccagaagagactggagagcctgcgggagctggccggcaaggaaaacctggaataccctagcgtgaccctgccacctcagcctcacaccaaggagggcgttgatgcctacaacgaagtgatcgcccgggtgcgaatgtgggtgaacctgaacctgtggcagaagctgaagctaagcagagatgatgccaagcctctgctgagactgaagggattcccttcctttcctctggtcgagagacaggccaacgaagtggactggtgggacatggtgtgtaacgtgaagaagctgatcaacgagaaaaaggaggatggcaaggtgttttggcagaatctggctggctacaagagacaggaagccctgagaccatacctgagcagcgaggaagatcggaagaagggaaagaaattcgctcggtaccagctgggcgacctgctgctgcacctggaaaagaagcacggcgaggactggggaaaggtgtacgacgaggcctgggagcggattgacaagaaagtggaaggcctgagcaagcacatcaagctggaagaggaacggagaagcgaggacgcccagagcaaggccgccctgaccgactggctgcgggctaaggccagcttcgtgatcgagggcctgaaggaggccgacaaggacgagttctgcagatgcgagctgaagctgcagaagtggtacggggacctgcggggaaagcccttcgccatcgaagccgagaacagcatcctggacatcagcggcttcagcaagcagtacaactgtgccttcatctggcagaaggacggcgtgaagaagctgaacctgtacctgatcatcaactacttcaagggcggcaagctgcggttcaagaagatcaaacctgaagccttcgaagccaacagattctacaccgtgatcaacaaaaagagcggcgagatcgtgcccatggaggtgaacttcaacttcgacgaccccaacctgatcatcctgcctctggcctttggcaagagacagggcagagaattcatctggaacgacctgctgtccctggaaaccggcagcctgaagctggccaacggaagagtgatcgagaagacactgtacaacagaagaacccggcaggatgagcctgccctgttcgtggccctgaccttcgagcggcgggaggtcctggactcctccaatatcaaaccaatgaacctgatcggcgtggcaagaggcgaaaacatccccgccgtgatcgccctgaccgaccccgagggctgcccactgagccggtttaaggatagcctgggaaacccaacccacatcctgagaatcggcgagagctataaggagaagcagcggaccatccaggccaagaaggaggtggagcagcggagagccggcggctacagccggaagtacgccagcaaagccaagaatctggcagacgatatggtgagaaacaccgctagagatctgctgtactacgccgtgacccaggatgccatgctgatcttcgccaacctgagccggggcttcggccggcagggcaagcggaccttcatggccgagagacagtacacacggatggaggactggctgaccgccaagctggcctacgagggcctgagcaagacctacctgtccaagacactggcccagtacacctccaagacatgcagcaactgtgggtttaccatcaccagcgccgactacgacagggtgctggagaagctgaagaagacagcaacaggctggatgaccacaattaacggcaaggagctgaaggtggagggccagattacctactacaacagatacaagagacagaacgtagtcaaggacctgtccgtcgagctggatagactgagcgaagaatctgtgaacaacgacatctcctcctggacaaagggcagaagcggagaagctctgagcctcctgaagaaaagattctcccatagacccgtgcaggagaagttcgtgtgcctgaactgcggcttcgagacacacgcagccgagcaagccgccctgaacatcgccagatcctggctgttcctgcggagccaggagtacaagaaataccagacaaacaagacaaccggcaacaccgataagagagccttcgtcgagacctggcagtccttttaccggaagaagcttaaggaggtgtggaaacctgccgtgcggtctggcggatctggcggaggctccaccagccccaagaaaaagagaaaagtctaagctgccttctgcggggcttgccttctggccatgcccttcttctctcccttgcacctgtacctcttggtctttgaataaagcctgagtaggaaggctagcaaaaaaaaaaaaaaaaaaaaaaaaaaaaaaaaaaaaaaaaaaaaaaaaaaaaaaaaaaaaaaaaaaaaaaaaaaaaaaaa

SEQ ID NO: 13502 - RNA, 5785 nt, synthetic construct
  source 1..5785: mol_type = other RNA
aggaaataagagagaaaagaagagtaagaagaaatataagagccaccatggcccctaagaagaagcgtaaagtgagccggatggaacgcctcgtctacgaggtgcggcagaagtgcagaaacatcgaggacatctgcatctcctgcggatctctgaacgtgaccctggagcacccactgttcatcggcggcatgtgccagaactgtaaaaactgttttctggagtgtgcctatcaatacgacgatgacggctaccagagctactgcaccatctgttgcggcggaagagaggtgctgatgtgtggaaataacaactgctgccggtgcttctgcgtggaatgcgtggacctgctggtgggccccggcgccgcccaggccgctattaaggaagatccttggaactgctacatgtgcggccacaagggcacatacggcctgctgagacggagagaggactggcctagcagactgcagatgttcttcgccaataaccacgaccaggagttcgacccccctaaggtgtaccctcccgtccccgccgagaagagaaagcccatccgggtcctgagcctgttcgatggcatcgccaccggtctgctggtgctgaaggacctgggcatccaggtggataggtacattgcctccgaggtgtgcgaggactccatcaccgtgggaatggtgcgtcatcagggcaagatcatgtacgtgggcgacgtgcggagcgtgacacagaagcatatccaggagtggggccctttcgacctggtgatcggcggcagcccttgcaatgacctgagcatcgtgaacccagcccggaagggcctgtacgagggaaccggcagactgttcttcgagttttacagactgctgcacgacgcccggcctaaggaaggcgacgaccggcccttcttttggctgttcgagaatgtggtggccatgggagtcagcgacaagcgggatattagccggttcctggagagcaaccccgtgatgatcgatgccaaggaagtgagcgccgcccaccgggccagatacttctggggcaatctgcctggcatgaacagacccctggccagcaccgtgaacgacaagctggagctgcaggagtgcctggagcacggccggatcgccaagttcagcaaggtgagaaccatcaccacccgaagcaacagcatcaaacaaggcaaggaccagcactttcctgtgttcatgaacgagaaggaggacatcctgtggtgtaccgagatggagagagtgttcgggttcccagtccactacacagatgtcagcaacatgtctagactggccagacagagactgctgggaagaagctggtccgtccctgtgatcagacacctgttcgcccctctgaaggagtacttcgcctgcgtgagcagcggcaacagcaacgccaacagccggggccccagcttctctagcggcctggtgccactgtccctgagagggagccacatgggccccatggagatctacaaaaccgtgagcgcctggaagcggcagcctgtgcgcgtgctgagcctgtttcggaatatcgataaagtcctgaaaagcctgggattcctggagagcggctctggctccggcggtggcaccctgaagtacgtggaggatgtgacaaacgtggtcagacgggatgtggagaagtggggccccttcgatctggtgtacggcagcacccaacccctgggcagctcttgtgaccggtgccctggctggtacatgtttcagttccaccggatcctgcagtacgccctgccgagacaggagtcccagcggccattcttttggattttcatggacaacttgctgctgaccgaggatgaccaggaaactaccactcggttcctgcagaccgaagccgtgaccctgcaggacgtgagaggccgggactaccagaacgccatgcgggtgtggtccaacatccctggactgaaaagcaagcacgcacctctgacccctaaagaagaggagtacctgcaggcccaggtgcggagcagaagcaagctggacgcccctaaggtggatctgctggtgaagaattgcctcctgcccctgagagagtacttcaagtatttcagccagaatagtctgcccctgggaggcagcggcggcggccagatgctggtgaccttcgaggacatcgccgtgagcttcagcaaggaggagtgggagtacctggacgagggccagaaggagctgtacagggaggtgatgaaggagaactaccagaccctgatcagcctgggcaccggcttccccaccgtgatccccgagatcatcagccacatcgagcagggcgacgagcccggcagcgaggagagggagaacggcaagagcagctgcagcggcgagagcggcggcggcccaagcagcggcgcccctcctcccagcggcggcagcccagccggctccccaacctctaccgaggagggcacctctgagtccgccacccccgagagcggccctggcacctccaccgagcccagcgagggcagcgcacccggcagccctgccggcagccccacctccacagaggagggaaccagcaccgagcccagcgaaggcagcgccccaggcaccagcaccgagcctagtgagcaggagattaaacggatcaacaagatcagaagaagacttgtgaaagacagcaacaccaagaaggccggcaagacaggccccatgaaaaccctgctggttagagtgatgacacccgatctgagagagcggctggaaaacctgagaaagaagcctgaaaatatcccccagcccatcagcaatacatctagagccaacctgaataagctgctgaccgattacaccgaaatgaagaaggcgatcctgcatgtgtactgggaagagttccagaaggaccctgtgggcctgatgagccgggtggcccagcctgccagcaagaagatcgatcagaacaagctgaaacctgagatggacgagaagggcaacctgaccaccgccggctttgcctgctctcagtgtggccagcccctgttcgtgtacaagctggagcaggtgtctgagaagggcaaggcttacaccaactacttcggacggtgcaatgtggccgagcacgaaaagctgatcctgctggcccagctgaagcccgagaaggatagcgacgaagccgtgacatatagcctgggaaagtttgggcagagggccctggatttctacagcattcatgtgaccaaggagtccacccaccccgtgaagcccctggcccagatcgccggaaacagatacgcctccggacctgtgggaaaggccctgagcgacgcatgtatgggcacaatcgcctccttcctgtctaagtaccaggacatcatcatcgaacaccagaaggtggtgaagggcaaccagaagagactggagagcctgcgggagctggccggcaaggaaaacctggaataccctagcgtgaccctgccacctcagcctcacaccaaggagggcgttgatgcctacaacgaagtgatcgcccgggtgcgaatgtgggtgaacctgaacctgtggcagaagctgaagctaagcagagatgatgccaagcctctgctgagactgaagggattcccttcctttcctctggtcgagagacaggccaacgaagtggactggtgggacatggtgtgtaacgtgaagaagctgatcaacgagaaaaaggaggatggcaaggtgttttggcagaatctggctggctacaagagacaggaagccctgagaccatacctgagcagcgaggaagatcggaagaagggaaagaaattcgctcggtaccagctgggcgacctgctgctgcacctggaaaagaagcacggcgaggactggggaaaggtgtacgacgaggcctgggagcggattgacaagaaagtggaaggcctgagcaagcacatcaagctggaagaggaacggagaagcgaggacgcccagagcaaggccgccctgaccgactggctgcgggctaaggccagcttcgtgatcgagggcctgaaggaggccgacaaggacgagttctgcagatgcgagctgaagctgcagaagtggtacggggacctgcggggaaagcccttcgccatcgaagccgagaacagcatcctggacatcagcggcttcagcaagcagtacaactgtgccttcatctggcagaaggacggcgtgaagaagctgaacctgtacctgatcatcaactacttcaagggcggcaagctgcggttcaagaagatcaaacctgaagccttcgaagccaacagattctacaccgtgatcaacaaaaagagcggcgagatcgtgcccatggaggtgaacttcaacttcgacgaccccaacctgatcatcctgcctctggcctttggcaagagacagggcagagaattcatctggaacgacctgctgtccctggaaaccggcagcctgaagctggccaacggaagagtgatcgagaagacactgtacaacagaagaacccggcaggatgagcctgccctgttcgtggccctgaccttcgagcggcgggaggtcctggactcctccaatatcaaaccaatgaacctgatcggcgtggcaagaggcgaaaacatccccgccgtgatcgccctgaccgaccccgagggctgcccactgagccggtttaaggatagcctgggaaacccaacccacatcctgagaatcggcgagagctataaggagaagcagcggaccatccaggccaagaaggaggtggagcagcggagagccggcggctacagccggaagtacgccagcaaagccaagaatctggcagacgatatggtgagaaacaccgctagagatctgctgtactacgccgtgacccaggatgccatgctgatcttcgccaacctgagccggggcttcggccggcagggcaagcggaccttcatggccgagagacagtacacacggatggaggactggctgaccgccaagctggcctacgagggcctgagcaagacctacctgtccaagacactggcccagtacacctccaagacatgcagcaactgtgggtttaccatcaccagcgccgactacgacagggtgctggagaagctgaagaagacagcaacaggctggatgaccacaattaacggcaaggagctgaaggtggagggccagattacctactacaacagatacaagagacagaacgtagtcaaggacctgtccgtcgagctggatagactgagcgaagaatctgtgaacaacgacatctcctcctggacaaagggcagaagcggagaagctctgagcctcctgaagaaaagattctcccatagacccgtgcaggagaagttcgtgtgcctgaactgcggcttcgagacacacgcagccgagcaagccgccctgaacatcgccagatcctggctgttcctgcggagccaggagtacaagaaataccagacaaacaagacaaccggcaacaccgataagagagccttcgtcgagacctggcagtccttttaccggaagaagcttaaggaggtgtggaaacctgccgtgcggtctggcggatctggcggaggctccaccagccccaagaaaaagagaaaagtctaagctgccttctgcggggcttgccttctggccatgcccttcttctctcccttgcacctgtacctcttggtctttgaataaagcctgagtaggaaggctagcaaaaaaaaaaaaaaaaaaaaaaaaaaaaaaaaaaaaaaaaaaaaaaaaaaaaaaaaaaaaaaaaaaaaaaaaaaaaaaaa

SEQ ID NO: 13503 - RNA, 5785 nt, synthetic construct
  source 1..5785: mol_type = other RNA
aggaaataagagagaaaagaagagtaagaagaaatataagagccaccatggcccctaagaagaagcgtaaagtgagccggatggaacgcctcgtctacgaggtgcggcagaagtgcagaaacatcgaggacatctgcatctcctgcggatctctgaacgtgaccctggagcacccactgttcatcggcggcatgtgccagaactgtaaaaactgttttctggagtgtgcctatcaatacgacgatgacggctaccagagctactgcaccatctgttgcggcggaagagaggtgctgatgtgtggaaataacaactgctgccggtgcttctgcgtggaatgcgtggacctgctggtgggccccggcgccgcccaggccgctattaaggaagatccttggaactgctacatgtgcggccacaagggcacatacggcctgctgagacggagagaggactggcctagcagactgcagatgttcttcgccaataaccacgaccaggagttcgacccccctaaggtgtaccctcccgtccccgccgagaagagaaagcccatccgggtcctgagcctgttcgatggcatcgccaccggtctgctggtgctgaaggacctgggcatccaggtggataggtacattgcctccgaggtgtgcgaggactccatcaccgtgggaatggtgcgtcatcagggcaagatcatgtacgtgggcgacgtgcggagcgtgacacagaagcatatccaggagtggggccctttcgacctggtgatcggcggcagcccttgcaatgacctgagcatcgtgaacccagcccggaagggcctgtacgagggaaccggcagactgttcttcgagttttacagactgctgcacgacgcccggcctaaggaaggcgacgaccggcccttcttttggctgttcgagaatgtggtggccatgggagtcagcgacaagcgggatattagccggttcctggagagcaaccccgtgatgatcgatgccaaggaagtgagcgccgcccaccgggccagatacttctggggcaatctgcctggcatgaacagacccctggccagcaccgtgaacgacaagctggagctgcaggagtgcctggagcacggccggatcgccaagttcagcaaggtgagaaccatcaccacccgaagcaacagcatcaaacaaggcaaggaccagcactttcctgtgttcatgaacgagaaggaggacatcctgtggtgtaccgagatggagagagtgttcgggttcccagtccactacacagatgtcagcaacatgtctagactggccagacagagactgctgggaagaagctggtccgtccctgtgatcagacacctgttcgcccctctgaaggagtacttcgcctgcgtgagcagcggcaacagcaacgccaacagccggggccccagcttctctagcggcctggtgccactgtccctgagagggagccacatgggccccatggagatctacaaaaccgtgagcgcctggaagcggcagcctgtgcgcgtgctgagcctgtttcggaatatcgataaagtcctgaaaagcctgggattcctggagagcggctctggctccggcggtggcaccctgaagtacgtggaggatgtgacaaacgtggtcagacgggatgtggagaagtggggccccttcgatctggtgtacggcagcacccaacccctgggcagctcttgtgaccggtgccctggctggtacatgtttcagttccaccggatcctgcagtacgccctgccgagacaggagtcccagcggccattcttttggattttcatggacaacttgctgctgaccgaggatgaccaggaaactaccactcggttcctgcagaccgaagccgtgaccctgcaggacgtgagaggccgggactaccagaacgccatgcgggtgtggtccaacatccctggactgaaaagcaagcacgcacctctgacccctaaagaagaggagtacctgcaggcccaggtgcggagcagaagcaagctggacgcccctaaggtggatctgctggtgaagaattgcctcctgcccctgagagagtacttcaagtatttcagccagaatagtctgcccctgggaggcagcggcggcggcgagcccggcgccgtgagcttcgccgacgtggccgtgtacttcagcctggaggagtggggctgcctgaggcccagccagagggccctgtacagggacgtgatgagggagacctacctgcacctgagcgccctgggcggcggcggcaccaagcccgccctgatcagctgggtggaggaggaggccgagctgtggcaccccgacgcccaggaccccgaggtggccaagtgccccaccgaggccgacggcggcccaagcagcggcgcccctcctcccagcggcggcagcccagccggctccccaacctctaccgaggagggcacctctgagtccgccacccccgagagcggccctggcacctccaccgagcccagcgagggcagcgcacccggcagccctgccggcagccccacctccacagaggagggaaccagcaccgagcccagcgaaggcagcgccccaggcaccagcaccgagcctagtgagcaggagattaaacggatcaacaagatcagaagaagacttgtgaaagacagcaacaccaagaaggccggcaagacaggccccatgaaaaccctgctggttagagtgatgacacccgatctgagagagcggctggaaaacctgagaaagaagcctgaaaatatcccccagcccatcagcaatacatctagagccaacctgaataagctgctgaccgattacaccgaaatgaagaaggcgatcctgcatgtgtactgggaagagttccagaaggaccctgtgggcctgatgagccgggtggcccagcctgccagcaagaagatcgatcagaacaagctgaaacctgagatggacgagaagggcaacctgaccaccgccggctttgcctgctctcagtgtggccagcccctgttcgtgtacaagctggagcaggtgtctgagaagggcaaggcttacaccaactacttcggacggtgcaatgtggccgagcacgaaaagctgatcctgctggcccagctgaagcccgagaaggatagcgacgaagccgtgacatatagcctgggaaagtttgggcagagggccctggatttctacagcattcatgtgaccaaggagtccacccaccccgtgaagcccctggcccagatcgccggaaacagatacgcctccggacctgtgggaaaggccctgagcgacgcatgtatgggcacaatcgcctccttcctgtctaagtaccaggacatcatcatcgaacaccagaaggtggtgaagggcaaccagaagagactggagagcctgcgggagctggccggcaaggaaaacctggaataccctagcgtgaccctgccacctcagcctcacaccaaggagggcgttgatgcctacaacgaagtgatcgcccgggtgcgaatgtgggtgaacctgaacctgtggcagaagctgaagctaagcagagatgatgccaagcctctgctgagactgaagggattcccttcctttcctctggtcgagagacaggccaacgaagtggactggtgggacatggtgtgtaacgtgaagaagctgatcaacgagaaaaaggaggatggcaaggtgttttggcagaatctggctggctacaagagacaggaagccctgagaccatacctgagcagcgaggaagatcggaagaagggaaagaaattcgctcggtaccagctgggcgacctgctgctgcacctggaaaagaagcacggcgaggactggggaaaggtgtacgacgaggcctgggagcggattgacaagaaagtggaaggcctgagcaagcacatcaagctggaagaggaacggagaagcgaggacgcccagagcaaggccgccctgaccgactggctgcgggctaaggccagcttcgtgatcgagggcctgaaggaggccgacaaggacgagttctgcagatgcgagctgaagctgcagaagtggtacggggacctgcggggaaagcccttcgccatcgaagccgagaacagcatcctggacatcagcggcttcagcaagcagtacaactgtgccttcatctggcagaaggacggcgtgaagaagctgaacctgtacctgatcatcaactacttcaagggcggcaagctgcggttcaagaagatcaaacctgaagccttcgaagccaacagattctacaccgtgatcaacaaaaagagcggcgagatcgtgcccatggaggtgaacttcaacttcgacgaccccaacctgatcatcctgcctctggcctttggcaagagacagggcagagaattcatctggaacgacctgctgtccctggaaaccggcagcctgaagctggccaacggaagagtgatcgagaagacactgtacaacagaagaacccggcaggatgagcctgccctgttcgtggccctgaccttcgagcggcgggaggtcctggactcctccaatatcaaaccaatgaacctgatcggcgtggcaagaggcgaaaacatccccgccgtgatcgccctgaccgaccccgagggctgcccactgagccggtttaaggatagcctgggaaacccaacccacatcctgagaatcggcgagagctataaggagaagcagcggaccatccaggccaagaaggaggtggagcagcggagagccggcggctacagccggaagtacgccagcaaagccaagaatctggcagacgatatggtgagaaacaccgctagagatctgctgtactacgccgtgacccaggatgccatgctgatcttcgccaacctgagccggggcttcggccggcagggcaagcggaccttcatggccgagagacagtacacacggatggaggactggctgaccgccaagctggcctacgagggcctgagcaagacctacctgtccaagacactggcccagtacacctccaagacatgcagcaactgtgggtttaccatcaccagcgccgactacgacagggtgctggagaagctgaagaagacagcaacaggctggatgaccacaattaacggcaaggagctgaaggtggagggccagattacctactacaacagatacaagagacagaacgtagtcaaggacctgtccgtcgagctggatagactgagcgaagaatctgtgaacaacgacatctcctcctggacaaagggcagaagcggagaagctctgagcctcctgaagaaaagattctcccatagacccgtgcaggagaagttcgtgtgcctgaactgcggcttcgagacacacgcagccgagcaagccgccctgaacatcgccagatcctggctgttcctgcggagccaggagtacaagaaataccagacaaacaagacaaccggcaacaccgataagagagccttcgtcgagacctggcagtccttttaccggaagaagcttaaggaggtgtggaaacctgccgtgcggtctggcggatctggcggaggctccaccagccccaagaaaaagagaaaagtctaagctgccttctgcggggcttgccttctggccatgcccttcttctctcccttgcacctgtacctcttggtctttgaataaagcctgagtaggaaggctagcaaaaaaaaaaaaaaaaaaaaaaaaaaaaaaaaaaaaaaaaaaaaaaaaaaaaaaaaaaaaaaaaaaaaaaaaaaaaaaaa

SEQ ID NO: 13504 - RNA, 5785 nt, synthetic construct
  source 1..5785: mol_type = other RNA
aggaaataagagagaaaagaagagtaagaagaaatataagagccaccatggcccctaagaagaagcgtaaagtgagccggatggaacgcctcgtctacgaggtgcggcagaagtgcagaaacatcgaggacatctgcatctcctgcggatctctgaacgtgaccctggagcacccactgttcatcggcggcatgtgccagaactgtaaaaactgttttctggagtgtgcctatcaatacgacgatgacggctaccagagctactgcaccatctgttgcggcggaagagaggtgctgatgtgtggaaataacaactgctgccggtgcttctgcgtggaatgcgtggacctgctggtgggccccggcgccgcccaggccgctattaaggaagatccttggaactgctacatgtgcggccacaagggcacatacggcctgctgagacggagagaggactggcctagcagactgcagatgttcttcgccaataaccacgaccaggagttcgacccccctaaggtgtaccctcccgtccccgccgagaagagaaagcccatccgggtcctgagcctgttcgatggcatcgccaccggtctgctggtgctgaaggacctgggcatccaggtggataggtacattgcctccgaggtgtgcgaggactccatcaccgtgggaatggtgcgtcatcagggcaagatcatgtacgtgggcgacgtgcggagcgtgacacagaagcatatccaggagtggggccctttcgacctggtgatcggcggcagcccttgcaatgacctgagcatcgtgaacccagcccggaagggcctgtacgagggaaccggcagactgttcttcgagttttacagactgctgcacgacgcccggcctaaggaaggcgacgaccggcccttcttttggctgttcgagaatgtggtggccatgggagtcagcgacaagcgggatattagccggttcctggagagcaaccccgtgatgatcgatgccaaggaagtgagcgccgcccaccgggccagatacttctggggcaatctgcctggcatgaacagacccctggccagcaccgtgaacgacaagctggagctgcaggagtgcctggagcacggccggatcgccaagttcagcaaggtgagaaccatcaccacccgaagcaacagcatcaaacaaggcaaggaccagcactttcctgtgttcatgaacgagaaggaggacatcctgtggtgtaccgagatggagagagtgttcgggttcccagtccactacacagatgtcagcaacatgtctagactggccagacagagactgctgggaagaagctggtccgtccctgtgatcagacacctgttcgcccctctgaaggagtacttcgcctgcgtgagcagcggcaacagcaacgccaacagccggggccccagcttctctagcggcctggtgccactgtccctgagagggagccacatgggccccatggagatctacaaaaccgtgagcgcctggaagcggcagcctgtgcgcgtgctgagcctgtttcggaatatcgataaagtcctgaaaagcctgggattcctggagagcggctctggctccggcggtggcaccctgaagtacgtggaggatgtgacaaacgtggtcagacgggatgtggagaagtggggccccttcgatctggtgtacggcagcacccaacccctgggcagctcttgtgaccggtgccctggctggtacatgtttcagttccaccggatcctgcagtacgccctgccgagacaggagtcccagcggccattcttttggattttcatggacaacttgctgctgaccgaggatgaccaggaaactaccactcggttcctgcagaccgaagccgtgaccctgcaggacgtgagaggccgggactaccagaacgccatgcgggtgtggtccaacatccctggactgaaaagcaagcacgcacctctgacccctaaagaagaggagtacctgcaggcccaggtgcggagcagaagcaagctggacgcccctaaggtggatctgctggtgaagaattgcctcctgcccctgagagagtacttcaagtatttcagccagaatagtctgcccctgggaggcagcggcggcggcccccagaagctggtgaccttcgaggacgtggccgtgtacttcacccaggccgagtgggacggcctgagccccgcccagaggatcctgtacagggacgtgatgctggagaactacggcaacgtggccagcctgggcttccccctgctgaagcccgccgtgatcagccagctggagggcggcggcgagctgggcgcccccagccccctggccgccggcaccggcctgcacggcctgaggaccgtgggcggcccaagcagcggcgcccctcctcccagcggcggcagcccagccggctccccaacctctaccgaggagggcacctctgagtccgccacccccgagagcggccctggcacctccaccgagcccagcgagggcagcgcacccggcagccctgccggcagccccacctccacagaggagggaaccagcaccgagcccagcgaaggcagcgccccaggcaccagcaccgagcctagtgagcaggagattaaacggatcaacaagatcagaagaagacttgtgaaagacagcaacaccaagaaggccggcaagacaggccccatgaaaaccctgctggttagagtgatgacacccgatctgagagagcggctggaaaacctgagaaagaagcctgaaaatatcccccagcccatcagcaatacatctagagccaacctgaataagctgctgaccgattacaccgaaatgaagaaggcgatcctgcatgtgtactgggaagagttccagaaggaccctgtgggcctgatgagccgggtggcccagcctgccagcaagaagatcgatcagaacaagctgaaacctgagatggacgagaagggcaacctgaccaccgccggctttgcctgctctcagtgtggccagcccctgttcgtgtacaagctggagcaggtgtctgagaagggcaaggcttacaccaactacttcggacggtgcaatgtggccgagcacgaaaagctgatcctgctggcccagctgaagcccgagaaggatagcgacgaagccgtgacatatagcctgggaaagtttgggcagagggccctggatttctacagcattcatgtgaccaaggagtccacccaccccgtgaagcccctggcccagatcgccggaaacagatacgcctccggacctgtgggaaaggccctgagcgacgcatgtatgggcacaatcgcctccttcctgtctaagtaccaggacatcatcatcgaacaccagaaggtggtgaagggcaaccagaagagactggagagcctgcgggagctggccggcaaggaaaacctggaataccctagcgtgaccctgccacctcagcctcacaccaaggagggcgttgatgcctacaacgaagtgatcgcccgggtgcgaatgtgggtgaacctgaacctgtggcagaagctgaagctaagcagagatgatgccaagcctctgctgagactgaagggattcccttcctttcctctggtcgagagacaggccaacgaagtggactggtgggacatggtgtgtaacgtgaagaagctgatcaacgagaaaaaggaggatggcaaggtgttttggcagaatctggctggctacaagagacaggaagccctgagaccatacctgagcagcgaggaagatcggaagaagggaaagaaattcgctcggtaccagctgggcgacctgctgctgcacctggaaaagaagcacggcgaggactggggaaaggtgtacgacgaggcctgggagcggattgacaagaaagtggaaggcctgagcaagcacatcaagctggaagaggaacggagaagcgaggacgcccagagcaaggccgccctgaccgactggctgcgggctaaggccagcttcgtgatcgagggcctgaaggaggccgacaaggacgagttctgcagatgcgagctgaagctgcagaagtggtacggggacctgcggggaaagcccttcgccatcgaagccgagaacagcatcctggacatcagcggcttcagcaagcagtacaactgtgccttcatctggcagaaggacggcgtgaagaagctgaacctgtacctgatcatcaactacttcaagggcggcaagctgcggttcaagaagatcaaacctgaagccttcgaagccaacagattctacaccgtgatcaacaaaaagagcggcgagatcgtgcccatggaggtgaacttcaacttcgacgaccccaacctgatcatcctgcctctggcctttggcaagagacagggcagagaattcatctggaacgacctgctgtccctggaaaccggcagcctgaagctggccaacggaagagtgatcgagaagacactgtacaacagaagaacccggcaggatgagcctgccctgttcgtggccctgaccttcgagcggcgggaggtcctggactcctccaatatcaaaccaatgaacctgatcggcgtggcaagaggcgaaaacatccccgccgtgatcgccctgaccgaccccgagggctgcccactgagccggtttaaggatagcctgggaaacccaacccacatcctgagaatcggcgagagctataaggagaagcagcggaccatccaggccaagaaggaggtggagcagcggagagccggcggctacagccggaagtacgccagcaaagccaagaatctggcagacgatatggtgagaaacaccgctagagatctgctgtactacgccgtgacccaggatgccatgctgatcttcgccaacctgagccggggcttcggccggcagggcaagcggaccttcatggccgagagacagtacacacggatggaggactggctgaccgccaagctggcctacgagggcctgagcaagacctacctgtccaagacactggcccagtacacctccaagacatgcagcaactgtgggtttaccatcaccagcgccgactacgacagggtgctggagaagctgaagaagacagcaacaggctggatgaccacaattaacggcaaggagctgaaggtggagggccagattacctactacaacagatacaagagacagaacgtagtcaaggacctgtccgtcgagctggatagactgagcgaagaatctgtgaacaacgacatctcctcctggacaaagggcagaagcggagaagctctgagcctcctgaagaaaagattctcccatagacccgtgcaggagaagttcgtgtgcctgaactgcggcttcgagacacacgcagccgagcaagccgccctgaacatcgccagatcctggctgttcctgcggagccaggagtacaagaaataccagacaaacaagacaaccggcaacaccgataagagagccttcgtcgagacctggcagtccttttaccggaagaagcttaaggaggtgtggaaacctgccgtgcggtctggcggatctggcggaggctccaccagccccaagaaaaagagaaaagtctaagctgccttctgcggggcttgccttctggccatgcccttcttctctcccttgcacctgtacctcttggtctttgaataaagcctgagtaggaaggctagcaaaaaaaaaaaaaaaaaaaaaaaaaaaaaaaaaaaaaaaaaaaaaaaaaaaaaaaaaaaaaaaaaaaaaaaaaaaaaaaa

SEQ ID NO: 13505 - RNA, 5785 nt, synthetic construct
  source 1..5785: mol_type = other RNA
aggaaataagagagaaaagaagagtaagaagaaatataagagccaccatggcccctaagaagaagcgtaaagtgagccggatggaacgcctcgtctacgaggtgcggcagaagtgcagaaacatcgaggacatctgcatctcctgcggatctctgaacgtgaccctggagcacccactgttcatcggcggcatgtgccagaactgtaaaaactgttttctggagtgtgcctatcaatacgacgatgacggctaccagagctactgcaccatctgttgcggcggaagagaggtgctgatgtgtggaaataacaactgctgccggtgcttctgcgtggaatgcgtggacctgctggtgggccccggcgccgcccaggccgctattaaggaagatccttggaactgctacatgtgcggccacaagggcacatacggcctgctgagacggagagaggactggcctagcagactgcagatgttcttcgccaataaccacgaccaggagttcgacccccctaaggtgtaccctcccgtccccgccgagaagagaaagcccatccgggtcctgagcctgttcgatggcatcgccaccggtctgctggtgctgaaggacctgggcatccaggtggataggtacattgcctccgaggtgtgcgaggactccatcaccgtgggaatggtgcgtcatcagggcaagatcatgtacgtgggcgacgtgcggagcgtgacacagaagcatatccaggagtggggccctttcgacctggtgatcggcggcagcccttgcaatgacctgagcatcgtgaacccagcccggaagggcctgtacgagggaaccggcagactgttcttcgagttttacagactgctgcacgacgcccggcctaaggaaggcgacgaccggcccttcttttggctgttcgagaatgtggtggccatgggagtcagcgacaagcgggatattagccggttcctggagagcaaccccgtgatgatcgatgccaaggaagtgagcgccgcccaccgggccagatacttctggggcaatctgcctggcatgaacagacccctggccagcaccgtgaacgacaagctggagctgcaggagtgcctggagcacggccggatcgccaagttcagcaaggtgagaaccatcaccacccgaagcaacagcatcaaacaaggcaaggaccagcactttcctgtgttcatgaacgagaaggaggacatcctgtggtgtaccgagatggagagagtgttcgggttcccagtccactacacagatgtcagcaacatgtctagactggccagacagagactgctgggaagaagctggtccgtccctgtgatcagacacctgttcgcccctctgaaggagtacttcgcctgcgtgagcagcggcaacagcaacgccaacagccggggccccagcttctctagcggcctggtgccactgtccctgagagggagccacatgggccccatggagatctacaaaaccgtgagcgcctggaagcggcagcctgtgcgcgtgctgagcctgtttcggaatatcgataaagtcctgaaaagcctgggattcctggagagcggctctggctccggcggtggcaccctgaagtacgtggaggatgtgacaaacgtggtcagacgggatgtggagaagtggggccccttcgatctggtgtacggcagcacccaacccctgggcagctcttgtgaccggtgccctggctggtacatgtttcagttccaccggatcctgcagtacgccctgccgagacaggagtcccagcggccattcttttggattttcatggacaacttgctgctgaccgaggatgaccaggaaactaccactcggttcctgcagaccgaagccgtgaccctgcaggacgtgagaggccgggactaccagaacgccatgcgggtgtggtccaacatccctggactgaaaagcaagcacgcacctctgacccctaaagaagaggagtacctgcaggcccaggtgcggagcagaagcaagctggacgcccctaaggtggatctgctggtgaagaattgcctcctgcccctgagagagtacttcaagtatttcagccagaatagtctgcccctgggaggcagcggcggcggcagctacgagggcagcgtgagcttcagggacgtggccatcaacttcagcagggaggagtggcagcacctggacctgagccagaggaacctgtacagggacgtgatgctggagacctgcagccacctgctgagcgtgggctaccaggtgcccaagcccgaggtggtgatgctggagcagggcaaggagccctgggccctgcagggcgagaggcccaggcagagctgccccggcgagaagctgtggggcggcccaagcagcggcgcccctcctcccagcggcggcagcccagccggctccccaacctctaccgaggagggcacctctgagtccgccacccccgagagcggccctggcacctccaccgagcccagcgagggcagcgcacccggcagccctgccggcagccccacctccacagaggagggaaccagcaccgagcccagcgaaggcagcgccccaggcaccagcaccgagcctagtgagcaggagattaaacggatcaacaagatcagaagaagacttgtgaaagacagcaacaccaagaaggccggcaagacaggccccatgaaaaccctgctggttagagtgatgacacccgatctgagagagcggctggaaaacctgagaaagaagcctgaaaatatcccccagcccatcagcaatacatctagagccaacctgaataagctgctgaccgattacaccgaaatgaagaaggcgatcctgcatgtgtactgggaagagttccagaaggaccctgtgggcctgatgagccgggtggcccagcctgccagcaagaagatcgatcagaacaagctgaaacctgagatggacgagaagggcaacctgaccaccgccggctttgcctgctctcagtgtggccagcccctgttcgtgtacaagctggagcaggtgtctgagaagggcaaggcttacaccaactacttcggacggtgcaatgtggccgagcacgaaaagctgatcctgctggcccagctgaagcccgagaaggatagcgacgaagccgtgacatatagcctgggaaagtttgggcagagggccctggatttctacagcattcatgtgaccaaggagtccacccaccccgtgaagcccctggcccagatcgccggaaacagatacgcctccggacctgtgggaaaggccctgagcgacgcatgtatgggcacaatcgcctccttcctgtctaagtaccaggacatcatcatcgaacaccagaaggtggtgaagggcaaccagaagagactggagagcctgcgggagctggccggcaaggaaaacctggaataccctagcgtgaccctgccacctcagcctcacaccaaggagggcgttgatgcctacaacgaagtgatcgcccgggtgcgaatgtgggtgaacctgaacctgtggcagaagctgaagctaagcagagatgatgccaagcctctgctgagactgaagggattcccttcctttcctctggtcgagagacaggccaacgaagtggactggtgggacatggtgtgtaacgtgaagaagctgatcaacgagaaaaaggaggatggcaaggtgttttggcagaatctggctggctacaagagacaggaagccctgagaccatacctgagcagcgaggaagatcggaagaagggaaagaaattcgctcggtaccagctgggcgacctgctgctgcacctggaaaagaagcacggcgaggactggggaaaggtgtacgacgaggcctgggagcggattgacaagaaagtggaaggcctgagcaagcacatcaagctggaagaggaacggagaagcgaggacgcccagagcaaggccgccctgaccgactggctgcgggctaaggccagcttcgtgatcgagggcctgaaggaggccgacaaggacgagttctgcagatgcgagctgaagctgcagaagtggtacggggacctgcggggaaagcccttcgccatcgaagccgagaacagcatcctggacatcagcggcttcagcaagcagtacaactgtgccttcatctggcagaaggacggcgtgaagaagctgaacctgtacctgatcatcaactacttcaagggcggcaagctgcggttcaagaagatcaaacctgaagccttcgaagccaacagattctacaccgtgatcaacaaaaagagcggcgagatcgtgcccatggaggtgaacttcaacttcgacgaccccaacctgatcatcctgcctctggcctttggcaagagacagggcagagaattcatctggaacgacctgctgtccctggaaaccggcagcctgaagctggccaacggaagagtgatcgagaagacactgtacaacagaagaacccggcaggatgagcctgccctgttcgtggccctgaccttcgagcggcgggaggtcctggactcctccaatatcaaaccaatgaacctgatcggcgtggcaagaggcgaaaacatccccgccgtgatcgccctgaccgaccccgagggctgcccactgagccggtttaaggatagcctgggaaacccaacccacatcctgagaatcggcgagagctataaggagaagcagcggaccatccaggccaagaaggaggtggagcagcggagagccggcggctacagccggaagtacgccagcaaagccaagaatctggcagacgatatggtgagaaacaccgctagagatctgctgtactacgccgtgacccaggatgccatgctgatcttcgccaacctgagccggggcttcggccggcagggcaagcggaccttcatggccgagagacagtacacacggatggaggactggctgaccgccaagctggcctacgagggcctgagcaagacctacctgtccaagacactggcccagtacacctccaagacatgcagcaactgtgggtttaccatcaccagcgccgactacgacagggtgctggagaagctgaagaagacagcaacaggctggatgaccacaattaacggcaaggagctgaaggtggagggccagattacctactacaacagatacaagagacagaacgtagtcaaggacctgtccgtcgagctggatagactgagcgaagaatctgtgaacaacgacatctcctcctggacaaagggcagaagcggagaagctctgagcctcctgaagaaaagattctcccatagacccgtgcaggagaagttcgtgtgcctgaactgcggcttcgagacacacgcagccgagcaagccgccctgaacatcgccagatcctggctgttcctgcggagccaggagtacaagaaataccagacaaacaagacaaccggcaacaccgataagagagccttcgtcgagacctggcagtccttttaccggaagaagcttaaggaggtgtggaaacctgccgtgcggtctggcggatctggcggaggctccaccagccccaagaaaaagagaaaagtctaagctgccttctgcggggcttgccttctggccatgcccttcttctctcccttgcacctgtacctcttggtctttgaataaagcctgagtaggaaggctagcaaaaaaaaaaaaaaaaaaaaaaaaaaaaaaaaaaaaaaaaaaaaaaaaaaaaaaaaaaaaaaaaaaaaaaaaaaaaaaaa

SEQ ID NO: 13506 - RNA, 5785 nt, synthetic construct
  source 1..5785: mol_type = other RNA
aggaaataagagagaaaagaagagtaagaagaaatataagagccaccatggcccctaagaagaagcgtaaagtgagccggatggaacgcctcgtctacgaggtgcggcagaagtgcagaaacatcgaggacatctgcatctcctgcggatctctgaacgtgaccctggagcacccactgttcatcggcggcatgtgccagaactgtaaaaactgttttctggagtgtgcctatcaatacgacgatgacggctaccagagctactgcaccatctgttgcggcggaagagaggtgctgatgtgtggaaataacaactgctgccggtgcttctgcgtggaatgcgtggacctgctggtgggccccggcgccgcccaggccgctattaaggaagatccttggaactgctacatgtgcggccacaagggcacatacggcctgctgagacggagagaggactggcctagcagactgcagatgttcttcgccaataaccacgaccaggagttcgacccccctaaggtgtaccctcccgtccccgccgagaagagaaagcccatccgggtcctgagcctgttcgatggcatcgccaccggtctgctggtgctgaaggacctgggcatccaggtggataggtacattgcctccgaggtgtgcgaggactccatcaccgtgggaatggtgcgtcatcagggcaagatcatgtacgtgggcgacgtgcggagcgtgacacagaagcatatccaggagtggggccctttcgacctggtgatcggcggcagcccttgcaatgacctgagcatcgtgaacccagcccggaagggcctgtacgagggaaccggcagactgttcttcgagttttacagactgctgcacgacgcccggcctaaggaaggcgacgaccggcccttcttttggctgttcgagaatgtggtggccatgggagtcagcgacaagcgggatattagccggttcctggagagcaaccccgtgatgatcgatgccaaggaagtgagcgccgcccaccgggccagatacttctggggcaatctgcctggcatgaacagacccctggccagcaccgtgaacgacaagctggagctgcaggagtgcctggagcacggccggatcgccaagttcagcaaggtgagaaccatcaccacccgaagcaacagcatcaaacaaggcaaggaccagcactttcctgtgttcatgaacgagaaggaggacatcctgtggtgtaccgagatggagagagtgttcgggttcccagtccactacacagatgtcagcaacatgtctagactggccagacagagactgctgggaagaagctggtccgtccctgtgatcagacacctgttcgcccctctgaaggagtacttcgcctgcgtgagcagcggcaacagcaacgccaacagccggggccccagcttctctagcggcctggtgccactgtccctgagagggagccacatgggccccatggagatctacaaaaccgtgagcgcctggaagcggcagcctgtgcgcgtgctgagcctgtttcggaatatcgataaagtcctgaaaagcctgggattcctggagagcggctctggctccggcggtggcaccctgaagtacgtggaggatgtgacaaacgtggtcagacgggatgtggagaagtggggccccttcgatctggtgtacggcagcacccaacccctgggcagctcttgtgaccggtgccctggctggtacatgtttcagttccaccggatcctgcagtacgccctgccgagacaggagtcccagcggccattcttttggattttcatggacaacttgctgctgaccgaggatgaccaggaaactaccactcggttcctgcagaccgaagccgtgaccctgcaggacgtgagaggccgggactaccagaacgccatgcgggtgtggtccaacatccctggactgaaaagcaagcacgcacctctgacccctaaagaagaggagtacctgcaggcccaggtgcggagcagaagcaagctggacgcccctaaggtggatctgctggtgaagaattgcctcctgcccctgagagagtacttcaagtatttcagccagaatagtctgcccctgggaggcagcggcggcggcttccaggacagcgtgaccttccaggacgtggccgtgaccttcacccccgaggagtggggcaggctggccgccccccagaaggagctgtacagggaggtgatgctggagaacttcggccacctggcctgcctgggcctggccctgagcaagcccgacgtgatctgccagctggagaggggcgaggccccctggatgcccaggggcgacgtgccccagaggcccagcgccgcccccagcggcgacggcggcccaagcagcggcgcccctcctcccagcggcggcagcccagccggctccccaacctctaccgaggagggcacctctgagtccgccacccccgagagcggccctggcacctccaccgagcccagcgagggcagcgcacccggcagccctgccggcagccccacctccacagaggagggaaccagcaccgagcccagcgaaggcagcgccccaggcaccagcaccgagcctagtgagcaggagattaaacggatcaacaagatcagaagaagacttgtgaaagacagcaacaccaagaaggccggcaagacaggccccatgaaaaccctgctggttagagtgatgacacccgatctgagagagcggctggaaaacctgagaaagaagcctgaaaatatcccccagcccatcagcaatacatctagagccaacctgaataagctgctgaccgattacaccgaaatgaagaaggcgatcctgcatgtgtactgggaagagttccagaaggaccctgtgggcctgatgagccgggtggcccagcctgccagcaagaagatcgatcagaacaagctgaaacctgagatggacgagaagggcaacctgaccaccgccggctttgcctgctctcagtgtggccagcccctgttcgtgtacaagctggagcaggtgtctgagaagggcaaggcttacaccaactacttcggacggtgcaatgtggccgagcacgaaaagctgatcctgctggcccagctgaagcccgagaaggatagcgacgaagccgtgacatatagcctgggaaagtttgggcagagggccctggatttctacagcattcatgtgaccaaggagtccacccaccccgtgaagcccctggcccagatcgccggaaacagatacgcctccggacctgtgggaaaggccctgagcgacgcatgtatgggcacaatcgcctccttcctgtctaagtaccaggacatcatcatcgaacaccagaaggtggtgaagggcaaccagaagagactggagagcctgcgggagctggccggcaaggaaaacctggaataccctagcgtgaccctgccacctcagcctcacaccaaggagggcgttgatgcctacaacgaagtgatcgcccgggtgcgaatgtgggtgaacctgaacctgtggcagaagctgaagctaagcagagatgatgccaagcctctgctgagactgaagggattcccttcctttcctctggtcgagagacaggccaacgaagtggactggtgggacatggtgtgtaacgtgaagaagctgatcaacgagaaaaaggaggatggcaaggtgttttggcagaatctggctggctacaagagacaggaagccctgagaccatacctgagcagcgaggaagatcggaagaagggaaagaaattcgctcggtaccagctgggcgacctgctgctgcacctggaaaagaagcacggcgaggactggggaaaggtgtacgacgaggcctgggagcggattgacaagaaagtggaaggcctgagcaagcacatcaagctggaagaggaacggagaagcgaggacgcccagagcaaggccgccctgaccgactggctgcgggctaaggccagcttcgtgatcgagggcctgaaggaggccgacaaggacgagttctgcagatgcgagctgaagctgcagaagtggtacggggacctgcggggaaagcccttcgccatcgaagccgagaacagcatcctggacatcagcggcttcagcaagcagtacaactgtgccttcatctggcagaaggacggcgtgaagaagctgaacctgtacctgatcatcaactacttcaagggcggcaagctgcggttcaagaagatcaaacctgaagccttcgaagccaacagattctacaccgtgatcaacaaaaagagcggcgagatcgtgcccatggaggtgaacttcaacttcgacgaccccaacctgatcatcctgcctctggcctttggcaagagacagggcagagaattcatctggaacgacctgctgtccctggaaaccggcagcctgaagctggccaacggaagagtgatcgagaagacactgtacaacagaagaacccggcaggatgagcctgccctgttcgtggccctgaccttcgagcggcgggaggtcctggactcctccaatatcaaaccaatgaacctgatcggcgtggcaagaggcgaaaacatccccgccgtgatcgccctgaccgaccccgagggctgcccactgagccggtttaaggatagcctgggaaacccaacccacatcctgagaatcggcgagagctataaggagaagcagcggaccatccaggccaagaaggaggtggagcagcggagagccggcggctacagccggaagtacgccagcaaagccaagaatctggcagacgatatggtgagaaacaccgctagagatctgctgtactacgccgtgacccaggatgccatgctgatcttcgccaacctgagccggggcttcggccggcagggcaagcggaccttcatggccgagagacagtacacacggatggaggactggctgaccgccaagctggcctacgagggcctgagcaagacctacctgtccaagacactggcccagtacacctccaagacatgcagcaactgtgggtttaccatcaccagcgccgactacgacagggtgctggagaagctgaagaagacagcaacaggctggatgaccacaattaacggcaaggagctgaaggtggagggccagattacctactacaacagatacaagagacagaacgtagtcaaggacctgtccgtcgagctggatagactgagcgaagaatctgtgaacaacgacatctcctcctggacaaagggcagaagcggagaagctctgagcctcctgaagaaaagattctcccatagacccgtgcaggagaagttcgtgtgcctgaactgcggcttcgagacacacgcagccgagcaagccgccctgaacatcgccagatcctggctgttcctgcggagccaggagtacaagaaataccagacaaacaagacaaccggcaacaccgataagagagccttcgtcgagacctggcagtccttttaccggaagaagcttaaggaggtgtggaaacctgccgtgcggtctggcggatctggcggaggctccaccagccccaagaaaaagagaaaagtctaagctgccttctgcggggcttgccttctggccatgcccttcttctctcccttgcacctgtacctcttggtctttgaataaagcctgagtaggaaggctagcaaaaaaaaaaaaaaaaaaaaaaaaaaaaaaaaaaaaaaaaaaaaaaaaaaaaaaaaaaaaaaaaaaaaaaaaaaaaaaaa

SEQ ID NO: 13507 - RNA, 5785 nt, synthetic construct
  source 1..5785: mol_type = other RNA
aggaaataagagagaaaagaagagtaagaagaaatataagagccaccatggcccctaagaagaagcgtaaagtgagccggatggaacgcctcgtctacgaggtgcggcagaagtgcagaaacatcgaggacatctgcatctcctgcggatctctgaacgtgaccctggagcacccactgttcatcggcggcatgtgccagaactgtaaaaactgttttctggagtgtgcctatcaatacgacgatgacggctaccagagctactgcaccatctgttgcggcggaagagaggtgctgatgtgtggaaataacaactgctgccggtgcttctgcgtggaatgcgtggacctgctggtgggccccggcgccgcccaggccgctattaaggaagatccttggaactgctacatgtgcggccacaagggcacatacggcctgctgagacggagagaggactggcctagcagactgcagatgttcttcgccaataaccacgaccaggagttcgacccccctaaggtgtaccctcccgtccccgccgagaagagaaagcccatccgggtcctgagcctgttcgatggcatcgccaccggtctgctggtgctgaaggacctgggcatccaggtggataggtacattgcctccgaggtgtgcgaggactccatcaccgtgggaatggtgcgtcatcagggcaagatcatgtacgtgggcgacgtgcggagcgtgacacagaagcatatccaggagtggggccctttcgacctggtgatcggcggcagcccttgcaatgacctgagcatcgtgaacccagcccggaagggcctgtacgagggaaccggcagactgttcttcgagttttacagactgctgcacgacgcccggcctaaggaaggcgacgaccggcccttcttttggctgttcgagaatgtggtggccatgggagtcagcgacaagcgggatattagccggttcctggagagcaaccccgtgatgatcgatgccaaggaagtgagcgccgcccaccgggccagatacttctggggcaatctgcctggcatgaacagacccctggccagcaccgtgaacgacaagctggagctgcaggagtgcctggagcacggccggatcgccaagttcagcaaggtgagaaccatcaccacccgaagcaacagcatcaaacaaggcaaggaccagcactttcctgtgttcatgaacgagaaggaggacatcctgtggtgtaccgagatggagagagtgttcgggttcccagtccactacacagatgtcagcaacatgtctagactggccagacagagactgctgggaagaagctggtccgtccctgtgatcagacacctgttcgcccctctgaaggagtacttcgcctgcgtgagcagcggcaacagcaacgccaacagccggggccccagcttctctagcggcctggtgccactgtccctgagagggagccacatgggccccatggagatctacaaaaccgtgagcgcctggaagcggcagcctgtgcgcgtgctgagcctgtttcggaatatcgataaagtcctgaaaagcctgggattcctggagagcggctctggctccggcggtggcaccctgaagtacgtggaggatgtgacaaacgtggtcagacgggatgtggagaagtggggccccttcgatctggtgtacggcagcacccaacccctgggcagctcttgtgaccggtgccctggctggtacatgtttcagttccaccggatcctgcagtacgccctgccgagacaggagtcccagcggccattcttttggattttcatggacaacttgctgctgaccgaggatgaccaggaaactaccactcggttcctgcagaccgaagccgtgaccctgcaggacgtgagaggccgggactaccagaacgccatgcgggtgtggtccaacatccctggactgaaaagcaagcacgcacctctgacccctaaagaagaggagtacctgcaggcccaggtgcggagcagaagcaagctggacgcccctaaggtggatctgctggtgaagaattgcctcctgcccctgagagagtacttcaagtatttcagccagaatagtctgcccctgggaggcagcggcggcggcagcctgggcagcgagctgttcagggacgtggccatcgtgttcagccaggaggagtggcagtggctggcccccgcccagagggacctgtacagggacgtgatgctggagacctacagcaacctggtgagcctgggcctggccatcagcaagcccgacgtgatcagcttcctggagcagggcaaggagccctggatggtggagagggtggtgagcaggggcctgtgccccgtgctggagagcaggggcggcccaagcagcggcgcccctcctcccagcggcggcagcccagccggctccccaacctctaccgaggagggcacctctgagtccgccacccccgagagcggccctggcacctccaccgagcccagcgagggcagcgcacccggcagccctgccggcagccccacctccacagaggagggaaccagcaccgagcccagcgaaggcagcgccccaggcaccagcaccgagcctagtgagcaggagattaaacggatcaacaagatcagaagaagacttgtgaaagacagcaacaccaagaaggccggcaagacaggccccatgaaaaccctgctggttagagtgatgacacccgatctgagagagcggctggaaaacctgagaaagaagcctgaaaatatcccccagcccatcagcaatacatctagagccaacctgaataagctgctgaccgattacaccgaaatgaagaaggcgatcctgcatgtgtactgggaagagttccagaaggaccctgtgggcctgatgagccgggtggcccagcctgccagcaagaagatcgatcagaacaagctgaaacctgagatggacgagaagggcaacctgaccaccgccggctttgcctgctctcagtgtggccagcccctgttcgtgtacaagctggagcaggtgtctgagaagggcaaggcttacaccaactacttcggacggtgcaatgtggccgagcacgaaaagctgatcctgctggcccagctgaagcccgagaaggatagcgacgaagccgtgacatatagcctgggaaagtttgggcagagggccctggatttctacagcattcatgtgaccaaggagtccacccaccccgtgaagcccctggcccagatcgccggaaacagatacgcctccggacctgtgggaaaggccctgagcgacgcatgtatgggcacaatcgcctccttcctgtctaagtaccaggacatcatcatcgaacaccagaaggtggtgaagggcaaccagaagagactggagagcctgcgggagctggccggcaaggaaaacctggaataccctagcgtgaccctgccacctcagcctcacaccaaggagggcgttgatgcctacaacgaagtgatcgcccgggtgcgaatgtgggtgaacctgaacctgtggcagaagctgaagctaagcagagatgatgccaagcctctgctgagactgaagggattcccttcctttcctctggtcgagagacaggccaacgaagtggactggtgggacatggtgtgtaacgtgaagaagctgatcaacgagaaaaaggaggatggcaaggtgttttggcagaatctggctggctacaagagacaggaagccctgagaccatacctgagcagcgaggaagatcggaagaagggaaagaaattcgctcggtaccagctgggcgacctgctgctgcacctggaaaagaagcacggcgaggactggggaaaggtgtacgacgaggcctgggagcggattgacaagaaagtggaaggcctgagcaagcacatcaagctggaagaggaacggagaagcgaggacgcccagagcaaggccgccctgaccgactggctgcgggctaaggccagcttcgtgatcgagggcctgaaggaggccgacaaggacgagttctgcagatgcgagctgaagctgcagaagtggtacggggacctgcggggaaagcccttcgccatcgaagccgagaacagcatcctggacatcagcggcttcagcaagcagtacaactgtgccttcatctggcagaaggacggcgtgaagaagctgaacctgtacctgatcatcaactacttcaagggcggcaagctgcggttcaagaagatcaaacctgaagccttcgaagccaacagattctacaccgtgatcaacaaaaagagcggcgagatcgtgcccatggaggtgaacttcaacttcgacgaccccaacctgatcatcctgcctctggcctttggcaagagacagggcagagaattcatctggaacgacctgctgtccctggaaaccggcagcctgaagctggccaacggaagagtgatcgagaagacactgtacaacagaagaacccggcaggatgagcctgccctgttcgtggccctgaccttcgagcggcgggaggtcctggactcctccaatatcaaaccaatgaacctgatcggcgtggcaagaggcgaaaacatccccgccgtgatcgccctgaccgaccccgagggctgcccactgagccggtttaaggatagcctgggaaacccaacccacatcctgagaatcggcgagagctataaggagaagcagcggaccatccaggccaagaaggaggtggagcagcggagagccggcggctacagccggaagtacgccagcaaagccaagaatctggcagacgatatggtgagaaacaccgctagagatctgctgtactacgccgtgacccaggatgccatgctgatcttcgccaacctgagccggggcttcggccggcagggcaagcggaccttcatggccgagagacagtacacacggatggaggactggctgaccgccaagctggcctacgagggcctgagcaagacctacctgtccaagacactggcccagtacacctccaagacatgcagcaactgtgggtttaccatcaccagcgccgactacgacagggtgctggagaagctgaagaagacagcaacaggctggatgaccacaattaacggcaaggagctgaaggtggagggccagattacctactacaacagatacaagagacagaacgtagtcaaggacctgtccgtcgagctggatagactgagcgaagaatctgtgaacaacgacatctcctcctggacaaagggcagaagcggagaagctctgagcctcctgaagaaaagattctcccatagacccgtgcaggagaagttcgtgtgcctgaactgcggcttcgagacacacgcagccgagcaagccgccctgaacatcgccagatcctggctgttcctgcggagccaggagtacaagaaataccagacaaacaagacaaccggcaacaccgataagagagccttcgtcgagacctggcagtccttttaccggaagaagcttaaggaggtgtggaaacctgccgtgcggtctggcggatctggcggaggctccaccagccccaagaaaaagagaaaagtctaagctgccttctgcggggcttgccttctggccatgcccttcttctctcccttgcacctgtacctcttggtctttgaataaagcctgagtaggaaggctagcaaaaaaaaaaaaaaaaaaaaaaaaaaaaaaaaaaaaaaaaaaaaaaaaaaaaaaaaaaaaaaaaaaaaaaaaaaaaaaaa

SEQ ID NO: 13508 - RNA, 5785 nt, synthetic construct
  source 1..5785: mol_type = other RNA
aggaaataagagagaaaagaagagtaagaagaaatataagagccaccatggcccctaagaagaagcgtaaagtgagccggatggaacgcctcgtctacgaggtgcggcagaagtgcagaaacatcgaggacatctgcatctcctgcggatctctgaacgtgaccctggagcacccactgttcatcggcggcatgtgccagaactgtaaaaactgttttctggagtgtgcctatcaatacgacgatgacggctaccagagctactgcaccatctgttgcggcggaagagaggtgctgatgtgtggaaataacaactgctgccggtgcttctgcgtggaatgcgtggacctgctggtgggccccggcgccgcccaggccgctattaaggaagatccttggaactgctacatgtgcggccacaagggcacatacggcctgctgagacggagagaggactggcctagcagactgcagatgttcttcgccaataaccacgaccaggagttcgacccccctaaggtgtaccctcccgtccccgccgagaagagaaagcccatccgggtcctgagcctgttcgatggcatcgccaccggtctgctggtgctgaaggacctgggcatccaggtggataggtacattgcctccgaggtgtgcgaggactccatcaccgtgggaatggtgcgtcatcagggcaagatcatgtacgtgggcgacgtgcggagcgtgacacagaagcatatccaggagtggggccctttcgacctggtgatcggcggcagcccttgcaatgacctgagcatcgtgaacccagcccggaagggcctgtacgagggaaccggcagactgttcttcgagttttacagactgctgcacgacgcccggcctaaggaaggcgacgaccggcccttcttttggctgttcgagaatgtggtggccatgggagtcagcgacaagcgggatattagccggttcctggagagcaaccccgtgatgatcgatgccaaggaagtgagcgccgcccaccgggccagatacttctggggcaatctgcctggcatgaacagacccctggccagcaccgtgaacgacaagctggagctgcaggagtgcctggagcacggccggatcgccaagttcagcaaggtgagaaccatcaccacccgaagcaacagcatcaaacaaggcaaggaccagcactttcctgtgttcatgaacgagaaggaggacatcctgtggtgtaccgagatggagagagtgttcgggttcccagtccactacacagatgtcagcaacatgtctagactggccagacagagactgctgggaagaagctggtccgtccctgtgatcagacacctgttcgcccctctgaaggagtacttcgcctgcgtgagcagcggcaacagcaacgccaacagccggggccccagcttctctagcggcctggtgccactgtccctgagagggagccacatgggccccatggagatctacaaaaccgtgagcgcctggaagcggcagcctgtgcgcgtgctgagcctgtttcggaatatcgataaagtcctgaaaagcctgggattcctggagagcggctctggctccggcggtggcaccctgaagtacgtggaggatgtgacaaacgtggtcagacgggatgtggagaagtggggccccttcgatctggtgtacggcagcacccaacccctgggcagctcttgtgaccggtgccctggctggtacatgtttcagttccaccggatcctgcagtacgccctgccgagacaggagtcccagcggccattcttttggattttcatggacaacttgctgctgaccgaggatgaccaggaaactaccactcggttcctgcagaccgaagccgtgaccctgcaggacgtgagaggccgggactaccagaacgccatgcgggtgtggtccaacatccctggactgaaaagcaagcacgcacctctgacccctaaagaagaggagtacctgcaggcccaggtgcggagcagaagcaagctggacgcccctaaggtggatctgctggtgaagaattgcctcctgcccctgagagagtacttcaagtatttcagccagaatagtctgcccctgggaggcagcggcggcggcggcgaggaggccgtgaccttcagggacgtggccctggacttcacctgggaggagtggggctgcctgagcgccgcccagagggagctgtacaaggacgtgatgctggagaactacaggaacctggtgagcctggccggcctgcccggccccaagcccggcctgatcagctggctggagggcgaggaggagccccacccctgggacagcctggtgcacgccgccaggagcaccagcctgagcaagggcggcccaagcagcggcgcccctcctcccagcggcggcagcccagccggctccccaacctctaccgaggagggcacctctgagtccgccacccccgagagcggccctggcacctccaccgagcccagcgagggcagcgcacccggcagccctgccggcagccccacctccacagaggagggaaccagcaccgagcccagcgaaggcagcgccccaggcaccagcaccgagcctagtgagcaggagattaaacggatcaacaagatcagaagaagacttgtgaaagacagcaacaccaagaaggccggcaagacaggccccatgaaaaccctgctggttagagtgatgacacccgatctgagagagcggctggaaaacctgagaaagaagcctgaaaatatcccccagcccatcagcaatacatctagagccaacctgaataagctgctgaccgattacaccgaaatgaagaaggcgatcctgcatgtgtactgggaagagttccagaaggaccctgtgggcctgatgagccgggtggcccagcctgccagcaagaagatcgatcagaacaagctgaaacctgagatggacgagaagggcaacctgaccaccgccggctttgcctgctctcagtgtggccagcccctgttcgtgtacaagctggagcaggtgtctgagaagggcaaggcttacaccaactacttcggacggtgcaatgtggccgagcacgaaaagctgatcctgctggcccagctgaagcccgagaaggatagcgacgaagccgtgacatatagcctgggaaagtttgggcagagggccctggatttctacagcattcatgtgaccaaggagtccacccaccccgtgaagcccctggcccagatcgccggaaacagatacgcctccggacctgtgggaaaggccctgagcgacgcatgtatgggcacaatcgcctccttcctgtctaagtaccaggacatcatcatcgaacaccagaaggtggtgaagggcaaccagaagagactggagagcctgcgggagctggccggcaaggaaaacctggaataccctagcgtgaccctgccacctcagcctcacaccaaggagggcgttgatgcctacaacgaagtgatcgcccgggtgcgaatgtgggtgaacctgaacctgtggcagaagctgaagctaagcagagatgatgccaagcctctgctgagactgaagggattcccttcctttcctctggtcgagagacaggccaacgaagtggactggtgggacatggtgtgtaacgtgaagaagctgatcaacgagaaaaaggaggatggcaaggtgttttggcagaatctggctggctacaagagacaggaagccctgagaccatacctgagcagcgaggaagatcggaagaagggaaagaaattcgctcggtaccagctgggcgacctgctgctgcacctggaaaagaagcacggcgaggactggggaaaggtgtacgacgaggcctgggagcggattgacaagaaagtggaaggcctgagcaagcacatcaagctggaagaggaacggagaagcgaggacgcccagagcaaggccgccctgaccgactggctgcgggctaaggccagcttcgtgatcgagggcctgaaggaggccgacaaggacgagttctgcagatgcgagctgaagctgcagaagtggtacggggacctgcggggaaagcccttcgccatcgaagccgagaacagcatcctggacatcagcggcttcagcaagcagtacaactgtgccttcatctggcagaaggacggcgtgaagaagctgaacctgtacctgatcatcaactacttcaagggcggcaagctgcggttcaagaagatcaaacctgaagccttcgaagccaacagattctacaccgtgatcaacaaaaagagcggcgagatcgtgcccatggaggtgaacttcaacttcgacgaccccaacctgatcatcctgcctctggcctttggcaagagacagggcagagaattcatctggaacgacctgctgtccctggaaaccggcagcctgaagctggccaacggaagagtgatcgagaagacactgtacaacagaagaacccggcaggatgagcctgccctgttcgtggccctgaccttcgagcggcgggaggtcctggactcctccaatatcaaaccaatgaacctgatcggcgtggcaagaggcgaaaacatccccgccgtgatcgccctgaccgaccccgagggctgcccactgagccggtttaaggatagcctgggaaacccaacccacatcctgagaatcggcgagagctataaggagaagcagcggaccatccaggccaagaaggaggtggagcagcggagagccggcggctacagccggaagtacgccagcaaagccaagaatctggcagacgatatggtgagaaacaccgctagagatctgctgtactacgccgtgacccaggatgccatgctgatcttcgccaacctgagccggggcttcggccggcagggcaagcggaccttcatggccgagagacagtacacacggatggaggactggctgaccgccaagctggcctacgagggcctgagcaagacctacctgtccaagacactggcccagtacacctccaagacatgcagcaactgtgggtttaccatcaccagcgccgactacgacagggtgctggagaagctgaagaagacagcaacaggctggatgaccacaattaacggcaaggagctgaaggtggagggccagattacctactacaacagatacaagagacagaacgtagtcaaggacctgtccgtcgagctggatagactgagcgaagaatctgtgaacaacgacatctcctcctggacaaagggcagaagcggagaagctctgagcctcctgaagaaaagattctcccatagacccgtgcaggagaagttcgtgtgcctgaactgcggcttcgagacacacgcagccgagcaagccgccctgaacatcgccagatcctggctgttcctgcggagccaggagtacaagaaataccagacaaacaagacaaccggcaacaccgataagagagccttcgtcgagacctggcagtccttttaccggaagaagcttaaggaggtgtggaaacctgccgtgcggtctggcggatctggcggaggctccaccagccccaagaaaaagagaaaagtctaagctgccttctgcggggcttgccttctggccatgcccttcttctctcccttgcacctgtacctcttggtctttgaataaagcctgagtaggaaggctagcaaaaaaaaaaaaaaaaaaaaaaaaaaaaaaaaaaaaaaaaaaaaaaaaaaaaaaaaaaaaaaaaaaaaaaaaaaaaaaaa

SEQ ID NO: 13509 - RNA, 5785 nt, synthetic construct
  source 1..5785: mol_type = other RNA
aggaaataagagagaaaagaagagtaagaagaaatataagagccaccatggcccctaagaagaagcgtaaagtgagccggatggaacgcctcgtctacgaggtgcggcagaagtgcagaaacatcgaggacatctgcatctcctgcggatctctgaacgtgaccctggagcacccactgttcatcggcggcatgtgccagaactgtaaaaactgttttctggagtgtgcctatcaatacgacgatgacggctaccagagctactgcaccatctgttgcggcggaagagaggtgctgatgtgtggaaataacaactgctgccggtgcttctgcgtggaatgcgtggacctgctggtgggccccggcgccgcccaggccgctattaaggaagatccttggaactgctacatgtgcggccacaagggcacatacggcctgctgagacggagagaggactggcctagcagactgcagatgttcttcgccaataaccacgaccaggagttcgacccccctaaggtgtaccctcccgtccccgccgagaagagaaagcccatccgggtcctgagcctgttcgatggcatcgccaccggtctgctggtgctgaaggacctgggcatccaggtggataggtacattgcctccgaggtgtgcgaggactccatcaccgtgggaatggtgcgtcatcagggcaagatcatgtacgtgggcgacgtgcggagcgtgacacagaagcatatccaggagtggggccctttcgacctggtgatcggcggcagcccttgcaatgacctgagcatcgtgaacccagcccggaagggcctgtacgagggaaccggcagactgttcttcgagttttacagactgctgcacgacgcccggcctaaggaaggcgacgaccggcccttcttttggctgttcgagaatgtggtggccatgggagtcagcgacaagcgggatattagccggttcctggagagcaaccccgtgatgatcgatgccaaggaagtgagcgccgcccaccgggccagatacttctggggcaatctgcctggcatgaacagacccctggccagcaccgtgaacgacaagctggagctgcaggagtgcctggagcacggccggatcgccaagttcagcaaggtgagaaccatcaccacccgaagcaacagcatcaaacaaggcaaggaccagcactttcctgtgttcatgaacgagaaggaggacatcctgtggtgtaccgagatggagagagtgttcgggttcccagtccactacacagatgtcagcaacatgtctagactggccagacagagactgctgggaagaagctggtccgtccctgtgatcagacacctgttcgcccctctgaaggagtacttcgcctgcgtgagcagcggcaacagcaacgccaacagccggggccccagcttctctagcggcctggtgccactgtccctgagagggagccacatgggccccatggagatctacaaaaccgtgagcgcctggaagcggcagcctgtgcgcgtgctgagcctgtttcggaatatcgataaagtcctgaaaagcctgggattcctggagagcggctctggctccggcggtggcaccctgaagtacgtggaggatgtgacaaacgtggtcagacgggatgtggagaagtggggccccttcgatctggtgtacggcagcacccaacccctgggcagctcttgtgaccggtgccctggctggtacatgtttcagttccaccggatcctgcagtacgccctgccgagacaggagtcccagcggccattcttttggattttcatggacaacttgctgctgaccgaggatgaccaggaaactaccactcggttcctgcagaccgaagccgtgaccctgcaggacgtgagaggccgggactaccagaacgccatgcgggtgtggtccaacatccctggactgaaaagcaagcacgcacctctgacccctaaagaagaggagtacctgcaggcccaggtgcggagcagaagcaagctggacgcccctaaggtggatctgctggtgaagaattgcctcctgcccctgagagagtacttcaagtatttcagccagaatagtctgcccctgggaggcagcggcggcggcctgcagaggctgctgaccttcagggacgtggccatcgagttcagccaggaggagtggacctgcctgaaccacacccagaggaagctgtacagggacgtgatgctggagaactacggccacctgctgttcctgggcctgatcgtgagcaagcccgacctggtgagcttcctggagcagaagaaggagccctggagcgtgaagaggaagaagagggtgaccatccaccccggcaaggtggcccagggcggcccaagcagcggcgcccctcctcccagcggcggcagcccagccggctccccaacctctaccgaggagggcacctctgagtccgccacccccgagagcggccctggcacctccaccgagcccagcgagggcagcgcacccggcagccctgccggcagccccacctccacagaggagggaaccagcaccgagcccagcgaaggcagcgccccaggcaccagcaccgagcctagtgagcaggagattaaacggatcaacaagatcagaagaagacttgtgaaagacagcaacaccaagaaggccggcaagacaggccccatgaaaaccctgctggttagagtgatgacacccgatctgagagagcggctggaaaacctgagaaagaagcctgaaaatatcccccagcccatcagcaatacatctagagccaacctgaataagctgctgaccgattacaccgaaatgaagaaggcgatcctgcatgtgtactgggaagagttccagaaggaccctgtgggcctgatgagccgggtggcccagcctgccagcaagaagatcgatcagaacaagctgaaacctgagatggacgagaagggcaacctgaccaccgccggctttgcctgctctcagtgtggccagcccctgttcgtgtacaagctggagcaggtgtctgagaagggcaaggcttacaccaactacttcggacggtgcaatgtggccgagcacgaaaagctgatcctgctggcccagctgaagcccgagaaggatagcgacgaagccgtgacatatagcctgggaaagtttgggcagagggccctggatttctacagcattcatgtgaccaaggagtccacccaccccgtgaagcccctggcccagatcgccggaaacagatacgcctccggacctgtgggaaaggccctgagcgacgcatgtatgggcacaatcgcctccttcctgtctaagtaccaggacatcatcatcgaacaccagaaggtggtgaagggcaaccagaagagactggagagcctgcgggagctggccggcaaggaaaacctggaataccctagcgtgaccctgccacctcagcctcacaccaaggagggcgttgatgcctacaacgaagtgatcgcccgggtgcgaatgtgggtgaacctgaacctgtggcagaagctgaagctaagcagagatgatgccaagcctctgctgagactgaagggattcccttcctttcctctggtcgagagacaggccaacgaagtggactggtgggacatggtgtgtaacgtgaagaagctgatcaacgagaaaaaggaggatggcaaggtgttttggcagaatctggctggctacaagagacaggaagccctgagaccatacctgagcagcgaggaagatcggaagaagggaaagaaattcgctcggtaccagctgggcgacctgctgctgcacctggaaaagaagcacggcgaggactggggaaaggtgtacgacgaggcctgggagcggattgacaagaaagtggaaggcctgagcaagcacatcaagctggaagaggaacggagaagcgaggacgcccagagcaaggccgccctgaccgactggctgcgggctaaggccagcttcgtgatcgagggcctgaaggaggccgacaaggacgagttctgcagatgcgagctgaagctgcagaagtggtacggggacctgcggggaaagcccttcgccatcgaagccgagaacagcatcctggacatcagcggcttcagcaagcagtacaactgtgccttcatctggcagaaggacggcgtgaagaagctgaacctgtacctgatcatcaactacttcaagggcggcaagctgcggttcaagaagatcaaacctgaagccttcgaagccaacagattctacaccgtgatcaacaaaaagagcggcgagatcgtgcccatggaggtgaacttcaacttcgacgaccccaacctgatcatcctgcctctggcctttggcaagagacagggcagagaattcatctggaacgacctgctgtccctggaaaccggcagcctgaagctggccaacggaagagtgatcgagaagacactgtacaacagaagaacccggcaggatgagcctgccctgttcgtggccctgaccttcgagcggcgggaggtcctggactcctccaatatcaaaccaatgaacctgatcggcgtggcaagaggcgaaaacatccccgccgtgatcgccctgaccgaccccgagggctgcccactgagccggtttaaggatagcctgggaaacccaacccacatcctgagaatcggcgagagctataaggagaagcagcggaccatccaggccaagaaggaggtggagcagcggagagccggcggctacagccggaagtacgccagcaaagccaagaatctggcagacgatatggtgagaaacaccgctagagatctgctgtactacgccgtgacccaggatgccatgctgatcttcgccaacctgagccggggcttcggccggcagggcaagcggaccttcatggccgagagacagtacacacggatggaggactggctgaccgccaagctggcctacgagggcctgagcaagacctacctgtccaagacactggcccagtacacctccaagacatgcagcaactgtgggtttaccatcaccagcgccgactacgacagggtgctggagaagctgaagaagacagcaacaggctggatgaccacaattaacggcaaggagctgaaggtggagggccagattacctactacaacagatacaagagacagaacgtagtcaaggacctgtccgtcgagctggatagactgagcgaagaatctgtgaacaacgacatctcctcctggacaaagggcagaagcggagaagctctgagcctcctgaagaaaagattctcccatagacccgtgcaggagaagttcgtgtgcctgaactgcggcttcgagacacacgcagccgagcaagccgccctgaacatcgccagatcctggctgttcctgcggagccaggagtacaagaaataccagacaaacaagacaaccggcaacaccgataagagagccttcgtcgagacctggcagtccttttaccggaagaagcttaaggaggtgtggaaacctgccgtgcggtctggcggatctggcggaggctccaccagccccaagaaaaagagaaaagtctaagctgccttctgcggggcttgccttctggccatgcccttcttctctcccttgcacctgtacctcttggtctttgaataaagcctgagtaggaaggctagcaaaaaaaaaaaaaaaaaaaaaaaaaaaaaaaaaaaaaaaaaaaaaaaaaaaaaaaaaaaaaaaaaaaaaaaaaaaaaaaa

SEQ ID NO: 13510 - RNA, 5785 nt, synthetic construct
  source 1..5785: mol_type = other RNA
aggaaataagagagaaaagaagagtaagaagaaatataagagccaccatggcccctaagaagaagcgtaaagtgagccggatggaacgcctcgtctacgaggtgcggcagaagtgcagaaacatcgaggacatctgcatctcctgcggatctctgaacgtgaccctggagcacccactgttcatcggcggcatgtgccagaactgtaaaaactgttttctggagtgtgcctatcaatacgacgatgacggctaccagagctactgcaccatctgttgcggcggaagagaggtgctgatgtgtggaaataacaactgctgccggtgcttctgcgtggaatgcgtggacctgctggtgggccccggcgccgcccaggccgctattaaggaagatccttggaactgctacatgtgcggccacaagggcacatacggcctgctgagacggagagaggactggcctagcagactgcagatgttcttcgccaataaccacgaccaggagttcgacccccctaaggtgtaccctcccgtccccgccgagaagagaaagcccatccgggtcctgagcctgttcgatggcatcgccaccggtctgctggtgctgaaggacctgggcatccaggtggataggtacattgcctccgaggtgtgcgaggactccatcaccgtgggaatggtgcgtcatcagggcaagatcatgtacgtgggcgacgtgcggagcgtgacacagaagcatatccaggagtggggccctttcgacctggtgatcggcggcagcccttgcaatgacctgagcatcgtgaacccagcccggaagggcctgtacgagggaaccggcagactgttcttcgagttttacagactgctgcacgacgcccggcctaaggaaggcgacgaccggcccttcttttggctgttcgagaatgtggtggccatgggagtcagcgacaagcgggatattagccggttcctggagagcaaccccgtgatgatcgatgccaaggaagtgagcgccgcccaccgggccagatacttctggggcaatctgcctggcatgaacagacccctggccagcaccgtgaacgacaagctggagctgcaggagtgcctggagcacggccggatcgccaagttcagcaaggtgagaaccatcaccacccgaagcaacagcatcaaacaaggcaaggaccagcactttcctgtgttcatgaacgagaaggaggacatcctgtggtgtaccgagatggagagagtgttcgggttcccagtccactacacagatgtcagcaacatgtctagactggccagacagagactgctgggaagaagctggtccgtccctgtgatcagacacctgttcgcccctctgaaggagtacttcgcctgcgtgagcagcggcaacagcaacgccaacagccggggccccagcttctctagcggcctggtgccactgtccctgagagggagccacatgggccccatggagatctacaaaaccgtgagcgcctggaagcggcagcctgtgcgcgtgctgagcctgtttcggaatatcgataaagtcctgaaaagcctgggattcctggagagcggctctggctccggcggtggcaccctgaagtacgtggaggatgtgacaaacgtggtcagacgggatgtggagaagtggggccccttcgatctggtgtacggcagcacccaacccctgggcagctcttgtgaccggtgccctggctggtacatgtttcagttccaccggatcctgcagtacgccctgccgagacaggagtcccagcggccattcttttggattttcatggacaacttgctgctgaccgaggatgaccaggaaactaccactcggttcctgcagaccgaagccgtgaccctgcaggacgtgagaggccgggactaccagaacgccatgcgggtgtggtccaacatccctggactgaaaagcaagcacgcacctctgacccctaaagaagaggagtacctgcaggcccaggtgcggagcagaagcaagctggacgcccctaaggtggatctgctggtgaagaattgcctcctgcccctgagagagtacttcaagtatttcagccagaatagtctgcccctgggaggcagcggcggcggcggcaagcccggcgccctgagcttcgccgacgtggccgtgtacttcagcagcgaggagtggggctgcctgaggcccgcccagagggccctgtacagggacgtgatgagggagacctacggccacctgggcgccctgggcgaggccaggccccccgccctgatcagctggatggagaggaagaaggaggcctggagccccgaggccgaggaccccgaggacagggccaggcaccccggctacggcggcggcccaagcagcggcgcccctcctcccagcggcggcagcccagccggctccccaacctctaccgaggagggcacctctgagtccgccacccccgagagcggccctggcacctccaccgagcccagcgagggcagcgcacccggcagccctgccggcagccccacctccacagaggagggaaccagcaccgagcccagcgaaggcagcgccccaggcaccagcaccgagcctagtgagcaggagattaaacggatcaacaagatcagaagaagacttgtgaaagacagcaacaccaagaaggccggcaagacaggccccatgaaaaccctgctggttagagtgatgacacccgatctgagagagcggctggaaaacctgagaaagaagcctgaaaatatcccccagcccatcagcaatacatctagagccaacctgaataagctgctgaccgattacaccgaaatgaagaaggcgatcctgcatgtgtactgggaagagttccagaaggaccctgtgggcctgatgagccgggtggcccagcctgccagcaagaagatcgatcagaacaagctgaaacctgagatggacgagaagggcaacctgaccaccgccggctttgcctgctctcagtgtggccagcccctgttcgtgtacaagctggagcaggtgtctgagaagggcaaggcttacaccaactacttcggacggtgcaatgtggccgagcacgaaaagctgatcctgctggcccagctgaagcccgagaaggatagcgacgaagccgtgacatatagcctgggaaagtttgggcagagggccctggatttctacagcattcatgtgaccaaggagtccacccaccccgtgaagcccctggcccagatcgccggaaacagatacgcctccggacctgtgggaaaggccctgagcgacgcatgtatgggcacaatcgcctccttcctgtctaagtaccaggacatcatcatcgaacaccagaaggtggtgaagggcaaccagaagagactggagagcctgcgggagctggccggcaaggaaaacctggaataccctagcgtgaccctgccacctcagcctcacaccaaggagggcgttgatgcctacaacgaagtgatcgcccgggtgcgaatgtgggtgaacctgaacctgtggcagaagctgaagctaagcagagatgatgccaagcctctgctgagactgaagggattcccttcctttcctctggtcgagagacaggccaacgaagtggactggtgggacatggtgtgtaacgtgaagaagctgatcaacgagaaaaaggaggatggcaaggtgttttggcagaatctggctggctacaagagacaggaagccctgagaccatacctgagcagcgaggaagatcggaagaagggaaagaaattcgctcggtaccagctgggcgacctgctgctgcacctggaaaagaagcacggcgaggactggggaaaggtgtacgacgaggcctgggagcggattgacaagaaagtggaaggcctgagcaagcacatcaagctggaagaggaacggagaagcgaggacgcccagagcaaggccgccctgaccgactggctgcgggctaaggccagcttcgtgatcgagggcctgaaggaggccgacaaggacgagttctgcagatgcgagctgaagctgcagaagtggtacggggacctgcggggaaagcccttcgccatcgaagccgagaacagcatcctggacatcagcggcttcagcaagcagtacaactgtgccttcatctggcagaaggacggcgtgaagaagctgaacctgtacctgatcatcaactacttcaagggcggcaagctgcggttcaagaagatcaaacctgaagccttcgaagccaacagattctacaccgtgatcaacaaaaagagcggcgagatcgtgcccatggaggtgaacttcaacttcgacgaccccaacctgatcatcctgcctctggcctttggcaagagacagggcagagaattcatctggaacgacctgctgtccctggaaaccggcagcctgaagctggccaacggaagagtgatcgagaagacactgtacaacagaagaacccggcaggatgagcctgccctgttcgtggccctgaccttcgagcggcgggaggtcctggactcctccaatatcaaaccaatgaacctgatcggcgtggcaagaggcgaaaacatccccgccgtgatcgccctgaccgaccccgagggctgcccactgagccggtttaaggatagcctgggaaacccaacccacatcctgagaatcggcgagagctataaggagaagcagcggaccatccaggccaagaaggaggtggagcagcggagagccggcggctacagccggaagtacgccagcaaagccaagaatctggcagacgatatggtgagaaacaccgctagagatctgctgtactacgccgtgacccaggatgccatgctgatcttcgccaacctgagccggggcttcggccggcagggcaagcggaccttcatggccgagagacagtacacacggatggaggactggctgaccgccaagctggcctacgagggcctgagcaagacctacctgtccaagacactggcccagtacacctccaagacatgcagcaactgtgggtttaccatcaccagcgccgactacgacagggtgctggagaagctgaagaagacagcaacaggctggatgaccacaattaacggcaaggagctgaaggtggagggccagattacctactacaacagatacaagagacagaacgtagtcaaggacctgtccgtcgagctggatagactgagcgaagaatctgtgaacaacgacatctcctcctggacaaagggcagaagcggagaagctctgagcctcctgaagaaaagattctcccatagacccgtgcaggagaagttcgtgtgcctgaactgcggcttcgagacacacgcagccgagcaagccgccctgaacatcgccagatcctggctgttcctgcggagccaggagtacaagaaataccagacaaacaagacaaccggcaacaccgataagagagccttcgtcgagacctggcagtccttttaccggaagaagcttaaggaggtgtggaaacctgccgtgcggtctggcggatctggcggaggctccaccagccccaagaaaaagagaaaagtctaagctgccttctgcggggcttgccttctggccatgcccttcttctctcccttgcacctgtacctcttggtctttgaataaagcctgagtaggaaggctagcaaaaaaaaaaaaaaaaaaaaaaaaaaaaaaaaaaaaaaaaaaaaaaaaaaaaaaaaaaaaaaaaaaaaaaaaaaaaaaaa

SEQ ID NO: 13511 - RNA, 5785 nt, synthetic construct
  source 1..5785: mol_type = other RNA
aggaaataagagagaaaagaagagtaagaagaaatataagagccaccatggcccctaagaagaagcgtaaagtgagccggatggaacgcctcgtctacgaggtgcggcagaagtgcagaaacatcgaggacatctgcatctcctgcggatctctgaacgtgaccctggagcacccactgttcatcggcggcatgtgccagaactgtaaaaactgttttctggagtgtgcctatcaatacgacgatgacggctaccagagctactgcaccatctgttgcggcggaagagaggtgctgatgtgtggaaataacaactgctgccggtgcttctgcgtggaatgcgtggacctgctggtgggccccggcgccgcccaggccgctattaaggaagatccttggaactgctacatgtgcggccacaagggcacatacggcctgctgagacggagagaggactggcctagcagactgcagatgttcttcgccaataaccacgaccaggagttcgacccccctaaggtgtaccctcccgtccccgccgagaagagaaagcccatccgggtcctgagcctgttcgatggcatcgccaccggtctgctggtgctgaaggacctgggcatccaggtggataggtacattgcctccgaggtgtgcgaggactccatcaccgtgggaatggtgcgtcatcagggcaagatcatgtacgtgggcgacgtgcggagcgtgacacagaagcatatccaggagtggggccctttcgacctggtgatcggcggcagcccttgcaatgacctgagcatcgtgaacccagcccggaagggcctgtacgagggaaccggcagactgttcttcgagttttacagactgctgcacgacgcccggcctaaggaaggcgacgaccggcccttcttttggctgttcgagaatgtggtggccatgggagtcagcgacaagcgggatattagccggttcctggagagcaaccccgtgatgatcgatgccaaggaagtgagcgccgcccaccgggccagatacttctggggcaatctgcctggcatgaacagacccctggccagcaccgtgaacgacaagctggagctgcaggagtgcctggagcacggccggatcgccaagttcagcaaggtgagaaccatcaccacccgaagcaacagcatcaaacaaggcaaggaccagcactttcctgtgttcatgaacgagaaggaggacatcctgtggtgtaccgagatggagagagtgttcgggttcccagtccactacacagatgtcagcaacatgtctagactggccagacagagactgctgggaagaagctggtccgtccctgtgatcagacacctgttcgcccctctgaaggagtacttcgcctgcgtgagcagcggcaacagcaacgccaacagccggggccccagcttctctagcggcctggtgccactgtccctgagagggagccacatgggccccatggagatctacaaaaccgtgagcgcctggaagcggcagcctgtgcgcgtgctgagcctgtttcggaatatcgataaagtcctgaaaagcctgggattcctggagagcggctctggctccggcggtggcaccctgaagtacgtggaggatgtgacaaacgtggtcagacgggatgtggagaagtggggccccttcgatctggtgtacggcagcacccaacccctgggcagctcttgtgaccggtgccctggctggtacatgtttcagttccaccggatcctgcagtacgccctgccgagacaggagtcccagcggccattcttttggattttcatggacaacttgctgctgaccgaggatgaccaggaaactaccactcggttcctgcagaccgaagccgtgaccctgcaggacgtgagaggccgggactaccagaacgccatgcgggtgtggtccaacatccctggactgaaaagcaagcacgcacctctgacccctaaagaagaggagtacctgcaggcccaggtgcggagcagaagcaagctggacgcccctaaggtggatctgctggtgaagaattgcctcctgcccctgagagagtacttcaagtatttcagccagaatagtctgcccctgggaggcagcggcggcggccaccaggacctggtgaccttcaaggacgtggccgtggacttcacccccgaggagtggggccagctggtgcccagccagaaggagctgtacagggacgtgatgctggagaactaccagaacctggtgtggctgggcctggccgtgagcaagcccgacgtgatctaccagctggagcaggtgggcggcacctgggtgcccgagggcgagaccctgaccgtgagctgcagcgacttcgtgaccaggggcggcccaagcagcggcgcccctcctcccagcggcggcagcccagccggctccccaacctctaccgaggagggcacctctgagtccgccacccccgagagcggccctggcacctccaccgagcccagcgagggcagcgcacccggcagccctgccggcagccccacctccacagaggagggaaccagcaccgagcccagcgaaggcagcgccccaggcaccagcaccgagcctagtgagcaggagattaaacggatcaacaagatcagaagaagacttgtgaaagacagcaacaccaagaaggccggcaagacaggccccatgaaaaccctgctggttagagtgatgacacccgatctgagagagcggctggaaaacctgagaaagaagcctgaaaatatcccccagcccatcagcaatacatctagagccaacctgaataagctgctgaccgattacaccgaaatgaagaaggcgatcctgcatgtgtactgggaagagttccagaaggaccctgtgggcctgatgagccgggtggcccagcctgccagcaagaagatcgatcagaacaagctgaaacctgagatggacgagaagggcaacctgaccaccgccggctttgcctgctctcagtgtggccagcccctgttcgtgtacaagctggagcaggtgtctgagaagggcaaggcttacaccaactacttcggacggtgcaatgtggccgagcacgaaaagctgatcctgctggcccagctgaagcccgagaaggatagcgacgaagccgtgacatatagcctgggaaagtttgggcagagggccctggatttctacagcattcatgtgaccaaggagtccacccaccccgtgaagcccctggcccagatcgccggaaacagatacgcctccggacctgtgggaaaggccctgagcgacgcatgtatgggcacaatcgcctccttcctgtctaagtaccaggacatcatcatcgaacaccagaaggtggtgaagggcaaccagaagagactggagagcctgcgggagctggccggcaaggaaaacctggaataccctagcgtgaccctgccacctcagcctcacaccaaggagggcgttgatgcctacaacgaagtgatcgcccgggtgcgaatgtgggtgaacctgaacctgtggcagaagctgaagctaagcagagatgatgccaagcctctgctgagactgaagggattcccttcctttcctctggtcgagagacaggccaacgaagtggactggtgggacatggtgtgtaacgtgaagaagctgatcaacgagaaaaaggaggatggcaaggtgttttggcagaatctggctggctacaagagacaggaagccctgagaccatacctgagcagcgaggaagatcggaagaagggaaagaaattcgctcggtaccagctgggcgacctgctgctgcacctggaaaagaagcacggcgaggactggggaaaggtgtacgacgaggcctgggagcggattgacaagaaagtggaaggcctgagcaagcacatcaagctggaagaggaacggagaagcgaggacgcccagagcaaggccgccctgaccgactggctgcgggctaaggccagcttcgtgatcgagggcctgaaggaggccgacaaggacgagttctgcagatgcgagctgaagctgcagaagtggtacggggacctgcggggaaagcccttcgccatcgaagccgagaacagcatcctggacatcagcggcttcagcaagcagtacaactgtgccttcatctggcagaaggacggcgtgaagaagctgaacctgtacctgatcatcaactacttcaagggcggcaagctgcggttcaagaagatcaaacctgaagccttcgaagccaacagattctacaccgtgatcaacaaaaagagcggcgagatcgtgcccatggaggtgaacttcaacttcgacgaccccaacctgatcatcctgcctctggcctttggcaagagacagggcagagaattcatctggaacgacctgctgtccctggaaaccggcagcctgaagctggccaacggaagagtgatcgagaagacactgtacaacagaagaacccggcaggatgagcctgccctgttcgtggccctgaccttcgagcggcgggaggtcctggactcctccaatatcaaaccaatgaacctgatcggcgtggcaagaggcgaaaacatccccgccgtgatcgccctgaccgaccccgagggctgcccactgagccggtttaaggatagcctgggaaacccaacccacatcctgagaatcggcgagagctataaggagaagcagcggaccatccaggccaagaaggaggtggagcagcggagagccggcggctacagccggaagtacgccagcaaagccaagaatctggcagacgatatggtgagaaacaccgctagagatctgctgtactacgccgtgacccaggatgccatgctgatcttcgccaacctgagccggggcttcggccggcagggcaagcggaccttcatggccgagagacagtacacacggatggaggactggctgaccgccaagctggcctacgagggcctgagcaagacctacctgtccaagacactggcccagtacacctccaagacatgcagcaactgtgggtttaccatcaccagcgccgactacgacagggtgctggagaagctgaagaagacagcaacaggctggatgaccacaattaacggcaaggagctgaaggtggagggccagattacctactacaacagatacaagagacagaacgtagtcaaggacctgtccgtcgagctggatagactgagcgaagaatctgtgaacaacgacatctcctcctggacaaagggcagaagcggagaagctctgagcctcctgaagaaaagattctcccatagacccgtgcaggagaagttcgtgtgcctgaactgcggcttcgagacacacgcagccgagcaagccgccctgaacatcgccagatcctggctgttcctgcggagccaggagtacaagaaataccagacaaacaagacaaccggcaacaccgataagagagccttcgtcgagacctggcagtccttttaccggaagaagcttaaggaggtgtggaaacctgccgtgcggtctggcggatctggcggaggctccaccagccccaagaaaaagagaaaagtctaagctgccttctgcggggcttgccttctggccatgcccttcttctctcccttgcacctgtacctcttggtctttgaataaagcctgagtaggaaggctagcaaaaaaaaaaaaaaaaaaaaaaaaaaaaaaaaaaaaaaaaaaaaaaaaaaaaaaaaaaaaaaaaaaaaaaaaaaaaaaaa

SEQ ID NO: 13512 - RNA, 5803 nt, synthetic construct
  source 1..5803: mol_type = other RNA
aggaaataagagagaaaagaagagtaagaagaaatataagagccaccatggcccctaagaagaagcgtaaagtgagccggatggaacgcctcgtctacgaggtgcggcagaagtgcagaaacatcgaggacatctgcatctcctgcggatctctgaacgtgaccctggagcacccactgttcatcggcggcatgtgccagaactgtaaaaactgttttctggagtgtgcctatcaatacgacgatgacggctaccagagctactgcaccatctgttgcggcggaagagaggtgctgatgtgtggaaataacaactgctgccggtgcttctgcgtggaatgcgtggacctgctggtgggccccggcgccgcccaggccgctattaaggaagatccttggaactgctacatgtgcggccacaagggcacatacggcctgctgagacggagagaggactggcctagcagactgcagatgttcttcgccaataaccacgaccaggagttcgacccccctaaggtgtaccctcccgtccccgccgagaagagaaagcccatccgggtcctgagcctgttcgatggcatcgccaccggtctgctggtgctgaaggacctgggcatccaggtggataggtacattgcctccgaggtgtgcgaggactccatcaccgtgggaatggtgcgtcatcagggcaagatcatgtacgtgggcgacgtgcggagcgtgacacagaagcatatccaggagtggggccctttcgacctggtgatcggcggcagcccttgcaatgacctgagcatcgtgaacccagcccggaagggcctgtacgagggaaccggcagactgttcttcgagttttacagactgctgcacgacgcccggcctaaggaaggcgacgaccggcccttcttttggctgttcgagaatgtggtggccatgggagtcagcgacaagcgggatattagccggttcctggagagcaaccccgtgatgatcgatgccaaggaagtgagcgccgcccaccgggccagatacttctggggcaatctgcctggcatgaacagacccctggccagcaccgtgaacgacaagctggagctgcaggagtgcctggagcacggccggatcgccaagttcagcaaggtgagaaccatcaccacccgaagcaacagcatcaaacaaggcaaggaccagcactttcctgtgttcatgaacgagaaggaggacatcctgtggtgtaccgagatggagagagtgttcgggttcccagtccactacacagatgtcagcaacatgtctagactggccagacagagactgctgggaagaagctggtccgtccctgtgatcagacacctgttcgcccctctgaaggagtacttcgcctgcgtgagcagcggcaacagcaacgccaacagccggggccccagcttctctagcggcctggtgccactgtccctgagagggagccacatgggccccatggagatctacaaaaccgtgagcgcctggaagcggcagcctgtgcgcgtgctgagcctgtttcggaatatcgataaagtcctgaaaagcctgggattcctggagagcggctctggctccggcggtggcaccctgaagtacgtggaggatgtgacaaacgtggtcagacgggatgtggagaagtggggccccttcgatctggtgtacggcagcacccaacccctgggcagctcttgtgaccggtgccctggctggtacatgtttcagttccaccggatcctgcagtacgccctgccgagacaggagtcccagcggccattcttttggattttcatggacaacttgctgctgaccgaggatgaccaggaaactaccactcggttcctgcagaccgaagccgtgaccctgcaggacgtgagaggccgggactaccagaacgccatgcgggtgtggtccaacatccctggactgaaaagcaagcacgcacctctgacccctaaagaagaggagtacctgcaggcccaggtgcggagcagaagcaagctggacgcccctaaggtggatctgctggtgaagaattgcctcctgcccctgagagagtacttcaagtatttcagccagaatagtctgcccctgggaggcagcggcggcggcgtgaccttcgaggacgtggccgtgaacttcagcctggaggagtgggccctgctggacctgagccagaagaagctgtacagggacgtgatgcaggagaccttcaggaacctggccagcgtgggcgagaagtgggacaaccacaacatcgaggactggaacaagacccagggcaggaagctgaggagccacatggtggagaagctgagcgagagcaaggagggcggccagcacggcgagaccgccagccagatccccaacctgggcggcccaagcagcggcgcccctcctcccagcggcggcagcccagccggctccccaacctctaccgaggagggcacctctgagtccgccacccccgagagcggccctggcacctccaccgagcccagcgagggcagcgcacccggcagccctgccggcagccccacctccacagaggagggaaccagcaccgagcccagcgaaggcagcgccccaggcaccagcaccgagcctagtgagcaggagattaaacggatcaacaagatcagaagaagacttgtgaaagacagcaacaccaagaaggccggcaagacaggccccatgaaaaccctgctggttagagtgatgacacccgatctgagagagcggctggaaaacctgagaaagaagcctgaaaatatcccccagcccatcagcaatacatctagagccaacctgaataagctgctgaccgattacaccgaaatgaagaaggcgatcctgcatgtgtactgggaagagttccagaaggaccctgtgggcctgatgagccgggtggcccagcctgccagcaagaagatcgatcagaacaagctgaaacctgagatggacgagaagggcaacctgaccaccgccggctttgcctgctctcagtgtggccagcccctgttcgtgtacaagctggagcaggtgtctgagaagggcaaggcttacaccaactacttcggacggtgcaatgtggccgagcacgaaaagctgatcctgctggcccagctgaagcccgagaaggatagcgacgaagccgtgacatatagcctgggaaagtttgggcagagggccctggatttctacagcattcatgtgaccaaggagtccacccaccccgtgaagcccctggcccagatcgccggaaacagatacgcctccggacctgtgggaaaggccctgagcgacgcatgtatgggcacaatcgcctccttcctgtctaagtaccaggacatcatcatcgaacaccagaaggtggtgaagggcaaccagaagagactggagagcctgcgggagctggccggcaaggaaaacctggaataccctagcgtgaccctgccacctcagcctcacaccaaggagggcgttgatgcctacaacgaagtgatcgcccgggtgcgaatgtgggtgaacctgaacctgtggcagaagctgaagctaagcagagatgatgccaagcctctgctgagactgaagggattcccttcctttcctctggtcgagagacaggccaacgaagtggactggtgggacatggtgtgtaacgtgaagaagctgatcaacgagaaaaaggaggatggcaaggtgttttggcagaatctggctggctacaagagacaggaagccctgagaccatacctgagcagcgaggaagatcggaagaagggaaagaaattcgctcggtaccagctgggcgacctgctgctgcacctggaaaagaagcacggcgaggactggggaaaggtgtacgacgaggcctgggagcggattgacaagaaagtggaaggcctgagcaagcacatcaagctggaagaggaacggagaagcgaggacgcccagagcaaggccgccctgaccgactggctgcgggctaaggccagcttcgtgatcgagggcctgaaggaggccgacaaggacgagttctgcagatgcgagctgaagctgcagaagtggtacggggacctgcggggaaagcccttcgccatcgaagccgagaacagcatcctggacatcagcggcttcagcaagcagtacaactgtgccttcatctggcagaaggacggcgtgaagaagctgaacctgtacctgatcatcaactacttcaagggcggcaagctgcggttcaagaagatcaaacctgaagccttcgaagccaacagattctacaccgtgatcaacaaaaagagcggcgagatcgtgcccatggaggtgaacttcaacttcgacgaccccaacctgatcatcctgcctctggcctttggcaagagacagggcagagaattcatctggaacgacctgctgtccctggaaaccggcagcctgaagctggccaacggaagagtgatcgagaagacactgtacaacagaagaacccggcaggatgagcctgccctgttcgtggccctgaccttcgagcggcgggaggtcctggactcctccaatatcaaaccaatgaacctgatcggcgtggcaagaggcgaaaacatccccgccgtgatcgccctgaccgaccccgagggctgcccactgagccggtttaaggatagcctgggaaacccaacccacatcctgagaatcggcgagagctataaggagaagcagcggaccatccaggccaagaaggaggtggagcagcggagagccggcggctacagccggaagtacgccagcaaagccaagaatctggcagacgatatggtgagaaacaccgctagagatctgctgtactacgccgtgacccaggatgccatgctgatcttcgccaacctgagccggggcttcggccggcagggcaagcggaccttcatggccgagagacagtacacacggatggaggactggctgaccgccaagctggcctacgagggcctgagcaagacctacctgtccaagacactggcccagtacacctccaagacatgcagcaactgtgggtttaccatcaccagcgccgactacgacagggtgctggagaagctgaagaagacagcaacaggctggatgaccacaattaacggcaaggagctgaaggtggagggccagattacctactacaacagatacaagagacagaacgtagtcaaggacctgtccgtcgagctggatagactgagcgaagaatctgtgaacaacgacatctcctcctggacaaagggcagaagcggagaagctctgagcctcctgaagaaaagattctcccatagacccgtgcaggagaagttcgtgtgcctgaactgcggcttcgagacacacgcagccgagcaagccgccctgaacatcgccagatcctggctgttcctgcggagccaggagtacaagaaataccagacaaacaagacaaccggcaacaccgataagagagccttcgtcgagacctggcagtccttttaccggaagaagcttaaggaggtgtggaaacctgccgtgcggtctggcggatctggcggaggctccaccagccccaagaaaaagagaaaagtctaagctgccttctgcggggcttgccttctggccatgcccttcttctctcccttgcacctgtacctcttggtctttgaataaagcctgagtaggaaggctagcaaaaaaaaaaaaaaaaaaaaaaaaaaaaaaaaaaaaaaaaaaaaaaaaaaaaaaaaaaaaaaaaaaaaaaaaaaaaaaaa

SEQ ID NO: 13513 - RNA, 5785 nt, synthetic construct
  source 1..5785: mol_type = other RNA
aggaaataagagagaaaagaagagtaagaagaaatataagagccaccatggcccctaagaagaagcgtaaagtgagccggatggaacgcctcgtctacgaggtgcggcagaagtgcagaaacatcgaggacatctgcatctcctgcggatctctgaacgtgaccctggagcacccactgttcatcggcggcatgtgccagaactgtaaaaactgttttctggagtgtgcctatcaatacgacgatgacggctaccagagctactgcaccatctgttgcggcggaagagaggtgctgatgtgtggaaataacaactgctgccggtgcttctgcgtggaatgcgtggacctgctggtgggccccggcgccgcccaggccgctattaaggaagatccttggaactgctacatgtgcggccacaagggcacatacggcctgctgagacggagagaggactggcctagcagactgcagatgttcttcgccaataaccacgaccaggagttcgacccccctaaggtgtaccctcccgtccccgccgagaagagaaagcccatccgggtcctgagcctgttcgatggcatcgccaccggtctgctggtgctgaaggacctgggcatccaggtggataggtacattgcctccgaggtgtgcgaggactccatcaccgtgggaatggtgcgtcatcagggcaagatcatgtacgtgggcgacgtgcggagcgtgacacagaagcatatccaggagtggggccctttcgacctggtgatcggcggcagcccttgcaatgacctgagcatcgtgaacccagcccggaagggcctgtacgagggaaccggcagactgttcttcgagttttacagactgctgcacgacgcccggcctaaggaaggcgacgaccggcccttcttttggctgttcgagaatgtggtggccatgggagtcagcgacaagcgggatattagccggttcctggagagcaaccccgtgatgatcgatgccaaggaagtgagcgccgcccaccgggccagatacttctggggcaatctgcctggcatgaacagacccctggccagcaccgtgaacgacaagctggagctgcaggagtgcctggagcacggccggatcgccaagttcagcaaggtgagaaccatcaccacccgaagcaacagcatcaaacaaggcaaggaccagcactttcctgtgttcatgaacgagaaggaggacatcctgtggtgtaccgagatggagagagtgttcgggttcccagtccactacacagatgtcagcaacatgtctagactggccagacagagactgctgggaagaagctggtccgtccctgtgatcagacacctgttcgcccctctgaaggagtacttcgcctgcgtgagcagcggcaacagcaacgccaacagccggggccccagcttctctagcggcctggtgccactgtccctgagagggagccacatgggccccatggagatctacaaaaccgtgagcgcctggaagcggcagcctgtgcgcgtgctgagcctgtttcggaatatcgataaagtcctgaaaagcctgggattcctggagagcggctctggctccggcggtggcaccctgaagtacgtggaggatgtgacaaacgtggtcagacgggatgtggagaagtggggccccttcgatctggtgtacggcagcacccaacccctgggcagctcttgtgaccggtgccctggctggtacatgtttcagttccaccggatcctgcagtacgccctgccgagacaggagtcccagcggccattcttttggattttcatggacaacttgctgctgaccgaggatgaccaggaaactaccactcggttcctgcagaccgaagccgtgaccctgcaggacgtgagaggccgggactaccagaacgccatgcgggtgtggtccaacatccctggactgaaaagcaagcacgcacctctgacccctaaagaagaggagtacctgcaggcccaggtgcggagcagaagcaagctggacgcccctaaggtggatctgctggtgaagaattgcctcctgcccctgagagagtacttcaagtatttcagccagaatagtctgcccctgggaggcagcggcggcggcagccaggtgagcctgaccttcgaggacgtggccgtgctgttcaccagggacgagtggaagaagctggtgcccagccagaggagcctgtacagggaggtgatgctggagaactacagcaacctggccagcctggccggcttccccttcaccaagcccaaggtgatcagcctgctgcagcagggcgaggacccctggaaggtggaggaggagggccccggcggcttcagcctgggcctgaagtgcggcggcccaagcagcggcgcccctcctcccagcggcggcagcccagccggctccccaacctctaccgaggagggcacctctgagtccgccacccccgagagcggccctggcacctccaccgagcccagcgagggcagcgcacccggcagccctgccggcagccccacctccacagaggagggaaccagcaccgagcccagcgaaggcagcgccccaggcaccagcaccgagcctagtgagcaggagattaaacggatcaacaagatcagaagaagacttgtgaaagacagcaacaccaagaaggccggcaagacaggccccatgaaaaccctgctggttagagtgatgacacccgatctgagagagcggctggaaaacctgagaaagaagcctgaaaatatcccccagcccatcagcaatacatctagagccaacctgaataagctgctgaccgattacaccgaaatgaagaaggcgatcctgcatgtgtactgggaagagttccagaaggaccctgtgggcctgatgagccgggtggcccagcctgccagcaagaagatcgatcagaacaagctgaaacctgagatggacgagaagggcaacctgaccaccgccggctttgcctgctctcagtgtggccagcccctgttcgtgtacaagctggagcaggtgtctgagaagggcaaggcttacaccaactacttcggacggtgcaatgtggccgagcacgaaaagctgatcctgctggcccagctgaagcccgagaaggatagcgacgaagccgtgacatatagcctgggaaagtttgggcagagggccctggatttctacagcattcatgtgaccaaggagtccacccaccccgtgaagcccctggcccagatcgccggaaacagatacgcctccggacctgtgggaaaggccctgagcgacgcatgtatgggcacaatcgcctccttcctgtctaagtaccaggacatcatcatcgaacaccagaaggtggtgaagggcaaccagaagagactggagagcctgcgggagctggccggcaaggaaaacctggaataccctagcgtgaccctgccacctcagcctcacaccaaggagggcgttgatgcctacaacgaagtgatcgcccgggtgcgaatgtgggtgaacctgaacctgtggcagaagctgaagctaagcagagatgatgccaagcctctgctgagactgaagggattcccttcctttcctctggtcgagagacaggccaacgaagtggactggtgggacatggtgtgtaacgtgaagaagctgatcaacgagaaaaaggaggatggcaaggtgttttggcagaatctggctggctacaagagacaggaagccctgagaccatacctgagcagcgaggaagatcggaagaagggaaagaaattcgctcggtaccagctgggcgacctgctgctgcacctggaaaagaagcacggcgaggactggggaaaggtgtacgacgaggcctgggagcggattgacaagaaagtggaaggcctgagcaagcacatcaagctggaagaggaacggagaagcgaggacgcccagagcaaggccgccctgaccgactggctgcgggctaaggccagcttcgtgatcgagggcctgaaggaggccgacaaggacgagttctgcagatgcgagctgaagctgcagaagtggtacggggacctgcggggaaagcccttcgccatcgaagccgagaacagcatcctggacatcagcggcttcagcaagcagtacaactgtgccttcatctggcagaaggacggcgtgaagaagctgaacctgtacctgatcatcaactacttcaagggcggcaagctgcggttcaagaagatcaaacctgaagccttcgaagccaacagattctacaccgtgatcaacaaaaagagcggcgagatcgtgcccatggaggtgaacttcaacttcgacgaccccaacctgatcatcctgcctctggcctttggcaagagacagggcagagaattcatctggaacgacctgctgtccctggaaaccggcagcctgaagctggccaacggaagagtgatcgagaagacactgtacaacagaagaacccggcaggatgagcctgccctgttcgtggccctgaccttcgagcggcgggaggtcctggactcctccaatatcaaaccaatgaacctgatcggcgtggcaagaggcgaaaacatccccgccgtgatcgccctgaccgaccccgagggctgcccactgagccggtttaaggatagcctgggaaacccaacccacatcctgagaatcggcgagagctataaggagaagcagcggaccatccaggccaagaaggaggtggagcagcggagagccggcggctacagccggaagtacgccagcaaagccaagaatctggcagacgatatggtgagaaacaccgctagagatctgctgtactacgccgtgacccaggatgccatgctgatcttcgccaacctgagccggggcttcggccggcagggcaagcggaccttcatggccgagagacagtacacacggatggaggactggctgaccgccaagctggcctacgagggcctgagcaagacctacctgtccaagacactggcccagtacacctccaagacatgcagcaactgtgggtttaccatcaccagcgccgactacgacagggtgctggagaagctgaagaagacagcaacaggctggatgaccacaattaacggcaaggagctgaaggtggagggccagattacctactacaacagatacaagagacagaacgtagtcaaggacctgtccgtcgagctggatagactgagcgaagaatctgtgaacaacgacatctcctcctggacaaagggcagaagcggagaagctctgagcctcctgaagaaaagattctcccatagacccgtgcaggagaagttcgtgtgcctgaactgcggcttcgagacacacgcagccgagcaagccgccctgaacatcgccagatcctggctgttcctgcggagccaggagtacaagaaataccagacaaacaagacaaccggcaacaccgataagagagccttcgtcgagacctggcagtccttttaccggaagaagcttaaggaggtgtggaaacctgccgtgcggtctggcggatctggcggaggctccaccagccccaagaaaaagagaaaagtctaagctgccttctgcggggcttgccttctggccatgcccttcttctctcccttgcacctgtacctcttggtctttgaataaagcctgagtaggaaggctagcaaaaaaaaaaaaaaaaaaaaaaaaaaaaaaaaaaaaaaaaaaaaaaaaaaaaaaaaaaaaaaaaaaaaaaaaaaaaaaaa

SEQ ID NO: 13514 - RNA, 5785 nt, synthetic construct
  source 1..5785: mol_type = other RNA
aggaaataagagagaaaagaagagtaagaagaaatataagagccaccatggcccctaagaagaagcgtaaagtgagccggatggaacgcctcgtctacgaggtgcggcagaagtgcagaaacatcgaggacatctgcatctcctgcggatctctgaacgtgaccctggagcacccactgttcatcggcggcatgtgccagaactgtaaaaactgttttctggagtgtgcctatcaatacgacgatgacggctaccagagctactgcaccatctgttgcggcggaagagaggtgctgatgtgtggaaataacaactgctgccggtgcttctgcgtggaatgcgtggacctgctggtgggccccggcgccgcccaggccgctattaaggaagatccttggaactgctacatgtgcggccacaagggcacatacggcctgctgagacggagagaggactggcctagcagactgcagatgttcttcgccaataaccacgaccaggagttcgacccccctaaggtgtaccctcccgtccccgccgagaagagaaagcccatccgggtcctgagcctgttcgatggcatcgccaccggtctgctggtgctgaaggacctgggcatccaggtggataggtacattgcctccgaggtgtgcgaggactccatcaccgtgggaatggtgcgtcatcagggcaagatcatgtacgtgggcgacgtgcggagcgtgacacagaagcatatccaggagtggggccctttcgacctggtgatcggcggcagcccttgcaatgacctgagcatcgtgaacccagcccggaagggcctgtacgagggaaccggcagactgttcttcgagttttacagactgctgcacgacgcccggcctaaggaaggcgacgaccggcccttcttttggctgttcgagaatgtggtggccatgggagtcagcgacaagcgggatattagccggttcctggagagcaaccccgtgatgatcgatgccaaggaagtgagcgccgcccaccgggccagatacttctggggcaatctgcctggcatgaacagacccctggccagcaccgtgaacgacaagctggagctgcaggagtgcctggagcacggccggatcgccaagttcagcaaggtgagaaccatcaccacccgaagcaacagcatcaaacaaggcaaggaccagcactttcctgtgttcatgaacgagaaggaggacatcctgtggtgtaccgagatggagagagtgttcgggttcccagtccactacacagatgtcagcaacatgtctagactggccagacagagactgctgggaagaagctggtccgtccctgtgatcagacacctgttcgcccctctgaaggagtacttcgcctgcgtgagcagcggcaacagcaacgccaacagccggggccccagcttctctagcggcctggtgccactgtccctgagagggagccacatgggccccatggagatctacaaaaccgtgagcgcctggaagcggcagcctgtgcgcgtgctgagcctgtttcggaatatcgataaagtcctgaaaagcctgggattcctggagagcggctctggctccggcggtggcaccctgaagtacgtggaggatgtgacaaacgtggtcagacgggatgtggagaagtggggccccttcgatctggtgtacggcagcacccaacccctgggcagctcttgtgaccggtgccctggctggtacatgtttcagttccaccggatcctgcagtacgccctgccgagacaggagtcccagcggccattcttttggattttcatggacaacttgctgctgaccgaggatgaccaggaaactaccactcggttcctgcagaccgaagccgtgaccctgcaggacgtgagaggccgggactaccagaacgccatgcgggtgtggtccaacatccctggactgaaaagcaagcacgcacctctgacccctaaagaagaggagtacctgcaggcccaggtgcggagcagaagcaagctggacgcccctaaggtggatctgctggtgaagaattgcctcctgcccctgagagagtacttcaagtatttcagccagaatagtctgcccctgggaggcagcggcggcggcccccaggagcccgtgaccttcgccgacgtggccgtgctgttcacccccgaggagtggctgttcctggacagcgcccagaagagcctgtacagggacgtgatgctggagaactacaggaacctggccagcgtgggcgaccagctgtgcaagaccaggatgagcagccacatggagcagagggaggagctgtgcgtgaccgagaggggcgtgttccccggcgcccagctgggcccccacctgcagggcggcccaagcagcggcgcccctcctcccagcggcggcagcccagccggctccccaacctctaccgaggagggcacctctgagtccgccacccccgagagcggccctggcacctccaccgagcccagcgagggcagcgcacccggcagccctgccggcagccccacctccacagaggagggaaccagcaccgagcccagcgaaggcagcgccccaggcaccagcaccgagcctagtgagcaggagattaaacggatcaacaagatcagaagaagacttgtgaaagacagcaacaccaagaaggccggcaagacaggccccatgaaaaccctgctggttagagtgatgacacccgatctgagagagcggctggaaaacctgagaaagaagcctgaaaatatcccccagcccatcagcaatacatctagagccaacctgaataagctgctgaccgattacaccgaaatgaagaaggcgatcctgcatgtgtactgggaagagttccagaaggaccctgtgggcctgatgagccgggtggcccagcctgccagcaagaagatcgatcagaacaagctgaaacctgagatggacgagaagggcaacctgaccaccgccggctttgcctgctctcagtgtggccagcccctgttcgtgtacaagctggagcaggtgtctgagaagggcaaggcttacaccaactacttcggacggtgcaatgtggccgagcacgaaaagctgatcctgctggcccagctgaagcccgagaaggatagcgacgaagccgtgacatatagcctgggaaagtttgggcagagggccctggatttctacagcattcatgtgaccaaggagtccacccaccccgtgaagcccctggcccagatcgccggaaacagatacgcctccggacctgtgggaaaggccctgagcgacgcatgtatgggcacaatcgcctccttcctgtctaagtaccaggacatcatcatcgaacaccagaaggtggtgaagggcaaccagaagagactggagagcctgcgggagctggccggcaaggaaaacctggaataccctagcgtgaccctgccacctcagcctcacaccaaggagggcgttgatgcctacaacgaagtgatcgcccgggtgcgaatgtgggtgaacctgaacctgtggcagaagctgaagctaagcagagatgatgccaagcctctgctgagactgaagggattcccttcctttcctctggtcgagagacaggccaacgaagtggactggtgggacatggtgtgtaacgtgaagaagctgatcaacgagaaaaaggaggatggcaaggtgttttggcagaatctggctggctacaagagacaggaagccctgagaccatacctgagcagcgaggaagatcggaagaagggaaagaaattcgctcggtaccagctgggcgacctgctgctgcacctggaaaagaagcacggcgaggactggggaaaggtgtacgacgaggcctgggagcggattgacaagaaagtggaaggcctgagcaagcacatcaagctggaagaggaacggagaagcgaggacgcccagagcaaggccgccctgaccgactggctgcgggctaaggccagcttcgtgatcgagggcctgaaggaggccgacaaggacgagttctgcagatgcgagctgaagctgcagaagtggtacggggacctgcggggaaagcccttcgccatcgaagccgagaacagcatcctggacatcagcggcttcagcaagcagtacaactgtgccttcatctggcagaaggacggcgtgaagaagctgaacctgtacctgatcatcaactacttcaagggcggcaagctgcggttcaagaagatcaaacctgaagccttcgaagccaacagattctacaccgtgatcaacaaaaagagcggcgagatcgtgcccatggaggtgaacttcaacttcgacgaccccaacctgatcatcctgcctctggcctttggcaagagacagggcagagaattcatctggaacgacctgctgtccctggaaaccggcagcctgaagctggccaacggaagagtgatcgagaagacactgtacaacagaagaacccggcaggatgagcctgccctgttcgtggccctgaccttcgagcggcgggaggtcctggactcctccaatatcaaaccaatgaacctgatcggcgtggcaagaggcgaaaacatccccgccgtgatcgccctgaccgaccccgagggctgcccactgagccggtttaaggatagcctgggaaacccaacccacatcctgagaatcggcgagagctataaggagaagcagcggaccatccaggccaagaaggaggtggagcagcggagagccggcggctacagccggaagtacgccagcaaagccaagaatctggcagacgatatggtgagaaacaccgctagagatctgctgtactacgccgtgacccaggatgccatgctgatcttcgccaacctgagccggggcttcggccggcagggcaagcggaccttcatggccgagagacagtacacacggatggaggactggctgaccgccaagctggcctacgagggcctgagcaagacctacctgtccaagacactggcccagtacacctccaagacatgcagcaactgtgggtttaccatcaccagcgccgactacgacagggtgctggagaagctgaagaagacagcaacaggctggatgaccacaattaacggcaaggagctgaaggtggagggccagattacctactacaacagatacaagagacagaacgtagtcaaggacctgtccgtcgagctggatagactgagcgaagaatctgtgaacaacgacatctcctcctggacaaagggcagaagcggagaagctctgagcctcctgaagaaaagattctcccatagacccgtgcaggagaagttcgtgtgcctgaactgcggcttcgagacacacgcagccgagcaagccgccctgaacatcgccagatcctggctgttcctgcggagccaggagtacaagaaataccagacaaacaagacaaccggcaacaccgataagagagccttcgtcgagacctggcagtccttttaccggaagaagcttaaggaggtgtggaaacctgccgtgcggtctggcggatctggcggaggctccaccagccccaagaaaaagagaaaagtctaagctgccttctgcggggcttgccttctggccatgcccttcttctctcccttgcacctgtacctcttggtctttgaataaagcctgagtaggaaggctagcaaaaaaaaaaaaaaaaaaaaaaaaaaaaaaaaaaaaaaaaaaaaaaaaaaaaaaaaaaaaaaaaaaaaaaaaaaaaaaaa

SEQ ID NO: 13515 - RNA, 5785 nt, synthetic construct
  source 1..5785: mol_type = other RNA
aggaaataagagagaaaagaagagtaagaagaaatataagagccaccatggcccctaagaagaagcgtaaagtgagccggatggaacgcctcgtctacgaggtgcggcagaagtgcagaaacatcgaggacatctgcatctcctgcggatctctgaacgtgaccctggagcacccactgttcatcggcggcatgtgccagaactgtaaaaactgttttctggagtgtgcctatcaatacgacgatgacggctaccagagctactgcaccatctgttgcggcggaagagaggtgctgatgtgtggaaataacaactgctgccggtgcttctgcgtggaatgcgtggacctgctggtgggccccggcgccgcccaggccgctattaaggaagatccttggaactgctacatgtgcggccacaagggcacatacggcctgctgagacggagagaggactggcctagcagactgcagatgttcttcgccaataaccacgaccaggagttcgacccccctaaggtgtaccctcccgtccccgccgagaagagaaagcccatccgggtcctgagcctgttcgatggcatcgccaccggtctgctggtgctgaaggacctgggcatccaggtggataggtacattgcctccgaggtgtgcgaggactccatcaccgtgggaatggtgcgtcatcagggcaagatcatgtacgtgggcgacgtgcggagcgtgacacagaagcatatccaggagtggggccctttcgacctggtgatcggcggcagcccttgcaatgacctgagcatcgtgaacccagcccggaagggcctgtacgagggaaccggcagactgttcttcgagttttacagactgctgcacgacgcccggcctaaggaaggcgacgaccggcccttcttttggctgttcgagaatgtggtggccatgggagtcagcgacaagcgggatattagccggttcctggagagcaaccccgtgatgatcgatgccaaggaagtgagcgccgcccaccgggccagatacttctggggcaatctgcctggcatgaacagacccctggccagcaccgtgaacgacaagctggagctgcaggagtgcctggagcacggccggatcgccaagttcagcaaggtgagaaccatcaccacccgaagcaacagcatcaaacaaggcaaggaccagcactttcctgtgttcatgaacgagaaggaggacatcctgtggtgtaccgagatggagagagtgttcgggttcccagtccactacacagatgtcagcaacatgtctagactggccagacagagactgctgggaagaagctggtccgtccctgtgatcagacacctgttcgcccctctgaaggagtacttcgcctgcgtgagcagcggcaacagcaacgccaacagccggggccccagcttctctagcggcctggtgccactgtccctgagagggagccacatgggccccatggagatctacaaaaccgtgagcgcctggaagcggcagcctgtgcgcgtgctgagcctgtttcggaatatcgataaagtcctgaaaagcctgggattcctggagagcggctctggctccggcggtggcaccctgaagtacgtggaggatgtgacaaacgtggtcagacgggatgtggagaagtggggccccttcgatctggtgtacggcagcacccaacccctgggcagctcttgtgaccggtgccctggctggtacatgtttcagttccaccggatcctgcagtacgccctgccgagacaggagtcccagcggccattcttttggattttcatggacaacttgctgctgaccgaggatgaccaggaaactaccactcggttcctgcagaccgaagccgtgaccctgcaggacgtgagaggccgggactaccagaacgccatgcgggtgtggtccaacatccctggactgaaaagcaagcacgcacctctgacccctaaagaagaggagtacctgcaggcccaggtgcggagcagaagcaagctggacgcccctaaggtggatctgctggtgaagaattgcctcctgcccctgagagagtacttcaagtatttcagccagaatagtctgcccctgggaggcagcggcggcggccaggaccccagcgccgagaggctgatggaggaggtgcccgtggtgttcgaggagctgcccgtggtgttcgaggacgtggccgtgtacttcaccagggaggagtggggcatgctggacaagaggcagaaggagctgtacagggacgtgatgaggatgaactacgagctgctggccagcctgggccccgccgccgccaagcccgacctgatcagcaagctggagaggagggccgccccctggatcggcggcccaagcagcggcgcccctcctcccagcggcggcagcccagccggctccccaacctctaccgaggagggcacctctgagtccgccacccccgagagcggccctggcacctccaccgagcccagcgagggcagcgcacccggcagccctgccggcagccccacctccacagaggagggaaccagcaccgagcccagcgaaggcagcgccccaggcaccagcaccgagcctagtgagcaggagattaaacggatcaacaagatcagaagaagacttgtgaaagacagcaacaccaagaaggccggcaagacaggccccatgaaaaccctgctggttagagtgatgacacccgatctgagagagcggctggaaaacctgagaaagaagcctgaaaatatcccccagcccatcagcaatacatctagagccaacctgaataagctgctgaccgattacaccgaaatgaagaaggcgatcctgcatgtgtactgggaagagttccagaaggaccctgtgggcctgatgagccgggtggcccagcctgccagcaagaagatcgatcagaacaagctgaaacctgagatggacgagaagggcaacctgaccaccgccggctttgcctgctctcagtgtggccagcccctgttcgtgtacaagctggagcaggtgtctgagaagggcaaggcttacaccaactacttcggacggtgcaatgtggccgagcacgaaaagctgatcctgctggcccagctgaagcccgagaaggatagcgacgaagccgtgacatatagcctgggaaagtttgggcagagggccctggatttctacagcattcatgtgaccaaggagtccacccaccccgtgaagcccctggcccagatcgccggaaacagatacgcctccggacctgtgggaaaggccctgagcgacgcatgtatgggcacaatcgcctccttcctgtctaagtaccaggacatcatcatcgaacaccagaaggtggtgaagggcaaccagaagagactggagagcctgcgggagctggccggcaaggaaaacctggaataccctagcgtgaccctgccacctcagcctcacaccaaggagggcgttgatgcctacaacgaagtgatcgcccgggtgcgaatgtgggtgaacctgaacctgtggcagaagctgaagctaagcagagatgatgccaagcctctgctgagactgaagggattcccttcctttcctctggtcgagagacaggccaacgaagtggactggtgggacatggtgtgtaacgtgaagaagctgatcaacgagaaaaaggaggatggcaaggtgttttggcagaatctggctggctacaagagacaggaagccctgagaccatacctgagcagcgaggaagatcggaagaagggaaagaaattcgctcggtaccagctgggcgacctgctgctgcacctggaaaagaagcacggcgaggactggggaaaggtgtacgacgaggcctgggagcggattgacaagaaagtggaaggcctgagcaagcacatcaagctggaagaggaacggagaagcgaggacgcccagagcaaggccgccctgaccgactggctgcgggctaaggccagcttcgtgatcgagggcctgaaggaggccgacaaggacgagttctgcagatgcgagctgaagctgcagaagtggtacggggacctgcggggaaagcccttcgccatcgaagccgagaacagcatcctggacatcagcggcttcagcaagcagtacaactgtgccttcatctggcagaaggacggcgtgaagaagctgaacctgtacctgatcatcaactacttcaagggcggcaagctgcggttcaagaagatcaaacctgaagccttcgaagccaacagattctacaccgtgatcaacaaaaagagcggcgagatcgtgcccatggaggtgaacttcaacttcgacgaccccaacctgatcatcctgcctctggcctttggcaagagacagggcagagaattcatctggaacgacctgctgtccctggaaaccggcagcctgaagctggccaacggaagagtgatcgagaagacactgtacaacagaagaacccggcaggatgagcctgccctgttcgtggccctgaccttcgagcggcgggaggtcctggactcctccaatatcaaaccaatgaacctgatcggcgtggcaagaggcgaaaacatccccgccgtgatcgccctgaccgaccccgagggctgcccactgagccggtttaaggatagcctgggaaacccaacccacatcctgagaatcggcgagagctataaggagaagcagcggaccatccaggccaagaaggaggtggagcagcggagagccggcggctacagccggaagtacgccagcaaagccaagaatctggcagacgatatggtgagaaacaccgctagagatctgctgtactacgccgtgacccaggatgccatgctgatcttcgccaacctgagccggggcttcggccggcagggcaagcggaccttcatggccgagagacagtacacacggatggaggactggctgaccgccaagctggcctacgagggcctgagcaagacctacctgtccaagacactggcccagtacacctccaagacatgcagcaactgtgggtttaccatcaccagcgccgactacgacagggtgctggagaagctgaagaagacagcaacaggctggatgaccacaattaacggcaaggagctgaaggtggagggccagattacctactacaacagatacaagagacagaacgtagtcaaggacctgtccgtcgagctggatagactgagcgaagaatctgtgaacaacgacatctcctcctggacaaagggcagaagcggagaagctctgagcctcctgaagaaaagattctcccatagacccgtgcaggagaagttcgtgtgcctgaactgcggcttcgagacacacgcagccgagcaagccgccctgaacatcgccagatcctggctgttcctgcggagccaggagtacaagaaataccagacaaacaagacaaccggcaacaccgataagagagccttcgtcgagacctggcagtccttttaccggaagaagcttaaggaggtgtggaaacctgccgtgcggtctggcggatctggcggaggctccaccagccccaagaaaaagagaaaagtctaagctgccttctgcggggcttgccttctggccatgcccttcttctctcccttgcacctgtacctcttggtctttgaataaagcctgagtaggaaggctagcaaaaaaaaaaaaaaaaaaaaaaaaaaaaaaaaaaaaaaaaaaaaaaaaaaaaaaaaaaaaaaaaaaaaaaaaaaaaaaaa

SEQ ID NO: 13516 - RNA, 5785 nt, synthetic construct
  source 1..5785: mol_type = other RNA
aggaaataagagagaaaagaagagtaagaagaaatataagagccaccatggcccctaagaagaagcgtaaagtgagccggatggaacgcctcgtctacgaggtgcggcagaagtgcagaaacatcgaggacatctgcatctcctgcggatctctgaacgtgaccctggagcacccactgttcatcggcggcatgtgccagaactgtaaaaactgttttctggagtgtgcctatcaatacgacgatgacggctaccagagctactgcaccatctgttgcggcggaagagaggtgctgatgtgtggaaataacaactgctgccggtgcttctgcgtggaatgcgtggacctgctggtgggccccggcgccgcccaggccgctattaaggaagatccttggaactgctacatgtgcggccacaagggcacatacggcctgctgagacggagagaggactggcctagcagactgcagatgttcttcgccaataaccacgaccaggagttcgacccccctaaggtgtaccctcccgtccccgccgagaagagaaagcccatccgggtcctgagcctgttcgatggcatcgccaccggtctgctggtgctgaaggacctgggcatccaggtggataggtacattgcctccgaggtgtgcgaggactccatcaccgtgggaatggtgcgtcatcagggcaagatcatgtacgtgggcgacgtgcggagcgtgacacagaagcatatccaggagtggggccctttcgacctggtgatcggcggcagcccttgcaatgacctgagcatcgtgaacccagcccggaagggcctgtacgagggaaccggcagactgttcttcgagttttacagactgctgcacgacgcccggcctaaggaaggcgacgaccggcccttcttttggctgttcgagaatgtggtggccatgggagtcagcgacaagcgggatattagccggttcctggagagcaaccccgtgatgatcgatgccaaggaagtgagcgccgcccaccgggccagatacttctggggcaatctgcctggcatgaacagacccctggccagcaccgtgaacgacaagctggagctgcaggagtgcctggagcacggccggatcgccaagttcagcaaggtgagaaccatcaccacccgaagcaacagcatcaaacaaggcaaggaccagcactttcctgtgttcatgaacgagaaggaggacatcctgtggtgtaccgagatggagagagtgttcgggttcccagtccactacacagatgtcagcaacatgtctagactggccagacagagactgctgggaagaagctggtccgtccctgtgatcagacacctgttcgcccctctgaaggagtacttcgcctgcgtgagcagcggcaacagcaacgccaacagccggggccccagcttctctagcggcctggtgccactgtccctgagagggagccacatgggccccatggagatctacaaaaccgtgagcgcctggaagcggcagcctgtgcgcgtgctgagcctgtttcggaatatcgataaagtcctgaaaagcctgggattcctggagagcggctctggctccggcggtggcaccctgaagtacgtggaggatgtgacaaacgtggtcagacgggatgtggagaagtggggccccttcgatctggtgtacggcagcacccaacccctgggcagctcttgtgaccggtgccctggctggtacatgtttcagttccaccggatcctgcagtacgccctgccgagacaggagtcccagcggccattcttttggattttcatggacaacttgctgctgaccgaggatgaccaggaaactaccactcggttcctgcagaccgaagccgtgaccctgcaggacgtgagaggccgggactaccagaacgccatgcgggtgtggtccaacatccctggactgaaaagcaagcacgcacctctgacccctaaagaagaggagtacctgcaggcccaggtgcggagcagaagcaagctggacgcccctaaggtggatctgctggtgaagaattgcctcctgcccctgagagagtacttcaagtatttcagccagaatagtctgcccctgggaggcagcggcggcggcgcccagatgcccgtgaagttcgaggacatcgccgtgagcttcagccaggaggagtgggagtacctgaacgaggagcagaaggagctgtacagggaggtgatggaggagaactaccagaccctgatcagcctgggcagcccccccgtgacccccgacatcatcagccacatcgagaggggcgaggagccctacatcagggaggagcccggcagcgaggagagggagcccggcaggagcagctgcggcggcccaagcagcggcgcccctcctcccagcggcggcagcccagccggctccccaacctctaccgaggagggcacctctgagtccgccacccccgagagcggccctggcacctccaccgagcccagcgagggcagcgcacccggcagccctgccggcagccccacctccacagaggagggaaccagcaccgagcccagcgaaggcagcgccccaggcaccagcaccgagcctagtgagcaggagattaaacggatcaacaagatcagaagaagacttgtgaaagacagcaacaccaagaaggccggcaagacaggccccatgaaaaccctgctggttagagtgatgacacccgatctgagagagcggctggaaaacctgagaaagaagcctgaaaatatcccccagcccatcagcaatacatctagagccaacctgaataagctgctgaccgattacaccgaaatgaagaaggcgatcctgcatgtgtactgggaagagttccagaaggaccctgtgggcctgatgagccgggtggcccagcctgccagcaagaagatcgatcagaacaagctgaaacctgagatggacgagaagggcaacctgaccaccgccggctttgcctgctctcagtgtggccagcccctgttcgtgtacaagctggagcaggtgtctgagaagggcaaggcttacaccaactacttcggacggtgcaatgtggccgagcacgaaaagctgatcctgctggcccagctgaagcccgagaaggatagcgacgaagccgtgacatatagcctgggaaagtttgggcagagggccctggatttctacagcattcatgtgaccaaggagtccacccaccccgtgaagcccctggcccagatcgccggaaacagatacgcctccggacctgtgggaaaggccctgagcgacgcatgtatgggcacaatcgcctccttcctgtctaagtaccaggacatcatcatcgaacaccagaaggtggtgaagggcaaccagaagagactggagagcctgcgggagctggccggcaaggaaaacctggaataccctagcgtgaccctgccacctcagcctcacaccaaggagggcgttgatgcctacaacgaagtgatcgcccgggtgcgaatgtgggtgaacctgaacctgtggcagaagctgaagctaagcagagatgatgccaagcctctgctgagactgaagggattcccttcctttcctctggtcgagagacaggccaacgaagtggactggtgggacatggtgtgtaacgtgaagaagctgatcaacgagaaaaaggaggatggcaaggtgttttggcagaatctggctggctacaagagacaggaagccctgagaccatacctgagcagcgaggaagatcggaagaagggaaagaaattcgctcggtaccagctgggcgacctgctgctgcacctggaaaagaagcacggcgaggactggggaaaggtgtacgacgaggcctgggagcggattgacaagaaagtggaaggcctgagcaagcacatcaagctggaagaggaacggagaagcgaggacgcccagagcaaggccgccctgaccgactggctgcgggctaaggccagcttcgtgatcgagggcctgaaggaggccgacaaggacgagttctgcagatgcgagctgaagctgcagaagtggtacggggacctgcggggaaagcccttcgccatcgaagccgagaacagcatcctggacatcagcggcttcagcaagcagtacaactgtgccttcatctggcagaaggacggcgtgaagaagctgaacctgtacctgatcatcaactacttcaagggcggcaagctgcggttcaagaagatcaaacctgaagccttcgaagccaacagattctacaccgtgatcaacaaaaagagcggcgagatcgtgcccatggaggtgaacttcaacttcgacgaccccaacctgatcatcctgcctctggcctttggcaagagacagggcagagaattcatctggaacgacctgctgtccctggaaaccggcagcctgaagctggccaacggaagagtgatcgagaagacactgtacaacagaagaacccggcaggatgagcctgccctgttcgtggccctgaccttcgagcggcgggaggtcctggactcctccaatatcaaaccaatgaacctgatcggcgtggcaagaggcgaaaacatccccgccgtgatcgccctgaccgaccccgagggctgcccactgagccggtttaaggatagcctgggaaacccaacccacatcctgagaatcggcgagagctataaggagaagcagcggaccatccaggccaagaaggaggtggagcagcggagagccggcggctacagccggaagtacgccagcaaagccaagaatctggcagacgatatggtgagaaacaccgctagagatctgctgtactacgccgtgacccaggatgccatgctgatcttcgccaacctgagccggggcttcggccggcagggcaagcggaccttcatggccgagagacagtacacacggatggaggactggctgaccgccaagctggcctacgagggcctgagcaagacctacctgtccaagacactggcccagtacacctccaagacatgcagcaactgtgggtttaccatcaccagcgccgactacgacagggtgctggagaagctgaagaagacagcaacaggctggatgaccacaattaacggcaaggagctgaaggtggagggccagattacctactacaacagatacaagagacagaacgtagtcaaggacctgtccgtcgagctggatagactgagcgaagaatctgtgaacaacgacatctcctcctggacaaagggcagaagcggagaagctctgagcctcctgaagaaaagattctcccatagacccgtgcaggagaagttcgtgtgcctgaactgcggcttcgagacacacgcagccgagcaagccgccctgaacatcgccagatcctggctgttcctgcggagccaggagtacaagaaataccagacaaacaagacaaccggcaacaccgataagagagccttcgtcgagacctggcagtccttttaccggaagaagcttaaggaggtgtggaaacctgccgtgcggtctggcggatctggcggaggctccaccagccccaagaaaaagagaaaagtctaagctgccttctgcggggcttgccttctggccatgcccttcttctctcccttgcacctgtacctcttggtctttgaataaagcctgagtaggaaggctagcaaaaaaaaaaaaaaaaaaaaaaaaaaaaaaaaaaaaaaaaaaaaaaaaaaaaaaaaaaaaaaaaaaaaaaaaaaaaaaaa

SEQ ID NO: 13517 - RNA, 5785 nt, synthetic construct
  source 1..5785: mol_type = other RNA
aggaaataagagagaaaagaagagtaagaagaaatataagagccaccatggcccctaagaagaagcgtaaagtgagccggatggaacgcctcgtctacgaggtgcggcagaagtgcagaaacatcgaggacatctgcatctcctgcggatctctgaacgtgaccctggagcacccactgttcatcggcggcatgtgccagaactgtaaaaactgttttctggagtgtgcctatcaatacgacgatgacggctaccagagctactgcaccatctgttgcggcggaagagaggtgctgatgtgtggaaataacaactgctgccggtgcttctgcgtggaatgcgtggacctgctggtgggccccggcgccgcccaggccgctattaaggaagatccttggaactgctacatgtgcggccacaagggcacatacggcctgctgagacggagagaggactggcctagcagactgcagatgttcttcgccaataaccacgaccaggagttcgacccccctaaggtgtaccctcccgtccccgccgagaagagaaagcccatccgggtcctgagcctgttcgatggcatcgccaccggtctgctggtgctgaaggacctgggcatccaggtggataggtacattgcctccgaggtgtgcgaggactccatcaccgtgggaatggtgcgtcatcagggcaagatcatgtacgtgggcgacgtgcggagcgtgacacagaagcatatccaggagtggggccctttcgacctggtgatcggcggcagcccttgcaatgacctgagcatcgtgaacccagcccggaagggcctgtacgagggaaccggcagactgttcttcgagttttacagactgctgcacgacgcccggcctaaggaaggcgacgaccggcccttcttttggctgttcgagaatgtggtggccatgggagtcagcgacaagcgggatattagccggttcctggagagcaaccccgtgatgatcgatgccaaggaagtgagcgccgcccaccgggccagatacttctggggcaatctgcctggcatgaacagacccctggccagcaccgtgaacgacaagctggagctgcaggagtgcctggagcacggccggatcgccaagttcagcaaggtgagaaccatcaccacccgaagcaacagcatcaaacaaggcaaggaccagcactttcctgtgttcatgaacgagaaggaggacatcctgtggtgtaccgagatggagagagtgttcgggttcccagtccactacacagatgtcagcaacatgtctagactggccagacagagactgctgggaagaagctggtccgtccctgtgatcagacacctgttcgcccctctgaaggagtacttcgcctgcgtgagcagcggcaacagcaacgccaacagccggggccccagcttctctagcggcctggtgccactgtccctgagagggagccacatgggccccatggagatctacaaaaccgtgagcgcctggaagcggcagcctgtgcgcgtgctgagcctgtttcggaatatcgataaagtcctgaaaagcctgggattcctggagagcggctctggctccggcggtggcaccctgaagtacgtggaggatgtgacaaacgtggtcagacgggatgtggagaagtggggccccttcgatctggtgtacggcagcacccaacccctgggcagctcttgtgaccggtgccctggctggtacatgtttcagttccaccggatcctgcagtacgccctgccgagacaggagtcccagcggccattcttttggattttcatggacaacttgctgctgaccgaggatgaccaggaaactaccactcggttcctgcagaccgaagccgtgaccctgcaggacgtgagaggccgggactaccagaacgccatgcgggtgtggtccaacatccctggactgaaaagcaagcacgcacctctgacccctaaagaagaggagtacctgcaggcccaggtgcggagcagaagcaagctggacgcccctaaggtggatctgctggtgaagaattgcctcctgcccctgagagagtacttcaagtatttcagccagaatagtctgcccctgggaggcagcggcggcggcaaggaccagggcagcctgaccctggaggacgtggccgtggacttcacctgggaggagtggcagctgctggcccccgcccagaaggacctgtacagggacgtgatgctggagaactacagcaacctgctgagcatcggctaccaggccagcaagcccgacgccctgagcaggctggagaggggcgagccctggcccgtggaggacgagatccacagccagatctgccccgagatgaggaaggacggcggcccaagcagcggcgcccctcctcccagcggcggcagcccagccggctccccaacctctaccgaggagggcacctctgagtccgccacccccgagagcggccctggcacctccaccgagcccagcgagggcagcgcacccggcagccctgccggcagccccacctccacagaggagggaaccagcaccgagcccagcgaaggcagcgccccaggcaccagcaccgagcctagtgagcaggagattaaacggatcaacaagatcagaagaagacttgtgaaagacagcaacaccaagaaggccggcaagacaggccccatgaaaaccctgctggttagagtgatgacacccgatctgagagagcggctggaaaacctgagaaagaagcctgaaaatatcccccagcccatcagcaatacatctagagccaacctgaataagctgctgaccgattacaccgaaatgaagaaggcgatcctgcatgtgtactgggaagagttccagaaggaccctgtgggcctgatgagccgggtggcccagcctgccagcaagaagatcgatcagaacaagctgaaacctgagatggacgagaagggcaacctgaccaccgccggctttgcctgctctcagtgtggccagcccctgttcgtgtacaagctggagcaggtgtctgagaagggcaaggcttacaccaactacttcggacggtgcaatgtggccgagcacgaaaagctgatcctgctggcccagctgaagcccgagaaggatagcgacgaagccgtgacatatagcctgggaaagtttgggcagagggccctggatttctacagcattcatgtgaccaaggagtccacccaccccgtgaagcccctggcccagatcgccggaaacagatacgcctccggacctgtgggaaaggccctgagcgacgcatgtatgggcacaatcgcctccttcctgtctaagtaccaggacatcatcatcgaacaccagaaggtggtgaagggcaaccagaagagactggagagcctgcgggagctggccggcaaggaaaacctggaataccctagcgtgaccctgccacctcagcctcacaccaaggagggcgttgatgcctacaacgaagtgatcgcccgggtgcgaatgtgggtgaacctgaacctgtggcagaagctgaagctaagcagagatgatgccaagcctctgctgagactgaagggattcccttcctttcctctggtcgagagacaggccaacgaagtggactggtgggacatggtgtgtaacgtgaagaagctgatcaacgagaaaaaggaggatggcaaggtgttttggcagaatctggctggctacaagagacaggaagccctgagaccatacctgagcagcgaggaagatcggaagaagggaaagaaattcgctcggtaccagctgggcgacctgctgctgcacctggaaaagaagcacggcgaggactggggaaaggtgtacgacgaggcctgggagcggattgacaagaaagtggaaggcctgagcaagcacatcaagctggaagaggaacggagaagcgaggacgcccagagcaaggccgccctgaccgactggctgcgggctaaggccagcttcgtgatcgagggcctgaaggaggccgacaaggacgagttctgcagatgcgagctgaagctgcagaagtggtacggggacctgcggggaaagcccttcgccatcgaagccgagaacagcatcctggacatcagcggcttcagcaagcagtacaactgtgccttcatctggcagaaggacggcgtgaagaagctgaacctgtacctgatcatcaactacttcaagggcggcaagctgcggttcaagaagatcaaacctgaagccttcgaagccaacagattctacaccgtgatcaacaaaaagagcggcgagatcgtgcccatggaggtgaacttcaacttcgacgaccccaacctgatcatcctgcctctggcctttggcaagagacagggcagagaattcatctggaacgacctgctgtccctggaaaccggcagcctgaagctggccaacggaagagtgatcgagaagacactgtacaacagaagaacccggcaggatgagcctgccctgttcgtggccctgaccttcgagcggcgggaggtcctggactcctccaatatcaaaccaatgaacctgatcggcgtggcaagaggcgaaaacatccccgccgtgatcgccctgaccgaccccgagggctgcccactgagccggtttaaggatagcctgggaaacccaacccacatcctgagaatcggcgagagctataaggagaagcagcggaccatccaggccaagaaggaggtggagcagcggagagccggcggctacagccggaagtacgccagcaaagccaagaatctggcagacgatatggtgagaaacaccgctagagatctgctgtactacgccgtgacccaggatgccatgctgatcttcgccaacctgagccggggcttcggccggcagggcaagcggaccttcatggccgagagacagtacacacggatggaggactggctgaccgccaagctggcctacgagggcctgagcaagacctacctgtccaagacactggcccagtacacctccaagacatgcagcaactgtgggtttaccatcaccagcgccgactacgacagggtgctggagaagctgaagaagacagcaacaggctggatgaccacaattaacggcaaggagctgaaggtggagggccagattacctactacaacagatacaagagacagaacgtagtcaaggacctgtccgtcgagctggatagactgagcgaagaatctgtgaacaacgacatctcctcctggacaaagggcagaagcggagaagctctgagcctcctgaagaaaagattctcccatagacccgtgcaggagaagttcgtgtgcctgaactgcggcttcgagacacacgcagccgagcaagccgccctgaacatcgccagatcctggctgttcctgcggagccaggagtacaagaaataccagacaaacaagacaaccggcaacaccgataagagagccttcgtcgagacctggcagtccttttaccggaagaagcttaaggaggtgtggaaacctgccgtgcggtctggcggatctggcggaggctccaccagccccaagaaaaagagaaaagtctaagctgccttctgcggggcttgccttctggccatgcccttcttctctcccttgcacctgtacctcttggtctttgaataaagcctgagtaggaaggctagcaaaaaaaaaaaaaaaaaaaaaaaaaaaaaaaaaaaaaaaaaaaaaaaaaaaaaaaaaaaaaaaaaaaaaaaaaaaaaaaa

SEQ ID NO: 13518 - RNA, 5785 nt, synthetic construct
  source 1..5785: mol_type = other RNA
aggaaataagagagaaaagaagagtaagaagaaatataagagccaccatggcccctaagaagaagcgtaaagtgagccggatggaacgcctcgtctacgaggtgcggcagaagtgcagaaacatcgaggacatctgcatctcctgcggatctctgaacgtgaccctggagcacccactgttcatcggcggcatgtgccagaactgtaaaaactgttttctggagtgtgcctatcaatacgacgatgacggctaccagagctactgcaccatctgttgcggcggaagagaggtgctgatgtgtggaaataacaactgctgccggtgcttctgcgtggaatgcgtggacctgctggtgggccccggcgccgcccaggccgctattaaggaagatccttggaactgctacatgtgcggccacaagggcacatacggcctgctgagacggagagaggactggcctagcagactgcagatgttcttcgccaataaccacgaccaggagttcgacccccctaaggtgtaccctcccgtccccgccgagaagagaaagcccatccgggtcctgagcctgttcgatggcatcgccaccggtctgctggtgctgaaggacctgggcatccaggtggataggtacattgcctccgaggtgtgcgaggactccatcaccgtgggaatggtgcgtcatcagggcaagatcatgtacgtgggcgacgtgcggagcgtgacacagaagcatatccaggagtggggccctttcgacctggtgatcggcggcagcccttgcaatgacctgagcatcgtgaacccagcccggaagggcctgtacgagggaaccggcagactgttcttcgagttttacagactgctgcacgacgcccggcctaaggaaggcgacgaccggcccttcttttggctgttcgagaatgtggtggccatgggagtcagcgacaagcgggatattagccggttcctggagagcaaccccgtgatgatcgatgccaaggaagtgagcgccgcccaccgggccagatacttctggggcaatctgcctggcatgaacagacccctggccagcaccgtgaacgacaagctggagctgcaggagtgcctggagcacggccggatcgccaagttcagcaaggtgagaaccatcaccacccgaagcaacagcatcaaacaaggcaaggaccagcactttcctgtgttcatgaacgagaaggaggacatcctgtggtgtaccgagatggagagagtgttcgggttcccagtccactacacagatgtcagcaacatgtctagactggccagacagagactgctgggaagaagctggtccgtccctgtgatcagacacctgttcgcccctctgaaggagtacttcgcctgcgtgagcagcggcaacagcaacgccaacagccggggccccagcttctctagcggcctggtgccactgtccctgagagggagccacatgggccccatggagatctacaaaaccgtgagcgcctggaagcggcagcctgtgcgcgtgctgagcctgtttcggaatatcgataaagtcctgaaaagcctgggattcctggagagcggctctggctccggcggtggcaccctgaagtacgtggaggatgtgacaaacgtggtcagacgggatgtggagaagtggggccccttcgatctggtgtacggcagcacccaacccctgggcagctcttgtgaccggtgccctggctggtacatgtttcagttccaccggatcctgcagtacgccctgccgagacaggagtcccagcggccattcttttggattttcatggacaacttgctgctgaccgaggatgaccaggaaactaccactcggttcctgcagaccgaagccgtgaccctgcaggacgtgagaggccgggactaccagaacgccatgcgggtgtggtccaacatccctggactgaaaagcaagcacgcacctctgacccctaaagaagaggagtacctgcaggcccaggtgcggagcagaagcaagctggacgcccctaaggtggatctgctggtgaagaattgcctcctgcccctgagagagtacttcaagtatttcagccagaatagtctgcccctgggaggcagcggcggcggccagatgaggctgaggttcgaggacatcagcgtgagcttcagccaggaggagtgggcctacctggacgaggagcagaaggagctgtacagggaggtgatgagggacaactaccagaccctgatcagcctgggcatcggcagcccccccgtgacccccgacatcatcagctgcatcgagcagggcgaggagccctacatcagggacgagcccggcagcgaggagaggaagaccggcaggagcagcggcggcccaagcagcggcgcccctcctcccagcggcggcagcccagccggctccccaacctctaccgaggagggcacctctgagtccgccacccccgagagcggccctggcacctccaccgagcccagcgagggcagcgcacccggcagccctgccggcagccccacctccacagaggagggaaccagcaccgagcccagcgaaggcagcgccccaggcaccagcaccgagcctagtgagcaggagattaaacggatcaacaagatcagaagaagacttgtgaaagacagcaacaccaagaaggccggcaagacaggccccatgaaaaccctgctggttagagtgatgacacccgatctgagagagcggctggaaaacctgagaaagaagcctgaaaatatcccccagcccatcagcaatacatctagagccaacctgaataagctgctgaccgattacaccgaaatgaagaaggcgatcctgcatgtgtactgggaagagttccagaaggaccctgtgggcctgatgagccgggtggcccagcctgccagcaagaagatcgatcagaacaagctgaaacctgagatggacgagaagggcaacctgaccaccgccggctttgcctgctctcagtgtggccagcccctgttcgtgtacaagctggagcaggtgtctgagaagggcaaggcttacaccaactacttcggacggtgcaatgtggccgagcacgaaaagctgatcctgctggcccagctgaagcccgagaaggatagcgacgaagccgtgacatatagcctgggaaagtttgggcagagggccctggatttctacagcattcatgtgaccaaggagtccacccaccccgtgaagcccctggcccagatcgccggaaacagatacgcctccggacctgtgggaaaggccctgagcgacgcatgtatgggcacaatcgcctccttcctgtctaagtaccaggacatcatcatcgaacaccagaaggtggtgaagggcaaccagaagagactggagagcctgcgggagctggccggcaaggaaaacctggaataccctagcgtgaccctgccacctcagcctcacaccaaggagggcgttgatgcctacaacgaagtgatcgcccgggtgcgaatgtgggtgaacctgaacctgtggcagaagctgaagctaagcagagatgatgccaagcctctgctgagactgaagggattcccttcctttcctctggtcgagagacaggccaacgaagtggactggtgggacatggtgtgtaacgtgaagaagctgatcaacgagaaaaaggaggatggcaaggtgttttggcagaatctggctggctacaagagacaggaagccctgagaccatacctgagcagcgaggaagatcggaagaagggaaagaaattcgctcggtaccagctgggcgacctgctgctgcacctggaaaagaagcacggcgaggactggggaaaggtgtacgacgaggcctgggagcggattgacaagaaagtggaaggcctgagcaagcacatcaagctggaagaggaacggagaagcgaggacgcccagagcaaggccgccctgaccgactggctgcgggctaaggccagcttcgtgatcgagggcctgaaggaggccgacaaggacgagttctgcagatgcgagctgaagctgcagaagtggtacggggacctgcggggaaagcccttcgccatcgaagccgagaacagcatcctggacatcagcggcttcagcaagcagtacaactgtgccttcatctggcagaaggacggcgtgaagaagctgaacctgtacctgatcatcaactacttcaagggcggcaagctgcggttcaagaagatcaaacctgaagccttcgaagccaacagattctacaccgtgatcaacaaaaagagcggcgagatcgtgcccatggaggtgaacttcaacttcgacgaccccaacctgatcatcctgcctctggcctttggcaagagacagggcagagaattcatctggaacgacctgctgtccctggaaaccggcagcctgaagctggccaacggaagagtgatcgagaagacactgtacaacagaagaacccggcaggatgagcctgccctgttcgtggccctgaccttcgagcggcgggaggtcctggactcctccaatatcaaaccaatgaacctgatcggcgtggcaagaggcgaaaacatccccgccgtgatcgccctgaccgaccccgagggctgcccactgagccggtttaaggatagcctgggaaacccaacccacatcctgagaatcggcgagagctataaggagaagcagcggaccatccaggccaagaaggaggtggagcagcggagagccggcggctacagccggaagtacgccagcaaagccaagaatctggcagacgatatggtgagaaacaccgctagagatctgctgtactacgccgtgacccaggatgccatgctgatcttcgccaacctgagccggggcttcggccggcagggcaagcggaccttcatggccgagagacagtacacacggatggaggactggctgaccgccaagctggcctacgagggcctgagcaagacctacctgtccaagacactggcccagtacacctccaagacatgcagcaactgtgggtttaccatcaccagcgccgactacgacagggtgctggagaagctgaagaagacagcaacaggctggatgaccacaattaacggcaaggagctgaaggtggagggccagattacctactacaacagatacaagagacagaacgtagtcaaggacctgtccgtcgagctggatagactgagcgaagaatctgtgaacaacgacatctcctcctggacaaagggcagaagcggagaagctctgagcctcctgaagaaaagattctcccatagacccgtgcaggagaagttcgtgtgcctgaactgcggcttcgagacacacgcagccgagcaagccgccctgaacatcgccagatcctggctgttcctgcggagccaggagtacaagaaataccagacaaacaagacaaccggcaacaccgataagagagccttcgtcgagacctggcagtccttttaccggaagaagcttaaggaggtgtggaaacctgccgtgcggtctggcggatctggcggaggctccaccagccccaagaaaaagagaaaagtctaagctgccttctgcggggcttgccttctggccatgcccttcttctctcccttgcacctgtacctcttggtctttgaataaagcctgagtaggaaggctagcaaaaaaaaaaaaaaaaaaaaaaaaaaaaaaaaaaaaaaaaaaaaaaaaaaaaaaaaaaaaaaaaaaaaaaaaaaaaaaaa

SEQ ID NO: 13519 - RNA, 5782 nt, synthetic construct
  source 1..5782: mol_type = other RNA
aggaaataagagagaaaagaagagtaagaagaaatataagagccaccatggcccctaagaagaagcgtaaagtgagccggatggaacgcctcgtctacgaggtgcggcagaagtgcagaaacatcgaggacatctgcatctcctgcggatctctgaacgtgaccctggagcacccactgttcatcggcggcatgtgccagaactgtaaaaactgttttctggagtgtgcctatcaatacgacgatgacggctaccagagctactgcaccatctgttgcggcggaagagaggtgctgatgtgtggaaataacaactgctgccggtgcttctgcgtggaatgcgtggacctgctggtgggccccggcgccgcccaggccgctattaaggaagatccttggaactgctacatgtgcggccacaagggcacatacggcctgctgagacggagagaggactggcctagcagactgcagatgttcttcgccaataaccacgaccaggagttcgacccccctaaggtgtaccctcccgtccccgccgagaagagaaagcccatccgggtcctgagcctgttcgatggcatcgccaccggtctgctggtgctgaaggacctgggcatccaggtggataggtacattgcctccgaggtgtgcgaggactccatcaccgtgggaatggtgcgtcatcagggcaagatcatgtacgtgggcgacgtgcggagcgtgacacagaagcatatccaggagtggggccctttcgacctggtgatcggcggcagcccttgcaatgacctgagcatcgtgaacccagcccggaagggcctgtacgagggaaccggcagactgttcttcgagttttacagactgctgcacgacgcccggcctaaggaaggcgacgaccggcccttcttttggctgttcgagaatgtggtggccatgggagtcagcgacaagcgggatattagccggttcctggagagcaaccccgtgatgatcgatgccaaggaagtgagcgccgcccaccgggccagatacttctggggcaatctgcctggcatgaacagacccctggccagcaccgtgaacgacaagctggagctgcaggagtgcctggagcacggccggatcgccaagttcagcaaggtgagaaccatcaccacccgaagcaacagcatcaaacaaggcaaggaccagcactttcctgtgttcatgaacgagaaggaggacatcctgtggtgtaccgagatggagagagtgttcgggttcccagtccactacacagatgtcagcaacatgtctagactggccagacagagactgctgggaagaagctggtccgtccctgtgatcagacacctgttcgcccctctgaaggagtacttcgcctgcgtgagcagcggcaacagcaacgccaacagccggggccccagcttctctagcggcctggtgccactgtccctgagagggagccacatgggccccatggagatctacaaaaccgtgagcgcctggaagcggcagcctgtgcgcgtgctgagcctgtttcggaatatcgataaagtcctgaaaagcctgggattcctggagagcggctctggctccggcggtggcaccctgaagtacgtggaggatgtgacaaacgtggtcagacgggatgtggagaagtggggccccttcgatctggtgtacggcagcacccaacccctgggcagctcttgtgaccggtgccctggctggtacatgtttcagttccaccggatcctgcagtacgccctgccgagacaggagtcccagcggccattcttttggattttcatggacaacttgctgctgaccgaggatgaccaggaaactaccactcggttcctgcagaccgaagccgtgaccctgcaggacgtgagaggccgggactaccagaacgccatgcgggtgtggtccaacatccctggactgaaaagcaagcacgcacctctgacccctaaagaagaggagtacctgcaggcccaggtgcggagcagaagcaagctggacgcccctaaggtggatctgctggtgaagaattgcctcctgcccctgagagagtacttcaagtatttcagccagaatagtctgcccctgggaggcagcggcggcggcggcccccagggcgccagaagacaggccttcctggccttcggcgacgtgaccgtggacttcacccagaaggagtggagactgctgagccccgcccagagagccctgtacagagaggtgaccctggagaactacagccacctggtgagcctgggcatcctgcacagcaagcccgagctgatcagaagactggagcagggcgaggtgccctggggcgaggagagaagaagaagacccggccccggcggcccaagcagcggcgcccctcctcccagcggcggcagcccagccggctccccaacctctaccgaggagggcacctctgagtccgccacccccgagagcggccctggcacctccaccgagcccagcgagggcagcgcacccggcagccctgccggcagccccacctccacagaggagggaaccagcaccgagcccagcgaaggcagcgccccaggcaccagcaccgagcctagtgagcaggagattaaacggatcaacaagatcagaagaagacttgtgaaagacagcaacaccaagaaggccggcaagacaggccccatgaaaaccctgctggttagagtgatgacacccgatctgagagagcggctggaaaacctgagaaagaagcctgaaaatatcccccagcccatcagcaatacatctagagccaacctgaataagctgctgaccgattacaccgaaatgaagaaggcgatcctgcatgtgtactgggaagagttccagaaggaccctgtgggcctgatgagccgggtggcccagcctgccagcaagaagatcgatcagaacaagctgaaacctgagatggacgagaagggcaacctgaccaccgccggctttgcctgctctcagtgtggccagcccctgttcgtgtacaagctggagcaggtgtctgagaagggcaaggcttacaccaactacttcggacggtgcaatgtggccgagcacgaaaagctgatcctgctggcccagctgaagcccgagaaggatagcgacgaagccgtgacatatagcctgggaaagtttgggcagagggccctggatttctacagcattcatgtgaccaaggagtccacccaccccgtgaagcccctggcccagatcgccggaaacagatacgcctccggacctgtgggaaaggccctgagcgacgcatgtatgggcacaatcgcctccttcctgtctaagtaccaggacatcatcatcgaacaccagaaggtggtgaagggcaaccagaagagactggagagcctgcgggagctggccggcaaggaaaacctggaataccctagcgtgaccctgccacctcagcctcacaccaaggagggcgttgatgcctacaacgaagtgatcgcccgggtgcgaatgtgggtgaacctgaacctgtggcagaagctgaagctaagcagagatgatgccaagcctctgctgagactgaagggattcccttcctttcctctggtcgagagacaggccaacgaagtggactggtgggacatggtgtgtaacgtgaagaagctgatcaacgagaaaaaggaggatggcaaggtgttttggcagaatctggctggctacaagagacaggaagccctgagaccatacctgagcagcgaggaagatcggaagaagggaaagaaattcgctcggtaccagctgggcgacctgctgctgcacctggaaaagaagcacggcgaggactggggaaaggtgtacgacgaggcctgggagcggattgacaagaaagtggaaggcctgagcaagcacatcaagctggaagaggaacggagaagcgaggacgcccagagcaaggccgccctgaccgactggctgcgggctaaggccagcttcgtgatcgagggcctgaaggaggccgacaaggacgagttctgcagatgcgagctgaagctgcagaagtggtacggggacctgcggggaaagcccttcgccatcgaagccgagaacagcatcctggacatcagcggcttcagcaagcagtacaactgtgccttcatctggcagaaggacggcgtgaagaagctgaacctgtacctgatcatcaactacttcaagggcggcaagctgcggttcaagaagatcaaacctgaagccttcgaagccaacagattctacaccgtgatcaacaaaaagagcggcgagatcgtgcccatggaggtgaacttcaacttcgacgaccccaacctgatcatcctgcctctggcctttggcaagagacagggcagagaattcatctggaacgacctgctgtccctggaaaccggcagcctgaagctggccaacggaagagtgatcgagaagacactgtacaacagaagaacccggcaggatgagcctgccctgttcgtggccctgaccttcgagcggcgggaggtcctggactcctccaatatcaaaccaatgaacctgatcggcgtggcaagaggcgaaaacatccccgccgtgatcgccctgaccgaccccgagggctgcccactgagccggtttaaggatagcctgggaaacccaacccacatcctgagaatcggcgagagctataaggagaagcagcggaccatccaggccaagaaggaggtggagcagcggagagccggcggctacagccggaagtacgccagcaaagccaagaatctggcagacgatatggtgagaaacaccgctagagatctgctgtactacgccgtgacccaggatgccatgctgatcttcgccaacctgagccggggcttcggccggcagggcaagcggaccttcatggccgagagacagtacacacggatggaggactggctgaccgccaagctggcctacgagggcctgagcaagacctacctgtccaagacactggcccagtacacctccaagacatgcagcaactgtgggtttaccatcaccagcgccgactacgacagggtgctggagaagctgaagaagacagcaacaggctggatgaccacaattaacggcaaggagctgaaggtggagggccagattacctactacaacagatacaagagacagaacgtagtcaaggacctgtccgtcgagctggatagactgagcgaagaatctgtgaacaacgacatctcctcctggacaaagggcagaagcggagaagctctgagcctcctgaagaaaagattctcccatagacccgtgcaggagaagttcgtgtgcctgaactgcggcttcgagacacacgcagccgagcaagccgccctgaacatcgccagatcctggctgttcctgcggagccaggagtacaagaaataccagacaaacaagacaaccggcaacaccgataagagagccttcgtcgagacctggcagtccttttaccggaagaagcttaaggaggtgtggaaacctgccgtgcggtctggcggatctggcggaggctccaccagccccaagaaaaagagaaaagtctaagctgccttctgcggggcttgccttctggccatgcccttcttctctcccttgcacctgtacctcttggtctttgaataaagcctgagtaggaaggctagcaaaaaaaaaaaaaaaaaaaaaaaaaaaaaaaaaaaaaaaaaaaaaaaaaaaaaaaaaaaaaaaaaaaaaaaaaaaaaaaa

SEQ ID NO: 13520 - RNA, 5785 nt, synthetic construct
  source 1..5785: mol_type = other RNA
aggaaataagagagaaaagaagagtaagaagaaatataagagccaccatggcccctaagaagaagcgtaaagtgagccggatggaacgcctcgtctacgaggtgcggcagaagtgcagaaacatcgaggacatctgcatctcctgcggatctctgaacgtgaccctggagcacccactgttcatcggcggcatgtgccagaactgtaaaaactgttttctggagtgtgcctatcaatacgacgatgacggctaccagagctactgcaccatctgttgcggcggaagagaggtgctgatgtgtggaaataacaactgctgccggtgcttctgcgtggaatgcgtggacctgctggtgggccccggcgccgcccaggccgctattaaggaagatccttggaactgctacatgtgcggccacaagggcacatacggcctgctgagacggagagaggactggcctagcagactgcagatgttcttcgccaataaccacgaccaggagttcgacccccctaaggtgtaccctcccgtccccgccgagaagagaaagcccatccgggtcctgagcctgttcgatggcatcgccaccggtctgctggtgctgaaggacctgggcatccaggtggataggtacattgcctccgaggtgtgcgaggactccatcaccgtgggaatggtgcgtcatcagggcaagatcatgtacgtgggcgacgtgcggagcgtgacacagaagcatatccaggagtggggccctttcgacctggtgatcggcggcagcccttgcaatgacctgagcatcgtgaacccagcccggaagggcctgtacgagggaaccggcagactgttcttcgagttttacagactgctgcacgacgcccggcctaaggaaggcgacgaccggcccttcttttggctgttcgagaatgtggtggccatgggagtcagcgacaagcgggatattagccggttcctggagagcaaccccgtgatgatcgatgccaaggaagtgagcgccgcccaccgggccagatacttctggggcaatctgcctggcatgaacagacccctggccagcaccgtgaacgacaagctggagctgcaggagtgcctggagcacggccggatcgccaagttcagcaaggtgagaaccatcaccacccgaagcaacagcatcaaacaaggcaaggaccagcactttcctgtgttcatgaacgagaaggaggacatcctgtggtgtaccgagatggagagagtgttcgggttcccagtccactacacagatgtcagcaacatgtctagactggccagacagagactgctgggaagaagctggtccgtccctgtgatcagacacctgttcgcccctctgaaggagtacttcgcctgcgtgagcagcggcaacagcaacgccaacagccggggccccagcttctctagcggcctggtgccactgtccctgagagggagccacatgggccccatggagatctacaaaaccgtgagcgcctggaagcggcagcctgtgcgcgtgctgagcctgtttcggaatatcgataaagtcctgaaaagcctgggattcctggagagcggctctggctccggcggtggcaccctgaagtacgtggaggatgtgacaaacgtggtcagacgggatgtggagaagtggggccccttcgatctggtgtacggcagcacccaacccctgggcagctcttgtgaccggtgccctggctggtacatgtttcagttccaccggatcctgcagtacgccctgccgagacaggagtcccagcggccattcttttggattttcatggacaacttgctgctgaccgaggatgaccaggaaactaccactcggttcctgcagaccgaagccgtgaccctgcaggacgtgagaggccgggactaccagaacgccatgcgggtgtggtccaacatccctggactgaaaagcaagcacgcacctctgacccctaaagaagaggagtacctgcaggcccaggtgcggagcagaagcaagctggacgcccctaaggtggatctgctggtgaagaattgcctcctgcccctgagagagtacttcaagtatttcagccagaatagtctgcccctgggaggcagcggcggcggctgctaccaggacagcgtgaccttcgacgacgtggccgtggacttcacccaggaggagtggaccctgctggaccccacccagaggagcctgtacagcgacgtgatgctggagaactacaagaacctggccaccgtgggcggccagatcatcaagcccagcctgatcagctggctggagcaggaggagagcaggaccgtgaggggcggcgtgctgcagggcaggaagacccagtggaggggcaccggcggcccaagcagcggcgcccctcctcccagcggcggcagcccagccggctccccaacctctaccgaggagggcacctctgagtccgccacccccgagagcggccctggcacctccaccgagcccagcgagggcagcgcacccggcagccctgccggcagccccacctccacagaggagggaaccagcaccgagcccagcgaaggcagcgccccaggcaccagcaccgagcctagtgagcaggagattaaacggatcaacaagatcagaagaagacttgtgaaagacagcaacaccaagaaggccggcaagacaggccccatgaaaaccctgctggttagagtgatgacacccgatctgagagagcggctggaaaacctgagaaagaagcctgaaaatatcccccagcccatcagcaatacatctagagccaacctgaataagctgctgaccgattacaccgaaatgaagaaggcgatcctgcatgtgtactgggaagagttccagaaggaccctgtgggcctgatgagccgggtggcccagcctgccagcaagaagatcgatcagaacaagctgaaacctgagatggacgagaagggcaacctgaccaccgccggctttgcctgctctcagtgtggccagcccctgttcgtgtacaagctggagcaggtgtctgagaagggcaaggcttacaccaactacttcggacggtgcaatgtggccgagcacgaaaagctgatcctgctggcccagctgaagcccgagaaggatagcgacgaagccgtgacatatagcctgggaaagtttgggcagagggccctggatttctacagcattcatgtgaccaaggagtccacccaccccgtgaagcccctggcccagatcgccggaaacagatacgcctccggacctgtgggaaaggccctgagcgacgcatgtatgggcacaatcgcctccttcctgtctaagtaccaggacatcatcatcgaacaccagaaggtggtgaagggcaaccagaagagactggagagcctgcgggagctggccggcaaggaaaacctggaataccctagcgtgaccctgccacctcagcctcacaccaaggagggcgttgatgcctacaacgaagtgatcgcccgggtgcgaatgtgggtgaacctgaacctgtggcagaagctgaagctaagcagagatgatgccaagcctctgctgagactgaagggattcccttcctttcctctggtcgagagacaggccaacgaagtggactggtgggacatggtgtgtaacgtgaagaagctgatcaacgagaaaaaggaggatggcaaggtgttttggcagaatctggctggctacaagagacaggaagccctgagaccatacctgagcagcgaggaagatcggaagaagggaaagaaattcgctcggtaccagctgggcgacctgctgctgcacctggaaaagaagcacggcgaggactggggaaaggtgtacgacgaggcctgggagcggattgacaagaaagtggaaggcctgagcaagcacatcaagctggaagaggaacggagaagcgaggacgcccagagcaaggccgccctgaccgactggctgcgggctaaggccagcttcgtgatcgagggcctgaaggaggccgacaaggacgagttctgcagatgcgagctgaagctgcagaagtggtacggggacctgcggggaaagcccttcgccatcgaagccgagaacagcatcctggacatcagcggcttcagcaagcagtacaactgtgccttcatctggcagaaggacggcgtgaagaagctgaacctgtacctgatcatcaactacttcaagggcggcaagctgcggttcaagaagatcaaacctgaagccttcgaagccaacagattctacaccgtgatcaacaaaaagagcggcgagatcgtgcccatggaggtgaacttcaacttcgacgaccccaacctgatcatcctgcctctggcctttggcaagagacagggcagagaattcatctggaacgacctgctgtccctggaaaccggcagcctgaagctggccaacggaagagtgatcgagaagacactgtacaacagaagaacccggcaggatgagcctgccctgttcgtggccctgaccttcgagcggcgggaggtcctggactcctccaatatcaaaccaatgaacctgatcggcgtggcaagaggcgaaaacatccccgccgtgatcgccctgaccgaccccgagggctgcccactgagccggtttaaggatagcctgggaaacccaacccacatcctgagaatcggcgagagctataaggagaagcagcggaccatccaggccaagaaggaggtggagcagcggagagccggcggctacagccggaagtacgccagcaaagccaagaatctggcagacgatatggtgagaaacaccgctagagatctgctgtactacgccgtgacccaggatgccatgctgatcttcgccaacctgagccggggcttcggccggcagggcaagcggaccttcatggccgagagacagtacacacggatggaggactggctgaccgccaagctggcctacgagggcctgagcaagacctacctgtccaagacactggcccagtacacctccaagacatgcagcaactgtgggtttaccatcaccagcgccgactacgacagggtgctggagaagctgaagaagacagcaacaggctggatgaccacaattaacggcaaggagctgaaggtggagggccagattacctactacaacagatacaagagacagaacgtagtcaaggacctgtccgtcgagctggatagactgagcgaagaatctgtgaacaacgacatctcctcctggacaaagggcagaagcggagaagctctgagcctcctgaagaaaagattctcccatagacccgtgcaggagaagttcgtgtgcctgaactgcggcttcgagacacacgcagccgagcaagccgccctgaacatcgccagatcctggctgttcctgcggagccaggagtacaagaaataccagacaaacaagacaaccggcaacaccgataagagagccttcgtcgagacctggcagtccttttaccggaagaagcttaaggaggtgtggaaacctgccgtgcggtctggcggatctggcggaggctccaccagccccaagaaaaagagaaaagtctaagctgccttctgcggggcttgccttctggccatgcccttcttctctcccttgcacctgtacctcttggtctttgaataaagcctgagtaggaaggctagcaaaaaaaaaaaaaaaaaaaaaaaaaaaaaaaaaaaaaaaaaaaaaaaaaaaaaaaaaaaaaaaaaaaaaaaaaaaaaaaa

SEQ ID NO: 13521 - RNA, 5785 nt, synthetic construct
  source 1..5785: mol_type = other RNA
aggaaataagagagaaaagaagagtaagaagaaatataagagccaccatggcccctaagaagaagcgtaaagtgagccggatggaacgcctcgtctacgaggtgcggcagaagtgcagaaacatcgaggacatctgcatctcctgcggatctctgaacgtgaccctggagcacccactgttcatcggcggcatgtgccagaactgtaaaaactgttttctggagtgtgcctatcaatacgacgatgacggctaccagagctactgcaccatctgttgcggcggaagagaggtgctgatgtgtggaaataacaactgctgccggtgcttctgcgtggaatgcgtggacctgctggtgggccccggcgccgcccaggccgctattaaggaagatccttggaactgctacatgtgcggccacaagggcacatacggcctgctgagacggagagaggactggcctagcagactgcagatgttcttcgccaataaccacgaccaggagttcgacccccctaaggtgtaccctcccgtccccgccgagaagagaaagcccatccgggtcctgagcctgttcgatggcatcgccaccggtctgctggtgctgaaggacctgggcatccaggtggataggtacattgcctccgaggtgtgcgaggactccatcaccgtgggaatggtgcgtcatcagggcaagatcatgtacgtgggcgacgtgcggagcgtgacacagaagcatatccaggagtggggccctttcgacctggtgatcggcggcagcccttgcaatgacctgagcatcgtgaacccagcccggaagggcctgtacgagggaaccggcagactgttcttcgagttttacagactgctgcacgacgcccggcctaaggaaggcgacgaccggcccttcttttggctgttcgagaatgtggtggccatgggagtcagcgacaagcgggatattagccggttcctggagagcaaccccgtgatgatcgatgccaaggaagtgagcgccgcccaccgggccagatacttctggggcaatctgcctggcatgaacagacccctggccagcaccgtgaacgacaagctggagctgcaggagtgcctggagcacggccggatcgccaagttcagcaaggtgagaaccatcaccacccgaagcaacagcatcaaacaaggcaaggaccagcactttcctgtgttcatgaacgagaaggaggacatcctgtggtgtaccgagatggagagagtgttcgggttcccagtccactacacagatgtcagcaacatgtctagactggccagacagagactgctgggaagaagctggtccgtccctgtgatcagacacctgttcgcccctctgaaggagtacttcgcctgcgtgagcagcggcaacagcaacgccaacagccggggccccagcttctctagcggcctggtgccactgtccctgagagggagccacatgggccccatggagatctacaaaaccgtgagcgcctggaagcggcagcctgtgcgcgtgctgagcctgtttcggaatatcgataaagtcctgaaaagcctgggattcctggagagcggctctggctccggcggtggcaccctgaagtacgtggaggatgtgacaaacgtggtcagacgggatgtggagaagtggggccccttcgatctggtgtacggcagcacccaacccctgggcagctcttgtgaccggtgccctggctggtacatgtttcagttccaccggatcctgcagtacgccctgccgagacaggagtcccagcggccattcttttggattttcatggacaacttgctgctgaccgaggatgaccaggaaactaccactcggttcctgcagaccgaagccgtgaccctgcaggacgtgagaggccgggactaccagaacgccatgcgggtgtggtccaacatccctggactgaaaagcaagcacgcacctctgacccctaaagaagaggagtacctgcaggcccaggtgcggagcagaagcaagctggacgcccctaaggtggatctgctggtgaagaattgcctcctgcccctgagagagtacttcaagtatttcagccagaatagtctgcccctgggaggcagcggcggcggcttccaggccagcgtgaccttcaaggacgtggccgtggacttcacctgggaggagtggaggctgctggaccccccccagaaggagctgttctgggaggtgatgctggagaactacaggaacctggtgtgcctgggcctggccgacagcaacaaggacgtgatgatcagcgagctggagagcggcgagccccactggatccccaccggcggcgtgctgaggagctgctggcccggctgggagagcggcggcccaagcagcggcgcccctcctcccagcggcggcagcccagccggctccccaacctctaccgaggagggcacctctgagtccgccacccccgagagcggccctggcacctccaccgagcccagcgagggcagcgcacccggcagccctgccggcagccccacctccacagaggagggaaccagcaccgagcccagcgaaggcagcgccccaggcaccagcaccgagcctagtgagcaggagattaaacggatcaacaagatcagaagaagacttgtgaaagacagcaacaccaagaaggccggcaagacaggccccatgaaaaccctgctggttagagtgatgacacccgatctgagagagcggctggaaaacctgagaaagaagcctgaaaatatcccccagcccatcagcaatacatctagagccaacctgaataagctgctgaccgattacaccgaaatgaagaaggcgatcctgcatgtgtactgggaagagttccagaaggaccctgtgggcctgatgagccgggtggcccagcctgccagcaagaagatcgatcagaacaagctgaaacctgagatggacgagaagggcaacctgaccaccgccggctttgcctgctctcagtgtggccagcccctgttcgtgtacaagctggagcaggtgtctgagaagggcaaggcttacaccaactacttcggacggtgcaatgtggccgagcacgaaaagctgatcctgctggcccagctgaagcccgagaaggatagcgacgaagccgtgacatatagcctgggaaagtttgggcagagggccctggatttctacagcattcatgtgaccaaggagtccacccaccccgtgaagcccctggcccagatcgccggaaacagatacgcctccggacctgtgggaaaggccctgagcgacgcatgtatgggcacaatcgcctccttcctgtctaagtaccaggacatcatcatcgaacaccagaaggtggtgaagggcaaccagaagagactggagagcctgcgggagctggccggcaaggaaaacctggaataccctagcgtgaccctgccacctcagcctcacaccaaggagggcgttgatgcctacaacgaagtgatcgcccgggtgcgaatgtgggtgaacctgaacctgtggcagaagctgaagctaagcagagatgatgccaagcctctgctgagactgaagggattcccttcctttcctctggtcgagagacaggccaacgaagtggactggtgggacatggtgtgtaacgtgaagaagctgatcaacgagaaaaaggaggatggcaaggtgttttggcagaatctggctggctacaagagacaggaagccctgagaccatacctgagcagcgaggaagatcggaagaagggaaagaaattcgctcggtaccagctgggcgacctgctgctgcacctggaaaagaagcacggcgaggactggggaaaggtgtacgacgaggcctgggagcggattgacaagaaagtggaaggcctgagcaagcacatcaagctggaagaggaacggagaagcgaggacgcccagagcaaggccgccctgaccgactggctgcgggctaaggccagcttcgtgatcgagggcctgaaggaggccgacaaggacgagttctgcagatgcgagctgaagctgcagaagtggtacggggacctgcggggaaagcccttcgccatcgaagccgagaacagcatcctggacatcagcggcttcagcaagcagtacaactgtgccttcatctggcagaaggacggcgtgaagaagctgaacctgtacctgatcatcaactacttcaagggcggcaagctgcggttcaagaagatcaaacctgaagccttcgaagccaacagattctacaccgtgatcaacaaaaagagcggcgagatcgtgcccatggaggtgaacttcaacttcgacgaccccaacctgatcatcctgcctctggcctttggcaagagacagggcagagaattcatctggaacgacctgctgtccctggaaaccggcagcctgaagctggccaacggaagagtgatcgagaagacactgtacaacagaagaacccggcaggatgagcctgccctgttcgtggccctgaccttcgagcggcgggaggtcctggactcctccaatatcaaaccaatgaacctgatcggcgtggcaagaggcgaaaacatccccgccgtgatcgccctgaccgaccccgagggctgcccactgagccggtttaaggatagcctgggaaacccaacccacatcctgagaatcggcgagagctataaggagaagcagcggaccatccaggccaagaaggaggtggagcagcggagagccggcggctacagccggaagtacgccagcaaagccaagaatctggcagacgatatggtgagaaacaccgctagagatctgctgtactacgccgtgacccaggatgccatgctgatcttcgccaacctgagccggggcttcggccggcagggcaagcggaccttcatggccgagagacagtacacacggatggaggactggctgaccgccaagctggcctacgagggcctgagcaagacctacctgtccaagacactggcccagtacacctccaagacatgcagcaactgtgggtttaccatcaccagcgccgactacgacagggtgctggagaagctgaagaagacagcaacaggctggatgaccacaattaacggcaaggagctgaaggtggagggccagattacctactacaacagatacaagagacagaacgtagtcaaggacctgtccgtcgagctggatagactgagcgaagaatctgtgaacaacgacatctcctcctggacaaagggcagaagcggagaagctctgagcctcctgaagaaaagattctcccatagacccgtgcaggagaagttcgtgtgcctgaactgcggcttcgagacacacgcagccgagcaagccgccctgaacatcgccagatcctggctgttcctgcggagccaggagtacaagaaataccagacaaacaagacaaccggcaacaccgataagagagccttcgtcgagacctggcagtccttttaccggaagaagcttaaggaggtgtggaaacctgccgtgcggtctggcggatctggcggaggctccaccagccccaagaaaaagagaaaagtctaagctgccttctgcggggcttgccttctggccatgcccttcttctctcccttgcacctgtacctcttggtctttgaataaagcctgagtaggaaggctagcaaaaaaaaaaaaaaaaaaaaaaaaaaaaaaaaaaaaaaaaaaaaaaaaaaaaaaaaaaaaaaaaaaaaaaaaaaaaaaaa

SEQ ID NO: 13522 - RNA, 5785 nt, synthetic construct
  source 1..5785: mol_type = other RNA
aggaaataagagagaaaagaagagtaagaagaaatataagagccaccatggcccctaagaagaagcgtaaagtgagccggatggaacgcctcgtctacgaggtgcggcagaagtgcagaaacatcgaggacatctgcatctcctgcggatctctgaacgtgaccctggagcacccactgttcatcggcggcatgtgccagaactgtaaaaactgttttctggagtgtgcctatcaatacgacgatgacggctaccagagctactgcaccatctgttgcggcggaagagaggtgctgatgtgtggaaataacaactgctgccggtgcttctgcgtggaatgcgtggacctgctggtgggccccggcgccgcccaggccgctattaaggaagatccttggaactgctacatgtgcggccacaagggcacatacggcctgctgagacggagagaggactggcctagcagactgcagatgttcttcgccaataaccacgaccaggagttcgacccccctaaggtgtaccctcccgtccccgccgagaagagaaagcccatccgggtcctgagcctgttcgatggcatcgccaccggtctgctggtgctgaaggacctgggcatccaggtggataggtacattgcctccgaggtgtgcgaggactccatcaccgtgggaatggtgcgtcatcagggcaagatcatgtacgtgggcgacgtgcggagcgtgacacagaagcatatccaggagtggggccctttcgacctggtgatcggcggcagcccttgcaatgacctgagcatcgtgaacccagcccggaagggcctgtacgagggaaccggcagactgttcttcgagttttacagactgctgcacgacgcccggcctaaggaaggcgacgaccggcccttcttttggctgttcgagaatgtggtggccatgggagtcagcgacaagcgggatattagccggttcctggagagcaaccccgtgatgatcgatgccaaggaagtgagcgccgcccaccgggccagatacttctggggcaatctgcctggcatgaacagacccctggccagcaccgtgaacgacaagctggagctgcaggagtgcctggagcacggccggatcgccaagttcagcaaggtgagaaccatcaccacccgaagcaacagcatcaaacaaggcaaggaccagcactttcctgtgttcatgaacgagaaggaggacatcctgtggtgtaccgagatggagagagtgttcgggttcccagtccactacacagatgtcagcaacatgtctagactggccagacagagactgctgggaagaagctggtccgtccctgtgatcagacacctgttcgcccctctgaaggagtacttcgcctgcgtgagcagcggcaacagcaacgccaacagccggggccccagcttctctagcggcctggtgccactgtccctgagagggagccacatgggccccatggagatctacaaaaccgtgagcgcctggaagcggcagcctgtgcgcgtgctgagcctgtttcggaatatcgataaagtcctgaaaagcctgggattcctggagagcggctctggctccggcggtggcaccctgaagtacgtggaggatgtgacaaacgtggtcagacgggatgtggagaagtggggccccttcgatctggtgtacggcagcacccaacccctgggcagctcttgtgaccggtgccctggctggtacatgtttcagttccaccggatcctgcagtacgccctgccgagacaggagtcccagcggccattcttttggattttcatggacaacttgctgctgaccgaggatgaccaggaaactaccactcggttcctgcagaccgaagccgtgaccctgcaggacgtgagaggccgggactaccagaacgccatgcgggtgtggtccaacatccctggactgaaaagcaagcacgcacctctgacccctaaagaagaggagtacctgcaggcccaggtgcggagcagaagcaagctggacgcccctaaggtggatctgctggtgaagaattgcctcctgcccctgagagagtacttcaagtatttcagccagaatagtctgcccctgggaggcagcggcggcggcatgatcaactaccagacccccgtgagcttcaaggacgtggtggtgggcttcacccaggaggagtggcacaggctgaaccccacccagagggccctgtacagggacgtgatgctggagacctacagcaacctggtgagcgtgggctacgagggcaccaagcccgacgtgatcctgaggctggagcaggaggaggccccctggatcggcgaggccgcctgcctgggctgccactgctgggaggacggcggcccaagcagcggcgcccctcctcccagcggcggcagcccagccggctccccaacctctaccgaggagggcacctctgagtccgccacccccgagagcggccctggcacctccaccgagcccagcgagggcagcgcacccggcagccctgccggcagccccacctccacagaggagggaaccagcaccgagcccagcgaaggcagcgccccaggcaccagcaccgagcctagtgagcaggagattaaacggatcaacaagatcagaagaagacttgtgaaagacagcaacaccaagaaggccggcaagacaggccccatgaaaaccctgctggttagagtgatgacacccgatctgagagagcggctggaaaacctgagaaagaagcctgaaaatatcccccagcccatcagcaatacatctagagccaacctgaataagctgctgaccgattacaccgaaatgaagaaggcgatcctgcatgtgtactgggaagagttccagaaggaccctgtgggcctgatgagccgggtggcccagcctgccagcaagaagatcgatcagaacaagctgaaacctgagatggacgagaagggcaacctgaccaccgccggctttgcctgctctcagtgtggccagcccctgttcgtgtacaagctggagcaggtgtctgagaagggcaaggcttacaccaactacttcggacggtgcaatgtggccgagcacgaaaagctgatcctgctggcccagctgaagcccgagaaggatagcgacgaagccgtgacatatagcctgggaaagtttgggcagagggccctggatttctacagcattcatgtgaccaaggagtccacccaccccgtgaagcccctggcccagatcgccggaaacagatacgcctccggacctgtgggaaaggccctgagcgacgcatgtatgggcacaatcgcctccttcctgtctaagtaccaggacatcatcatcgaacaccagaaggtggtgaagggcaaccagaagagactggagagcctgcgggagctggccggcaaggaaaacctggaataccctagcgtgaccctgccacctcagcctcacaccaaggagggcgttgatgcctacaacgaagtgatcgcccgggtgcgaatgtgggtgaacctgaacctgtggcagaagctgaagctaagcagagatgatgccaagcctctgctgagactgaagggattcccttcctttcctctggtcgagagacaggccaacgaagtggactggtgggacatggtgtgtaacgtgaagaagctgatcaacgagaaaaaggaggatggcaaggtgttttggcagaatctggctggctacaagagacaggaagccctgagaccatacctgagcagcgaggaagatcggaagaagggaaagaaattcgctcggtaccagctgggcgacctgctgctgcacctggaaaagaagcacggcgaggactggggaaaggtgtacgacgaggcctgggagcggattgacaagaaagtggaaggcctgagcaagcacatcaagctggaagaggaacggagaagcgaggacgcccagagcaaggccgccctgaccgactggctgcgggctaaggccagcttcgtgatcgagggcctgaaggaggccgacaaggacgagttctgcagatgcgagctgaagctgcagaagtggtacggggacctgcggggaaagcccttcgccatcgaagccgagaacagcatcctggacatcagcggcttcagcaagcagtacaactgtgccttcatctggcagaaggacggcgtgaagaagctgaacctgtacctgatcatcaactacttcaagggcggcaagctgcggttcaagaagatcaaacctgaagccttcgaagccaacagattctacaccgtgatcaacaaaaagagcggcgagatcgtgcccatggaggtgaacttcaacttcgacgaccccaacctgatcatcctgcctctggcctttggcaagagacagggcagagaattcatctggaacgacctgctgtccctggaaaccggcagcctgaagctggccaacggaagagtgatcgagaagacactgtacaacagaagaacccggcaggatgagcctgccctgttcgtggccctgaccttcgagcggcgggaggtcctggactcctccaatatcaaaccaatgaacctgatcggcgtggcaagaggcgaaaacatccccgccgtgatcgccctgaccgaccccgagggctgcccactgagccggtttaaggatagcctgggaaacccaacccacatcctgagaatcggcgagagctataaggagaagcagcggaccatccaggccaagaaggaggtggagcagcggagagccggcggctacagccggaagtacgccagcaaagccaagaatctggcagacgatatggtgagaaacaccgctagagatctgctgtactacgccgtgacccaggatgccatgctgatcttcgccaacctgagccggggcttcggccggcagggcaagcggaccttcatggccgagagacagtacacacggatggaggactggctgaccgccaagctggcctacgagggcctgagcaagacctacctgtccaagacactggcccagtacacctccaagacatgcagcaactgtgggtttaccatcaccagcgccgactacgacagggtgctggagaagctgaagaagacagcaacaggctggatgaccacaattaacggcaaggagctgaaggtggagggccagattacctactacaacagatacaagagacagaacgtagtcaaggacctgtccgtcgagctggatagactgagcgaagaatctgtgaacaacgacatctcctcctggacaaagggcagaagcggagaagctctgagcctcctgaagaaaagattctcccatagacccgtgcaggagaagttcgtgtgcctgaactgcggcttcgagacacacgcagccgagcaagccgccctgaacatcgccagatcctggctgttcctgcggagccaggagtacaagaaataccagacaaacaagacaaccggcaacaccgataagagagccttcgtcgagacctggcagtccttttaccggaagaagcttaaggaggtgtggaaacctgccgtgcggtctggcggatctggcggaggctccaccagccccaagaaaaagagaaaagtctaagctgccttctgcggggcttgccttctggccatgcccttcttctctcccttgcacctgtacctcttggtctttgaataaagcctgagtaggaaggctagcaaaaaaaaaaaaaaaaaaaaaaaaaaaaaaaaaaaaaaaaaaaaaaaaaaaaaaaaaaaaaaaaaaaaaaaaaaaaaaaa

SEQ ID NO: 13523 - RNA, 5785 nt, synthetic construct
  source 1..5785: mol_type = other RNA
aggaaataagagagaaaagaagagtaagaagaaatataagagccaccatggcccctaagaagaagcgtaaagtgagccggatggaacgcctcgtctacgaggtgcggcagaagtgcagaaacatcgaggacatctgcatctcctgcggatctctgaacgtgaccctggagcacccactgttcatcggcggcatgtgccagaactgtaaaaactgttttctggagtgtgcctatcaatacgacgatgacggctaccagagctactgcaccatctgttgcggcggaagagaggtgctgatgtgtggaaataacaactgctgccggtgcttctgcgtggaatgcgtggacctgctggtgggccccggcgccgcccaggccgctattaaggaagatccttggaactgctacatgtgcggccacaagggcacatacggcctgctgagacggagagaggactggcctagcagactgcagatgttcttcgccaataaccacgaccaggagttcgacccccctaaggtgtaccctcccgtccccgccgagaagagaaagcccatccgggtcctgagcctgttcgatggcatcgccaccggtctgctggtgctgaaggacctgggcatccaggtggataggtacattgcctccgaggtgtgcgaggactccatcaccgtgggaatggtgcgtcatcagggcaagatcatgtacgtgggcgacgtgcggagcgtgacacagaagcatatccaggagtggggccctttcgacctggtgatcggcggcagcccttgcaatgacctgagcatcgtgaacccagcccggaagggcctgtacgagggaaccggcagactgttcttcgagttttacagactgctgcacgacgcccggcctaaggaaggcgacgaccggcccttcttttggctgttcgagaatgtggtggccatgggagtcagcgacaagcgggatattagccggttcctggagagcaaccccgtgatgatcgatgccaaggaagtgagcgccgcccaccgggccagatacttctggggcaatctgcctggcatgaacagacccctggccagcaccgtgaacgacaagctggagctgcaggagtgcctggagcacggccggatcgccaagttcagcaaggtgagaaccatcaccacccgaagcaacagcatcaaacaaggcaaggaccagcactttcctgtgttcatgaacgagaaggaggacatcctgtggtgtaccgagatggagagagtgttcgggttcccagtccactacacagatgtcagcaacatgtctagactggccagacagagactgctgggaagaagctggtccgtccctgtgatcagacacctgttcgcccctctgaaggagtacttcgcctgcgtgagcagcggcaacagcaacgccaacagccggggccccagcttctctagcggcctggtgccactgtccctgagagggagccacatgggccccatggagatctacaaaaccgtgagcgcctggaagcggcagcctgtgcgcgtgctgagcctgtttcggaatatcgataaagtcctgaaaagcctgggattcctggagagcggctctggctccggcggtggcaccctgaagtacgtggaggatgtgacaaacgtggtcagacgggatgtggagaagtggggccccttcgatctggtgtacggcagcacccaacccctgggcagctcttgtgaccggtgccctggctggtacatgtttcagttccaccggatcctgcagtacgccctgccgagacaggagtcccagcggccattcttttggattttcatggacaacttgctgctgaccgaggatgaccaggaaactaccactcggttcctgcagaccgaagccgtgaccctgcaggacgtgagaggccgggactaccagaacgccatgcgggtgtggtccaacatccctggactgaaaagcaagcacgcacctctgacccctaaagaagaggagtacctgcaggcccaggtgcggagcagaagcaagctggacgcccctaaggtggatctgctggtgaagaattgcctcctgcccctgagagagtacttcaagtatttcagccagaatagtctgcccctgggaggcagcggcggcggcaccgagggcctggtgatgttcgaggacgtggccgtgtacttcagcagggaggagtggggcctgctgaacgtgacccagaagggcctgtaccaggacgtgatgctggagaacttcgccctggtgagcagcctgggcctggcccccctgaggagccccgtgttcagccagctggagaacgacgagcagctgtgggtgcccagctgggtggacgagacccccgtgagcagggccgaggccaggaggggcggcccaagcagcggcgcccctcctcccagcggcggcagcccagccggctccccaacctctaccgaggagggcacctctgagtccgccacccccgagagcggccctggcacctccaccgagcccagcgagggcagcgcacccggcagccctgccggcagccccacctccacagaggagggaaccagcaccgagcccagcgaaggcagcgccccaggcaccagcaccgagcctagtgagcaggagattaaacggatcaacaagatcagaagaagacttgtgaaagacagcaacaccaagaaggccggcaagacaggccccatgaaaaccctgctggttagagtgatgacacccgatctgagagagcggctggaaaacctgagaaagaagcctgaaaatatcccccagcccatcagcaatacatctagagccaacctgaataagctgctgaccgattacaccgaaatgaagaaggcgatcctgcatgtgtactgggaagagttccagaaggaccctgtgggcctgatgagccgggtggcccagcctgccagcaagaagatcgatcagaacaagctgaaacctgagatggacgagaagggcaacctgaccaccgccggctttgcctgctctcagtgtggccagcccctgttcgtgtacaagctggagcaggtgtctgagaagggcaaggcttacaccaactacttcggacggtgcaatgtggccgagcacgaaaagctgatcctgctggcccagctgaagcccgagaaggatagcgacgaagccgtgacatatagcctgggaaagtttgggcagagggccctggatttctacagcattcatgtgaccaaggagtccacccaccccgtgaagcccctggcccagatcgccggaaacagatacgcctccggacctgtgggaaaggccctgagcgacgcatgtatgggcacaatcgcctccttcctgtctaagtaccaggacatcatcatcgaacaccagaaggtggtgaagggcaaccagaagagactggagagcctgcgggagctggccggcaaggaaaacctggaataccctagcgtgaccctgccacctcagcctcacaccaaggagggcgttgatgcctacaacgaagtgatcgcccgggtgcgaatgtgggtgaacctgaacctgtggcagaagctgaagctaagcagagatgatgccaagcctctgctgagactgaagggattcccttcctttcctctggtcgagagacaggccaacgaagtggactggtgggacatggtgtgtaacgtgaagaagctgatcaacgagaaaaaggaggatggcaaggtgttttggcagaatctggctggctacaagagacaggaagccctgagaccatacctgagcagcgaggaagatcggaagaagggaaagaaattcgctcggtaccagctgggcgacctgctgctgcacctggaaaagaagcacggcgaggactggggaaaggtgtacgacgaggcctgggagcggattgacaagaaagtggaaggcctgagcaagcacatcaagctggaagaggaacggagaagcgaggacgcccagagcaaggccgccctgaccgactggctgcgggctaaggccagcttcgtgatcgagggcctgaaggaggccgacaaggacgagttctgcagatgcgagctgaagctgcagaagtggtacggggacctgcggggaaagcccttcgccatcgaagccgagaacagcatcctggacatcagcggcttcagcaagcagtacaactgtgccttcatctggcagaaggacggcgtgaagaagctgaacctgtacctgatcatcaactacttcaagggcggcaagctgcggttcaagaagatcaaacctgaagccttcgaagccaacagattctacaccgtgatcaacaaaaagagcggcgagatcgtgcccatggaggtgaacttcaacttcgacgaccccaacctgatcatcctgcctctggcctttggcaagagacagggcagagaattcatctggaacgacctgctgtccctggaaaccggcagcctgaagctggccaacggaagagtgatcgagaagacactgtacaacagaagaacccggcaggatgagcctgccctgttcgtggccctgaccttcgagcggcgggaggtcctggactcctccaatatcaaaccaatgaacctgatcggcgtggcaagaggcgaaaacatccccgccgtgatcgccctgaccgaccccgagggctgcccactgagccggtttaaggatagcctgggaaacccaacccacatcctgagaatcggcgagagctataaggagaagcagcggaccatccaggccaagaaggaggtggagcagcggagagccggcggctacagccggaagtacgccagcaaagccaagaatctggcagacgatatggtgagaaacaccgctagagatctgctgtactacgccgtgacccaggatgccatgctgatcttcgccaacctgagccggggcttcggccggcagggcaagcggaccttcatggccgagagacagtacacacggatggaggactggctgaccgccaagctggcctacgagggcctgagcaagacctacctgtccaagacactggcccagtacacctccaagacatgcagcaactgtgggtttaccatcaccagcgccgactacgacagggtgctggagaagctgaagaagacagcaacaggctggatgaccacaattaacggcaaggagctgaaggtggagggccagattacctactacaacagatacaagagacagaacgtagtcaaggacctgtccgtcgagctggatagactgagcgaagaatctgtgaacaacgacatctcctcctggacaaagggcagaagcggagaagctctgagcctcctgaagaaaagattctcccatagacccgtgcaggagaagttcgtgtgcctgaactgcggcttcgagacacacgcagccgagcaagccgccctgaacatcgccagatcctggctgttcctgcggagccaggagtacaagaaataccagacaaacaagacaaccggcaacaccgataagagagccttcgtcgagacctggcagtccttttaccggaagaagcttaaggaggtgtggaaacctgccgtgcggtctggcggatctggcggaggctccaccagccccaagaaaaagagaaaagtctaagctgccttctgcggggcttgccttctggccatgcccttcttctctcccttgcacctgtacctcttggtctttgaataaagcctgagtaggaaggctagcaaaaaaaaaaaaaaaaaaaaaaaaaaaaaaaaaaaaaaaaaaaaaaaaaaaaaaaaaaaaaaaaaaaaaaaaaaaaaaaa

SEQ ID NO: 13524 - RNA, 5785 nt, synthetic construct
  source 1..5785: mol_type = other RNA
aggaaataagagagaaaagaagagtaagaagaaatataagagccaccatggcccctaagaagaagcgtaaagtgagccggatggaacgcctcgtctacgaggtgcggcagaagtgcagaaacatcgaggacatctgcatctcctgcggatctctgaacgtgaccctggagcacccactgttcatcggcggcatgtgccagaactgtaaaaactgttttctggagtgtgcctatcaatacgacgatgacggctaccagagctactgcaccatctgttgcggcggaagagaggtgctgatgtgtggaaataacaactgctgccggtgcttctgcgtggaatgcgtggacctgctggtgggccccggcgccgcccaggccgctattaaggaagatccttggaactgctacatgtgcggccacaagggcacatacggcctgctgagacggagagaggactggcctagcagactgcagatgttcttcgccaataaccacgaccaggagttcgacccccctaaggtgtaccctcccgtccccgccgagaagagaaagcccatccgggtcctgagcctgttcgatggcatcgccaccggtctgctggtgctgaaggacctgggcatccaggtggataggtacattgcctccgaggtgtgcgaggactccatcaccgtgggaatggtgcgtcatcagggcaagatcatgtacgtgggcgacgtgcggagcgtgacacagaagcatatccaggagtggggccctttcgacctggtgatcggcggcagcccttgcaatgacctgagcatcgtgaacccagcccggaagggcctgtacgagggaaccggcagactgttcttcgagttttacagactgctgcacgacgcccggcctaaggaaggcgacgaccggcccttcttttggctgttcgagaatgtggtggccatgggagtcagcgacaagcgggatattagccggttcctggagagcaaccccgtgatgatcgatgccaaggaagtgagcgccgcccaccgggccagatacttctggggcaatctgcctggcatgaacagacccctggccagcaccgtgaacgacaagctggagctgcaggagtgcctggagcacggccggatcgccaagttcagcaaggtgagaaccatcaccacccgaagcaacagcatcaaacaaggcaaggaccagcactttcctgtgttcatgaacgagaaggaggacatcctgtggtgtaccgagatggagagagtgttcgggttcccagtccactacacagatgtcagcaacatgtctagactggccagacagagactgctgggaagaagctggtccgtccctgtgatcagacacctgttcgcccctctgaaggagtacttcgcctgcgtgagcagcggcaacagcaacgccaacagccggggccccagcttctctagcggcctggtgccactgtccctgagagggagccacatgggccccatggagatctacaaaaccgtgagcgcctggaagcggcagcctgtgcgcgtgctgagcctgtttcggaatatcgataaagtcctgaaaagcctgggattcctggagagcggctctggctccggcggtggcaccctgaagtacgtggaggatgtgacaaacgtggtcagacgggatgtggagaagtggggccccttcgatctggtgtacggcagcacccaacccctgggcagctcttgtgaccggtgccctggctggtacatgtttcagttccaccggatcctgcagtacgccctgccgagacaggagtcccagcggccattcttttggattttcatggacaacttgctgctgaccgaggatgaccaggaaactaccactcggttcctgcagaccgaagccgtgaccctgcaggacgtgagaggccgggactaccagaacgccatgcgggtgtggtccaacatccctggactgaaaagcaagcacgcacctctgacccctaaagaagaggagtacctgcaggcccaggtgcggagcagaagcaagctggacgcccctaaggtggatctgctggtgaagaattgcctcctgcccctgagagagtacttcaagtatttcagccagaatagtctgcccctgggaggcagcggcggcggcttccaggagagcgtgaccttcaaggacgtgagcgtggacttcacccagggcgagtggggccagctggaccccgcccagaagaacctgtacagggacgtgatgctggagaactacaggaccctggtgagcctgggcctgcaggtgttcaagcccgaggtgatctacaggctggagaggggcgaggccccctggatcctggagagggagatcagcaggggcccctgccccgactggcccgagaccggcggcccaagcagcggcgcccctcctcccagcggcggcagcccagccggctccccaacctctaccgaggagggcacctctgagtccgccacccccgagagcggccctggcacctccaccgagcccagcgagggcagcgcacccggcagccctgccggcagccccacctccacagaggagggaaccagcaccgagcccagcgaaggcagcgccccaggcaccagcaccgagcctagtgagcaggagattaaacggatcaacaagatcagaagaagacttgtgaaagacagcaacaccaagaaggccggcaagacaggccccatgaaaaccctgctggttagagtgatgacacccgatctgagagagcggctggaaaacctgagaaagaagcctgaaaatatcccccagcccatcagcaatacatctagagccaacctgaataagctgctgaccgattacaccgaaatgaagaaggcgatcctgcatgtgtactgggaagagttccagaaggaccctgtgggcctgatgagccgggtggcccagcctgccagcaagaagatcgatcagaacaagctgaaacctgagatggacgagaagggcaacctgaccaccgccggctttgcctgctctcagtgtggccagcccctgttcgtgtacaagctggagcaggtgtctgagaagggcaaggcttacaccaactacttcggacggtgcaatgtggccgagcacgaaaagctgatcctgctggcccagctgaagcccgagaaggatagcgacgaagccgtgacatatagcctgggaaagtttgggcagagggccctggatttctacagcattcatgtgaccaaggagtccacccaccccgtgaagcccctggcccagatcgccggaaacagatacgcctccggacctgtgggaaaggccctgagcgacgcatgtatgggcacaatcgcctccttcctgtctaagtaccaggacatcatcatcgaacaccagaaggtggtgaagggcaaccagaagagactggagagcctgcgggagctggccggcaaggaaaacctggaataccctagcgtgaccctgccacctcagcctcacaccaaggagggcgttgatgcctacaacgaagtgatcgcccgggtgcgaatgtgggtgaacctgaacctgtggcagaagctgaagctaagcagagatgatgccaagcctctgctgagactgaagggattcccttcctttcctctggtcgagagacaggccaacgaagtggactggtgggacatggtgtgtaacgtgaagaagctgatcaacgagaaaaaggaggatggcaaggtgttttggcagaatctggctggctacaagagacaggaagccctgagaccatacctgagcagcgaggaagatcggaagaagggaaagaaattcgctcggtaccagctgggcgacctgctgctgcacctggaaaagaagcacggcgaggactggggaaaggtgtacgacgaggcctgggagcggattgacaagaaagtggaaggcctgagcaagcacatcaagctggaagaggaacggagaagcgaggacgcccagagcaaggccgccctgaccgactggctgcgggctaaggccagcttcgtgatcgagggcctgaaggaggccgacaaggacgagttctgcagatgcgagctgaagctgcagaagtggtacggggacctgcggggaaagcccttcgccatcgaagccgagaacagcatcctggacatcagcggcttcagcaagcagtacaactgtgccttcatctggcagaaggacggcgtgaagaagctgaacctgtacctgatcatcaactacttcaagggcggcaagctgcggttcaagaagatcaaacctgaagccttcgaagccaacagattctacaccgtgatcaacaaaaagagcggcgagatcgtgcccatggaggtgaacttcaacttcgacgaccccaacctgatcatcctgcctctggcctttggcaagagacagggcagagaattcatctggaacgacctgctgtccctggaaaccggcagcctgaagctggccaacggaagagtgatcgagaagacactgtacaacagaagaacccggcaggatgagcctgccctgttcgtggccctgaccttcgagcggcgggaggtcctggactcctccaatatcaaaccaatgaacctgatcggcgtggcaagaggcgaaaacatccccgccgtgatcgccctgaccgaccccgagggctgcccactgagccggtttaaggatagcctgggaaacccaacccacatcctgagaatcggcgagagctataaggagaagcagcggaccatccaggccaagaaggaggtggagcagcggagagccggcggctacagccggaagtacgccagcaaagccaagaatctggcagacgatatggtgagaaacaccgctagagatctgctgtactacgccgtgacccaggatgccatgctgatcttcgccaacctgagccggggcttcggccggcagggcaagcggaccttcatggccgagagacagtacacacggatggaggactggctgaccgccaagctggcctacgagggcctgagcaagacctacctgtccaagacactggcccagtacacctccaagacatgcagcaactgtgggtttaccatcaccagcgccgactacgacagggtgctggagaagctgaagaagacagcaacaggctggatgaccacaattaacggcaaggagctgaaggtggagggccagattacctactacaacagatacaagagacagaacgtagtcaaggacctgtccgtcgagctggatagactgagcgaagaatctgtgaacaacgacatctcctcctggacaaagggcagaagcggagaagctctgagcctcctgaagaaaagattctcccatagacccgtgcaggagaagttcgtgtgcctgaactgcggcttcgagacacacgcagccgagcaagccgccctgaacatcgccagatcctggctgttcctgcggagccaggagtacaagaaataccagacaaacaagacaaccggcaacaccgataagagagccttcgtcgagacctggcagtccttttaccggaagaagcttaaggaggtgtggaaacctgccgtgcggtctggcggatctggcggaggctccaccagccccaagaaaaagagaaaagtctaagctgccttctgcggggcttgccttctggccatgcccttcttctctcccttgcacctgtacctcttggtctttgaataaagcctgagtaggaaggctagcaaaaaaaaaaaaaaaaaaaaaaaaaaaaaaaaaaaaaaaaaaaaaaaaaaaaaaaaaaaaaaaaaaaaaaaaaaaaaaaa

SEQ ID NO: 13525 - RNA, 5785 nt, synthetic construct
  source 1..5785: mol_type = other RNA
aggaaataagagagaaaagaagagtaagaagaaatataagagccaccatggcccctaagaagaagcgtaaagtgagccggatggaacgcctcgtctacgaggtgcggcagaagtgcagaaacatcgaggacatctgcatctcctgcggatctctgaacgtgaccctggagcacccactgttcatcggcggcatgtgccagaactgtaaaaactgttttctggagtgtgcctatcaatacgacgatgacggctaccagagctactgcaccatctgttgcggcggaagagaggtgctgatgtgtggaaataacaactgctgccggtgcttctgcgtggaatgcgtggacctgctggtgggccccggcgccgcccaggccgctattaaggaagatccttggaactgctacatgtgcggccacaagggcacatacggcctgctgagacggagagaggactggcctagcagactgcagatgttcttcgccaataaccacgaccaggagttcgacccccctaaggtgtaccctcccgtccccgccgagaagagaaagcccatccgggtcctgagcctgttcgatggcatcgccaccggtctgctggtgctgaaggacctgggcatccaggtggataggtacattgcctccgaggtgtgcgaggactccatcaccgtgggaatggtgcgtcatcagggcaagatcatgtacgtgggcgacgtgcggagcgtgacacagaagcatatccaggagtggggccctttcgacctggtgatcggcggcagcccttgcaatgacctgagcatcgtgaacccagcccggaagggcctgtacgagggaaccggcagactgttcttcgagttttacagactgctgcacgacgcccggcctaaggaaggcgacgaccggcccttcttttggctgttcgagaatgtggtggccatgggagtcagcgacaagcgggatattagccggttcctggagagcaaccccgtgatgatcgatgccaaggaagtgagcgccgcccaccgggccagatacttctggggcaatctgcctggcatgaacagacccctggccagcaccgtgaacgacaagctggagctgcaggagtgcctggagcacggccggatcgccaagttcagcaaggtgagaaccatcaccacccgaagcaacagcatcaaacaaggcaaggaccagcactttcctgtgttcatgaacgagaaggaggacatcctgtggtgtaccgagatggagagagtgttcgggttcccagtccactacacagatgtcagcaacatgtctagactggccagacagagactgctgggaagaagctggtccgtccctgtgatcagacacctgttcgcccctctgaaggagtacttcgcctgcgtgagcagcggcaacagcaacgccaacagccggggccccagcttctctagcggcctggtgccactgtccctgagagggagccacatgggccccatggagatctacaaaaccgtgagcgcctggaagcggcagcctgtgcgcgtgctgagcctgtttcggaatatcgataaagtcctgaaaagcctgggattcctggagagcggctctggctccggcggtggcaccctgaagtacgtggaggatgtgacaaacgtggtcagacgggatgtggagaagtggggccccttcgatctggtgtacggcagcacccaacccctgggcagctcttgtgaccggtgccctggctggtacatgtttcagttccaccggatcctgcagtacgccctgccgagacaggagtcccagcggccattcttttggattttcatggacaacttgctgctgaccgaggatgaccaggaaactaccactcggttcctgcagaccgaagccgtgaccctgcaggacgtgagaggccgggactaccagaacgccatgcgggtgtggtccaacatccctggactgaaaagcaagcacgcacctctgacccctaaagaagaggagtacctgcaggcccaggtgcggagcagaagcaagctggacgcccctaaggtggatctgctggtgaagaattgcctcctgcccctgagagagtacttcaagtatttcagccagaatagtctgcccctgggaggcagcggcggcggcatctgggacctggtgatgttcagggacgtggccgtggacttcagccaggaggagtgggagtgcctgaacagctaccagaggaacctgtacagggacgtgatcctggagaactacagcaacctggtgagcctgggctgcagcatcagcaagcccgacgtgatcaccctgctggagcagggcaaggagccctggatggtgatgagggacgagaagaggaggtggaccctggacctggagagcaggggcggcccaagcagcggcgcccctcctcccagcggcggcagcccagccggctccccaacctctaccgaggagggcacctctgagtccgccacccccgagagcggccctggcacctccaccgagcccagcgagggcagcgcacccggcagccctgccggcagccccacctccacagaggagggaaccagcaccgagcccagcgaaggcagcgccccaggcaccagcaccgagcctagtgagcaggagattaaacggatcaacaagatcagaagaagacttgtgaaagacagcaacaccaagaaggccggcaagacaggccccatgaaaaccctgctggttagagtgatgacacccgatctgagagagcggctggaaaacctgagaaagaagcctgaaaatatcccccagcccatcagcaatacatctagagccaacctgaataagctgctgaccgattacaccgaaatgaagaaggcgatcctgcatgtgtactgggaagagttccagaaggaccctgtgggcctgatgagccgggtggcccagcctgccagcaagaagatcgatcagaacaagctgaaacctgagatggacgagaagggcaacctgaccaccgccggctttgcctgctctcagtgtggccagcccctgttcgtgtacaagctggagcaggtgtctgagaagggcaaggcttacaccaactacttcggacggtgcaatgtggccgagcacgaaaagctgatcctgctggcccagctgaagcccgagaaggatagcgacgaagccgtgacatatagcctgggaaagtttgggcagagggccctggatttctacagcattcatgtgaccaaggagtccacccaccccgtgaagcccctggcccagatcgccggaaacagatacgcctccggacctgtgggaaaggccctgagcgacgcatgtatgggcacaatcgcctccttcctgtctaagtaccaggacatcatcatcgaacaccagaaggtggtgaagggcaaccagaagagactggagagcctgcgggagctggccggcaaggaaaacctggaataccctagcgtgaccctgccacctcagcctcacaccaaggagggcgttgatgcctacaacgaagtgatcgcccgggtgcgaatgtgggtgaacctgaacctgtggcagaagctgaagctaagcagagatgatgccaagcctctgctgagactgaagggattcccttcctttcctctggtcgagagacaggccaacgaagtggactggtgggacatggtgtgtaacgtgaagaagctgatcaacgagaaaaaggaggatggcaaggtgttttggcagaatctggctggctacaagagacaggaagccctgagaccatacctgagcagcgaggaagatcggaagaagggaaagaaattcgctcggtaccagctgggcgacctgctgctgcacctggaaaagaagcacggcgaggactggggaaaggtgtacgacgaggcctgggagcggattgacaagaaagtggaaggcctgagcaagcacatcaagctggaagaggaacggagaagcgaggacgcccagagcaaggccgccctgaccgactggctgcgggctaaggccagcttcgtgatcgagggcctgaaggaggccgacaaggacgagttctgcagatgcgagctgaagctgcagaagtggtacggggacctgcggggaaagcccttcgccatcgaagccgagaacagcatcctggacatcagcggcttcagcaagcagtacaactgtgccttcatctggcagaaggacggcgtgaagaagctgaacctgtacctgatcatcaactacttcaagggcggcaagctgcggttcaagaagatcaaacctgaagccttcgaagccaacagattctacaccgtgatcaacaaaaagagcggcgagatcgtgcccatggaggtgaacttcaacttcgacgaccccaacctgatcatcctgcctctggcctttggcaagagacagggcagagaattcatctggaacgacctgctgtccctggaaaccggcagcctgaagctggccaacggaagagtgatcgagaagacactgtacaacagaagaacccggcaggatgagcctgccctgttcgtggccctgaccttcgagcggcgggaggtcctggactcctccaatatcaaaccaatgaacctgatcggcgtggcaagaggcgaaaacatccccgccgtgatcgccctgaccgaccccgagggctgcccactgagccggtttaaggatagcctgggaaacccaacccacatcctgagaatcggcgagagctataaggagaagcagcggaccatccaggccaagaaggaggtggagcagcggagagccggcggctacagccggaagtacgccagcaaagccaagaatctggcagacgatatggtgagaaacaccgctagagatctgctgtactacgccgtgacccaggatgccatgctgatcttcgccaacctgagccggggcttcggccggcagggcaagcggaccttcatggccgagagacagtacacacggatggaggactggctgaccgccaagctggcctacgagggcctgagcaagacctacctgtccaagacactggcccagtacacctccaagacatgcagcaactgtgggtttaccatcaccagcgccgactacgacagggtgctggagaagctgaagaagacagcaacaggctggatgaccacaattaacggcaaggagctgaaggtggagggccagattacctactacaacagatacaagagacagaacgtagtcaaggacctgtccgtcgagctggatagactgagcgaagaatctgtgaacaacgacatctcctcctggacaaagggcagaagcggagaagctctgagcctcctgaagaaaagattctcccatagacccgtgcaggagaagttcgtgtgcctgaactgcggcttcgagacacacgcagccgagcaagccgccctgaacatcgccagatcctggctgttcctgcggagccaggagtacaagaaataccagacaaacaagacaaccggcaacaccgataagagagccttcgtcgagacctggcagtccttttaccggaagaagcttaaggaggtgtggaaacctgccgtgcggtctggcggatctggcggaggctccaccagccccaagaaaaagagaaaagtctaagctgccttctgcggggcttgccttctggccatgcccttcttctctcccttgcacctgtacctcttggtctttgaataaagcctgagtaggaaggctagcaaaaaaaaaaaaaaaaaaaaaaaaaaaaaaaaaaaaaaaaaaaaaaaaaaaaaaaaaaaaaaaaaaaaaaaaaaaaaaaa

SEQ ID NO: 13526 - RNA, 5785 nt, synthetic construct
  source 1..5785: mol_type = other RNA
aggaaataagagagaaaagaagagtaagaagaaatataagagccaccatggcccctaagaagaagcgtaaagtgagccggatggaacgcctcgtctacgaggtgcggcagaagtgcagaaacatcgaggacatctgcatctcctgcggatctctgaacgtgaccctggagcacccactgttcatcggcggcatgtgccagaactgtaaaaactgttttctggagtgtgcctatcaatacgacgatgacggctaccagagctactgcaccatctgttgcggcggaagagaggtgctgatgtgtggaaataacaactgctgccggtgcttctgcgtggaatgcgtggacctgctggtgggccccggcgccgcccaggccgctattaaggaagatccttggaactgctacatgtgcggccacaagggcacatacggcctgctgagacggagagaggactggcctagcagactgcagatgttcttcgccaataaccacgaccaggagttcgacccccctaaggtgtaccctcccgtccccgccgagaagagaaagcccatccgggtcctgagcctgttcgatggcatcgccaccggtctgctggtgctgaaggacctgggcatccaggtggataggtacattgcctccgaggtgtgcgaggactccatcaccgtgggaatggtgcgtcatcagggcaagatcatgtacgtgggcgacgtgcggagcgtgacacagaagcatatccaggagtggggccctttcgacctggtgatcggcggcagcccttgcaatgacctgagcatcgtgaacccagcccggaagggcctgtacgagggaaccggcagactgttcttcgagttttacagactgctgcacgacgcccggcctaaggaaggcgacgaccggcccttcttttggctgttcgagaatgtggtggccatgggagtcagcgacaagcgggatattagccggttcctggagagcaaccccgtgatgatcgatgccaaggaagtgagcgccgcccaccgggccagatacttctggggcaatctgcctggcatgaacagacccctggccagcaccgtgaacgacaagctggagctgcaggagtgcctggagcacggccggatcgccaagttcagcaaggtgagaaccatcaccacccgaagcaacagcatcaaacaaggcaaggaccagcactttcctgtgttcatgaacgagaaggaggacatcctgtggtgtaccgagatggagagagtgttcgggttcccagtccactacacagatgtcagcaacatgtctagactggccagacagagactgctgggaagaagctggtccgtccctgtgatcagacacctgttcgcccctctgaaggagtacttcgcctgcgtgagcagcggcaacagcaacgccaacagccggggccccagcttctctagcggcctggtgccactgtccctgagagggagccacatgggccccatggagatctacaaaaccgtgagcgcctggaagcggcagcctgtgcgcgtgctgagcctgtttcggaatatcgataaagtcctgaaaagcctgggattcctggagagcggctctggctccggcggtggcaccctgaagtacgtggaggatgtgacaaacgtggtcagacgggatgtggagaagtggggccccttcgatctggtgtacggcagcacccaacccctgggcagctcttgtgaccggtgccctggctggtacatgtttcagttccaccggatcctgcagtacgccctgccgagacaggagtcccagcggccattcttttggattttcatggacaacttgctgctgaccgaggatgaccaggaaactaccactcggttcctgcagaccgaagccgtgaccctgcaggacgtgagaggccgggactaccagaacgccatgcgggtgtggtccaacatccctggactgaaaagcaagcacgcacctctgacccctaaagaagaggagtacctgcaggcccaggtgcggagcagaagcaagctggacgcccctaaggtggatctgctggtgaagaattgcctcctgcccctgagagagtacttcaagtatttcagccagaatagtctgcccctgggaggcagcggcggcggcaggcccagggccgtgaagttcggcgacgtggccctgtacttcagcagggaggagtggggctgcctgaggcccgcccagagggccctgtacagggacgtgatgcaggagacctacggccacctgggcgccctgggctgcgccggccccaagcccgccctgatcagctggctggagaggaacaccgacgactgggagcccgccgccctggacccccagcagtgccccaagggcgtggccgtgcagggcggcccaagcagcggcgcccctcctcccagcggcggcagcccagccggctccccaacctctaccgaggagggcacctctgagtccgccacccccgagagcggccctggcacctccaccgagcccagcgagggcagcgcacccggcagccctgccggcagccccacctccacagaggagggaaccagcaccgagcccagcgaaggcagcgccccaggcaccagcaccgagcctagtgagcaggagattaaacggatcaacaagatcagaagaagacttgtgaaagacagcaacaccaagaaggccggcaagacaggccccatgaaaaccctgctggttagagtgatgacacccgatctgagagagcggctggaaaacctgagaaagaagcctgaaaatatcccccagcccatcagcaatacatctagagccaacctgaataagctgctgaccgattacaccgaaatgaagaaggcgatcctgcatgtgtactgggaagagttccagaaggaccctgtgggcctgatgagccgggtggcccagcctgccagcaagaagatcgatcagaacaagctgaaacctgagatggacgagaagggcaacctgaccaccgccggctttgcctgctctcagtgtggccagcccctgttcgtgtacaagctggagcaggtgtctgagaagggcaaggcttacaccaactacttcggacggtgcaatgtggccgagcacgaaaagctgatcctgctggcccagctgaagcccgagaaggatagcgacgaagccgtgacatatagcctgggaaagtttgggcagagggccctggatttctacagcattcatgtgaccaaggagtccacccaccccgtgaagcccctggcccagatcgccggaaacagatacgcctccggacctgtgggaaaggccctgagcgacgcatgtatgggcacaatcgcctccttcctgtctaagtaccaggacatcatcatcgaacaccagaaggtggtgaagggcaaccagaagagactggagagcctgcgggagctggccggcaaggaaaacctggaataccctagcgtgaccctgccacctcagcctcacaccaaggagggcgttgatgcctacaacgaagtgatcgcccgggtgcgaatgtgggtgaacctgaacctgtggcagaagctgaagctaagcagagatgatgccaagcctctgctgagactgaagggattcccttcctttcctctggtcgagagacaggccaacgaagtggactggtgggacatggtgtgtaacgtgaagaagctgatcaacgagaaaaaggaggatggcaaggtgttttggcagaatctggctggctacaagagacaggaagccctgagaccatacctgagcagcgaggaagatcggaagaagggaaagaaattcgctcggtaccagctgggcgacctgctgctgcacctggaaaagaagcacggcgaggactggggaaaggtgtacgacgaggcctgggagcggattgacaagaaagtggaaggcctgagcaagcacatcaagctggaagaggaacggagaagcgaggacgcccagagcaaggccgccctgaccgactggctgcgggctaaggccagcttcgtgatcgagggcctgaaggaggccgacaaggacgagttctgcagatgcgagctgaagctgcagaagtggtacggggacctgcggggaaagcccttcgccatcgaagccgagaacagcatcctggacatcagcggcttcagcaagcagtacaactgtgccttcatctggcagaaggacggcgtgaagaagctgaacctgtacctgatcatcaactacttcaagggcggcaagctgcggttcaagaagatcaaacctgaagccttcgaagccaacagattctacaccgtgatcaacaaaaagagcggcgagatcgtgcccatggaggtgaacttcaacttcgacgaccccaacctgatcatcctgcctctggcctttggcaagagacagggcagagaattcatctggaacgacctgctgtccctggaaaccggcagcctgaagctggccaacggaagagtgatcgagaagacactgtacaacagaagaacccggcaggatgagcctgccctgttcgtggccctgaccttcgagcggcgggaggtcctggactcctccaatatcaaaccaatgaacctgatcggcgtggcaagaggcgaaaacatccccgccgtgatcgccctgaccgaccccgagggctgcccactgagccggtttaaggatagcctgggaaacccaacccacatcctgagaatcggcgagagctataaggagaagcagcggaccatccaggccaagaaggaggtggagcagcggagagccggcggctacagccggaagtacgccagcaaagccaagaatctggcagacgatatggtgagaaacaccgctagagatctgctgtactacgccgtgacccaggatgccatgctgatcttcgccaacctgagccggggcttcggccggcagggcaagcggaccttcatggccgagagacagtacacacggatggaggactggctgaccgccaagctggcctacgagggcctgagcaagacctacctgtccaagacactggcccagtacacctccaagacatgcagcaactgtgggtttaccatcaccagcgccgactacgacagggtgctggagaagctgaagaagacagcaacaggctggatgaccacaattaacggcaaggagctgaaggtggagggccagattacctactacaacagatacaagagacagaacgtagtcaaggacctgtccgtcgagctggatagactgagcgaagaatctgtgaacaacgacatctcctcctggacaaagggcagaagcggagaagctctgagcctcctgaagaaaagattctcccatagacccgtgcaggagaagttcgtgtgcctgaactgcggcttcgagacacacgcagccgagcaagccgccctgaacatcgccagatcctggctgttcctgcggagccaggagtacaagaaataccagacaaacaagacaaccggcaacaccgataagagagccttcgtcgagacctggcagtccttttaccggaagaagcttaaggaggtgtggaaacctgccgtgcggtctggcggatctggcggaggctccaccagccccaagaaaaagagaaaagtctaagctgccttctgcggggcttgccttctggccatgcccttcttctctcccttgcacctgtacctcttggtctttgaataaagcctgagtaggaaggctagcaaaaaaaaaaaaaaaaaaaaaaaaaaaaaaaaaaaaaaaaaaaaaaaaaaaaaaaaaaaaaaaaaaaaaaaaaaaaaaaa

SEQ ID NO: 13527 - RNA, 5785 nt, synthetic construct
  source 1..5785: mol_type = other RNA
aggaaataagagagaaaagaagagtaagaagaaatataagagccaccatggcccctaagaagaagcgtaaagtgagccggatggaacgcctcgtctacgaggtgcggcagaagtgcagaaacatcgaggacatctgcatctcctgcggatctctgaacgtgaccctggagcacccactgttcatcggcggcatgtgccagaactgtaaaaactgttttctggagtgtgcctatcaatacgacgatgacggctaccagagctactgcaccatctgttgcggcggaagagaggtgctgatgtgtggaaataacaactgctgccggtgcttctgcgtggaatgcgtggacctgctggtgggccccggcgccgcccaggccgctattaaggaagatccttggaactgctacatgtgcggccacaagggcacatacggcctgctgagacggagagaggactggcctagcagactgcagatgttcttcgccaataaccacgaccaggagttcgacccccctaaggtgtaccctcccgtccccgccgagaagagaaagcccatccgggtcctgagcctgttcgatggcatcgccaccggtctgctggtgctgaaggacctgggcatccaggtggataggtacattgcctccgaggtgtgcgaggactccatcaccgtgggaatggtgcgtcatcagggcaagatcatgtacgtgggcgacgtgcggagcgtgacacagaagcatatccaggagtggggccctttcgacctggtgatcggcggcagcccttgcaatgacctgagcatcgtgaacccagcccggaagggcctgtacgagggaaccggcagactgttcttcgagttttacagactgctgcacgacgcccggcctaaggaaggcgacgaccggcccttcttttggctgttcgagaatgtggtggccatgggagtcagcgacaagcgggatattagccggttcctggagagcaaccccgtgatgatcgatgccaaggaagtgagcgccgcccaccgggccagatacttctggggcaatctgcctggcatgaacagacccctggccagcaccgtgaacgacaagctggagctgcaggagtgcctggagcacggccggatcgccaagttcagcaaggtgagaaccatcaccacccgaagcaacagcatcaaacaaggcaaggaccagcactttcctgtgttcatgaacgagaaggaggacatcctgtggtgtaccgagatggagagagtgttcgggttcccagtccactacacagatgtcagcaacatgtctagactggccagacagagactgctgggaagaagctggtccgtccctgtgatcagacacctgttcgcccctctgaaggagtacttcgcctgcgtgagcagcggcaacagcaacgccaacagccggggccccagcttctctagcggcctggtgccactgtccctgagagggagccacatgggccccatggagatctacaaaaccgtgagcgcctggaagcggcagcctgtgcgcgtgctgagcctgtttcggaatatcgataaagtcctgaaaagcctgggattcctggagagcggctctggctccggcggtggcaccctgaagtacgtggaggatgtgacaaacgtggtcagacgggatgtggagaagtggggccccttcgatctggtgtacggcagcacccaacccctgggcagctcttgtgaccggtgccctggctggtacatgtttcagttccaccggatcctgcagtacgccctgccgagacaggagtcccagcggccattcttttggattttcatggacaacttgctgctgaccgaggatgaccaggaaactaccactcggttcctgcagaccgaagccgtgaccctgcaggacgtgagaggccgggactaccagaacgccatgcgggtgtggtccaacatccctggactgaaaagcaagcacgcacctctgacccctaaagaagaggagtacctgcaggcccaggtgcggagcagaagcaagctggacgcccctaaggtggatctgctggtgaagaattgcctcctgcccctgagagagtacttcaagtatttcagccagaatagtctgcccctgggaggcagcggcggcggcgtgcacggcagcgtgaccttcagggacgtggccatcgacttcagccaggaggagtgggagtgcctgcagcccgcccagaagaccctgtacagggacgtgatgctggagaactacagccacctgatcagcctgggcagcagcatcagcaagcccgacgtgatcaccctgctggagcaggagaaggagccctggatggtgaggaggaaggagaccaacaggtggtaccccgacctggagagcaagggcggcccaagcagcggcgcccctcctcccagcggcggcagcccagccggctccccaacctctaccgaggagggcacctctgagtccgccacccccgagagcggccctggcacctccaccgagcccagcgagggcagcgcacccggcagccctgccggcagccccacctccacagaggagggaaccagcaccgagcccagcgaaggcagcgccccaggcaccagcaccgagcctagtgagcaggagattaaacggatcaacaagatcagaagaagacttgtgaaagacagcaacaccaagaaggccggcaagacaggccccatgaaaaccctgctggttagagtgatgacacccgatctgagagagcggctggaaaacctgagaaagaagcctgaaaatatcccccagcccatcagcaatacatctagagccaacctgaataagctgctgaccgattacaccgaaatgaagaaggcgatcctgcatgtgtactgggaagagttccagaaggaccctgtgggcctgatgagccgggtggcccagcctgccagcaagaagatcgatcagaacaagctgaaacctgagatggacgagaagggcaacctgaccaccgccggctttgcctgctctcagtgtggccagcccctgttcgtgtacaagctggagcaggtgtctgagaagggcaaggcttacaccaactacttcggacggtgcaatgtggccgagcacgaaaagctgatcctgctggcccagctgaagcccgagaaggatagcgacgaagccgtgacatatagcctgggaaagtttgggcagagggccctggatttctacagcattcatgtgaccaaggagtccacccaccccgtgaagcccctggcccagatcgccggaaacagatacgcctccggacctgtgggaaaggccctgagcgacgcatgtatgggcacaatcgcctccttcctgtctaagtaccaggacatcatcatcgaacaccagaaggtggtgaagggcaaccagaagagactggagagcctgcgggagctggccggcaaggaaaacctggaataccctagcgtgaccctgccacctcagcctcacaccaaggagggcgttgatgcctacaacgaagtgatcgcccgggtgcgaatgtgggtgaacctgaacctgtggcagaagctgaagctaagcagagatgatgccaagcctctgctgagactgaagggattcccttcctttcctctggtcgagagacaggccaacgaagtggactggtgggacatggtgtgtaacgtgaagaagctgatcaacgagaaaaaggaggatggcaaggtgttttggcagaatctggctggctacaagagacaggaagccctgagaccatacctgagcagcgaggaagatcggaagaagggaaagaaattcgctcggtaccagctgggcgacctgctgctgcacctggaaaagaagcacggcgaggactggggaaaggtgtacgacgaggcctgggagcggattgacaagaaagtggaaggcctgagcaagcacatcaagctggaagaggaacggagaagcgaggacgcccagagcaaggccgccctgaccgactggctgcgggctaaggccagcttcgtgatcgagggcctgaaggaggccgacaaggacgagttctgcagatgcgagctgaagctgcagaagtggtacggggacctgcggggaaagcccttcgccatcgaagccgagaacagcatcctggacatcagcggcttcagcaagcagtacaactgtgccttcatctggcagaaggacggcgtgaagaagctgaacctgtacctgatcatcaactacttcaagggcggcaagctgcggttcaagaagatcaaacctgaagccttcgaagccaacagattctacaccgtgatcaacaaaaagagcggcgagatcgtgcccatggaggtgaacttcaacttcgacgaccccaacctgatcatcctgcctctggcctttggcaagagacagggcagagaattcatctggaacgacctgctgtccctggaaaccggcagcctgaagctggccaacggaagagtgatcgagaagacactgtacaacagaagaacccggcaggatgagcctgccctgttcgtggccctgaccttcgagcggcgggaggtcctggactcctccaatatcaaaccaatgaacctgatcggcgtggcaagaggcgaaaacatccccgccgtgatcgccctgaccgaccccgagggctgcccactgagccggtttaaggatagcctgggaaacccaacccacatcctgagaatcggcgagagctataaggagaagcagcggaccatccaggccaagaaggaggtggagcagcggagagccggcggctacagccggaagtacgccagcaaagccaagaatctggcagacgatatggtgagaaacaccgctagagatctgctgtactacgccgtgacccaggatgccatgctgatcttcgccaacctgagccggggcttcggccggcagggcaagcggaccttcatggccgagagacagtacacacggatggaggactggctgaccgccaagctggcctacgagggcctgagcaagacctacctgtccaagacactggcccagtacacctccaagacatgcagcaactgtgggtttaccatcaccagcgccgactacgacagggtgctggagaagctgaagaagacagcaacaggctggatgaccacaattaacggcaaggagctgaaggtggagggccagattacctactacaacagatacaagagacagaacgtagtcaaggacctgtccgtcgagctggatagactgagcgaagaatctgtgaacaacgacatctcctcctggacaaagggcagaagcggagaagctctgagcctcctgaagaaaagattctcccatagacccgtgcaggagaagttcgtgtgcctgaactgcggcttcgagacacacgcagccgagcaagccgccctgaacatcgccagatcctggctgttcctgcggagccaggagtacaagaaataccagacaaacaagacaaccggcaacaccgataagagagccttcgtcgagacctggcagtccttttaccggaagaagcttaaggaggtgtggaaacctgccgtgcggtctggcggatctggcggaggctccaccagccccaagaaaaagagaaaagtctaagctgccttctgcggggcttgccttctggccatgcccttcttctctcccttgcacctgtacctcttggtctttgaataaagcctgagtaggaaggctagcaaaaaaaaaaaaaaaaaaaaaaaaaaaaaaaaaaaaaaaaaaaaaaaaaaaaaaaaaaaaaaaaaaaaaaaaaaaaaaaa

SEQ ID NO: 13528 - RNA, 5782 nt, synthetic construct
  source 1..5782: mol_type = other RNA
aggaaataagagagaaaagaagagtaagaagaaatataagagccaccatggcccctaagaagaagcgtaaagtgagccggatggaacgcctcgtctacgaggtgcggcagaagtgcagaaacatcgaggacatctgcatctcctgcggatctctgaacgtgaccctggagcacccactgttcatcggcggcatgtgccagaactgtaaaaactgttttctggagtgtgcctatcaatacgacgatgacggctaccagagctactgcaccatctgttgcggcggaagagaggtgctgatgtgtggaaataacaactgctgccggtgcttctgcgtggaatgcgtggacctgctggtgggccccggcgccgcccaggccgctattaaggaagatccttggaactgctacatgtgcggccacaagggcacatacggcctgctgagacggagagaggactggcctagcagactgcagatgttcttcgccaataaccacgaccaggagttcgacccccctaaggtgtaccctcccgtccccgccgagaagagaaagcccatccgggtcctgagcctgttcgatggcatcgccaccggtctgctggtgctgaaggacctgggcatccaggtggataggtacattgcctccgaggtgtgcgaggactccatcaccgtgggaatggtgcgtcatcagggcaagatcatgtacgtgggcgacgtgcggagcgtgacacagaagcatatccaggagtggggccctttcgacctggtgatcggcggcagcccttgcaatgacctgagcatcgtgaacccagcccggaagggcctgtacgagggaaccggcagactgttcttcgagttttacagactgctgcacgacgcccggcctaaggaaggcgacgaccggcccttcttttggctgttcgagaatgtggtggccatgggagtcagcgacaagcgggatattagccggttcctggagagcaaccccgtgatgatcgatgccaaggaagtgagcgccgcccaccgggccagatacttctggggcaatctgcctggcatgaacagacccctggccagcaccgtgaacgacaagctggagctgcaggagtgcctggagcacggccggatcgccaagttcagcaaggtgagaaccatcaccacccgaagcaacagcatcaaacaaggcaaggaccagcactttcctgtgttcatgaacgagaaggaggacatcctgtggtgtaccgagatggagagagtgttcgggttcccagtccactacacagatgtcagcaacatgtctagactggccagacagagactgctgggaagaagctggtccgtccctgtgatcagacacctgttcgcccctctgaaggagtacttcgcctgcgtgagcagcggcaacagcaacgccaacagccggggccccagcttctctagcggcctggtgccactgtccctgagagggagccacatgggccccatggagatctacaaaaccgtgagcgcctggaagcggcagcctgtgcgcgtgctgagcctgtttcggaatatcgataaagtcctgaaaagcctgggattcctggagagcggctctggctccggcggtggcaccctgaagtacgtggaggatgtgacaaacgtggtcagacgggatgtggagaagtggggccccttcgatctggtgtacggcagcacccaacccctgggcagctcttgtgaccggtgccctggctggtacatgtttcagttccaccggatcctgcagtacgccctgccgagacaggagtcccagcggccattcttttggattttcatggacaacttgctgctgaccgaggatgaccaggaaactaccactcggttcctgcagaccgaagccgtgaccctgcaggacgtgagaggccgggactaccagaacgccatgcgggtgtggtccaacatccctggactgaaaagcaagcacgcacctctgacccctaaagaagaggagtacctgcaggcccaggtgcggagcagaagcaagctggacgcccctaaggtggatctgctggtgaagaattgcctcctgcccctgagagagtacttcaagtatttcagccagaatagtctgcccctgggaggcagcggcggcggcatggtgctggtgagcttcgaggacgtggccgtggacttcacctgggaggagtggcaggccctggacgccgcccagaggaccctgtacagggacgtgatgctggagacctacagcagcctggtgagcctgggccactgcatggccaagcccgagctgatcttcaacctggagcagggcctgggccccaggagcaccgccggcgccagcgtgtggaacctgagcggcaggaccgaggacagcggcggcccaagcagcggcgcccctcctcccagcggcggcagcccagccggctccccaacctctaccgaggagggcacctctgagtccgccacccccgagagcggccctggcacctccaccgagcccagcgagggcagcgcacccggcagccctgccggcagccccacctccacagaggagggaaccagcaccgagcccagcgaaggcagcgccccaggcaccagcaccgagcctagtgagcaggagattaaacggatcaacaagatcagaagaagacttgtgaaagacagcaacaccaagaaggccggcaagacaggccccatgaaaaccctgctggttagagtgatgacacccgatctgagagagcggctggaaaacctgagaaagaagcctgaaaatatcccccagcccatcagcaatacatctagagccaacctgaataagctgctgaccgattacaccgaaatgaagaaggcgatcctgcatgtgtactgggaagagttccagaaggaccctgtgggcctgatgagccgggtggcccagcctgccagcaagaagatcgatcagaacaagctgaaacctgagatggacgagaagggcaacctgaccaccgccggctttgcctgctctcagtgtggccagcccctgttcgtgtacaagctggagcaggtgtctgagaagggcaaggcttacaccaactacttcggacggtgcaatgtggccgagcacgaaaagctgatcctgctggcccagctgaagcccgagaaggatagcgacgaagccgtgacatatagcctgggaaagtttgggcagagggccctggatttctacagcattcatgtgaccaaggagtccacccaccccgtgaagcccctggcccagatcgccggaaacagatacgcctccggacctgtgggaaaggccctgagcgacgcatgtatgggcacaatcgcctccttcctgtctaagtaccaggacatcatcatcgaacaccagaaggtggtgaagggcaaccagaagagactggagagcctgcgggagctggccggcaaggaaaacctggaataccctagcgtgaccctgccacctcagcctcacaccaaggagggcgttgatgcctacaacgaagtgatcgcccgggtgcgaatgtgggtgaacctgaacctgtggcagaagctgaagctaagcagagatgatgccaagcctctgctgagactgaagggattcccttcctttcctctggtcgagagacaggccaacgaagtggactggtgggacatggtgtgtaacgtgaagaagctgatcaacgagaaaaaggaggatggcaaggtgttttggcagaatctggctggctacaagagacaggaagccctgagaccatacctgagcagcgaggaagatcggaagaagggaaagaaattcgctcggtaccagctgggcgacctgctgctgcacctggaaaagaagcacggcgaggactggggaaaggtgtacgacgaggcctgggagcggattgacaagaaagtggaaggcctgagcaagcacatcaagctggaagaggaacggagaagcgaggacgcccagagcaaggccgccctgaccgactggctgcgggctaaggccagcttcgtgatcgagggcctgaaggaggccgacaaggacgagttctgcagatgcgagctgaagctgcagaagtggtacggggacctgcggggaaagcccttcgccatcgaagccgagaacagcatcctggacatcagcggcttcagcaagcagtacaactgtgccttcatctggcagaaggacggcgtgaagaagctgaacctgtacctgatcatcaactacttcaagggcggcaagctgcggttcaagaagatcaaacctgaagccttcgaagccaacagattctacaccgtgatcaacaaaaagagcggcgagatcgtgcccatggaggtgaacttcaacttcgacgaccccaacctgatcatcctgcctctggcctttggcaagagacagggcagagaattcatctggaacgacctgctgtccctggaaaccggcagcctgaagctggccaacggaagagtgatcgagaagacactgtacaacagaagaacccggcaggatgagcctgccctgttcgtggccctgaccttcgagcggcgggaggtcctggactcctccaatatcaaaccaatgaacctgatcggcgtggcaagaggcgaaaacatccccgccgtgatcgccctgaccgaccccgagggctgcccactgagccggtttaaggatagcctgggaaacccaacccacatcctgagaatcggcgagagctataaggagaagcagcggaccatccaggccaagaaggaggtggagcagcggagagccggcggctacagccggaagtacgccagcaaagccaagaatctggcagacgatatggtgagaaacaccgctagagatctgctgtactacgccgtgacccaggatgccatgctgatcttcgccaacctgagccggggcttcggccggcagggcaagcggaccttcatggccgagagacagtacacacggatggaggactggctgaccgccaagctggcctacgagggcctgagcaagacctacctgtccaagacactggcccagtacacctccaagacatgcagcaactgtgggtttaccatcaccagcgccgactacgacagggtgctggagaagctgaagaagacagcaacaggctggatgaccacaattaacggcaaggagctgaaggtggagggccagattacctactacaacagatacaagagacagaacgtagtcaaggacctgtccgtcgagctggatagactgagcgaagaatctgtgaacaacgacatctcctcctggacaaagggcagaagcggagaagctctgagcctcctgaagaaaagattctcccatagacccgtgcaggagaagttcgtgtgcctgaactgcggcttcgagacacacgcagccgagcaagccgccctgaacatcgccagatcctggctgttcctgcggagccaggagtacaagaaataccagacaaacaagacaaccggcaacaccgataagagagccttcgtcgagacctggcagtccttttaccggaagaagcttaaggaggtgtggaaacctgccgtgcggtctggcggatctggcggaggctccaccagccccaagaaaaagagaaaagtctaagctgccttctgcggggcttgccttctggccatgcccttcttctctcccttgcacctgtacctcttggtctttgaataaagcctgagtaggaaggctagcaaaaaaaaaaaaaaaaaaaaaaaaaaaaaaaaaaaaaaaaaaaaaaaaaaaaaaaaaaaaaaaaaaaaaaaaaaaaaaaa

SEQ ID NO: 13529 - RNA, 5785 nt, synthetic construct
  source 1..5785: mol_type = other RNA
aggaaataagagagaaaagaagagtaagaagaaatataagagccaccatggcccctaagaagaagcgtaaagtgagccggatggaacgcctcgtctacgaggtgcggcagaagtgcagaaacatcgaggacatctgcatctcctgcggatctctgaacgtgaccctggagcacccactgttcatcggcggcatgtgccagaactgtaaaaactgttttctggagtgtgcctatcaatacgacgatgacggctaccagagctactgcaccatctgttgcggcggaagagaggtgctgatgtgtggaaataacaactgctgccggtgcttctgcgtggaatgcgtggacctgctggtgggccccggcgccgcccaggccgctattaaggaagatccttggaactgctacatgtgcggccacaagggcacatacggcctgctgagacggagagaggactggcctagcagactgcagatgttcttcgccaataaccacgaccaggagttcgacccccctaaggtgtaccctcccgtccccgccgagaagagaaagcccatccgggtcctgagcctgttcgatggcatcgccaccggtctgctggtgctgaaggacctgggcatccaggtggataggtacattgcctccgaggtgtgcgaggactccatcaccgtgggaatggtgcgtcatcagggcaagatcatgtacgtgggcgacgtgcggagcgtgacacagaagcatatccaggagtggggccctttcgacctggtgatcggcggcagcccttgcaatgacctgagcatcgtgaacccagcccggaagggcctgtacgagggaaccggcagactgttcttcgagttttacagactgctgcacgacgcccggcctaaggaaggcgacgaccggcccttcttttggctgttcgagaatgtggtggccatgggagtcagcgacaagcgggatattagccggttcctggagagcaaccccgtgatgatcgatgccaaggaagtgagcgccgcccaccgggccagatacttctggggcaatctgcctggcatgaacagacccctggccagcaccgtgaacgacaagctggagctgcaggagtgcctggagcacggccggatcgccaagttcagcaaggtgagaaccatcaccacccgaagcaacagcatcaaacaaggcaaggaccagcactttcctgtgttcatgaacgagaaggaggacatcctgtggtgtaccgagatggagagagtgttcgggttcccagtccactacacagatgtcagcaacatgtctagactggccagacagagactgctgggaagaagctggtccgtccctgtgatcagacacctgttcgcccctctgaaggagtacttcgcctgcgtgagcagcggcaacagcaacgccaacagccggggccccagcttctctagcggcctggtgccactgtccctgagagggagccacatgggccccatggagatctacaaaaccgtgagcgcctggaagcggcagcctgtgcgcgtgctgagcctgtttcggaatatcgataaagtcctgaaaagcctgggattcctggagagcggctctggctccggcggtggcaccctgaagtacgtggaggatgtgacaaacgtggtcagacgggatgtggagaagtggggccccttcgatctggtgtacggcagcacccaacccctgggcagctcttgtgaccggtgccctggctggtacatgtttcagttccaccggatcctgcagtacgccctgccgagacaggagtcccagcggccattcttttggattttcatggacaacttgctgctgaccgaggatgaccaggaaactaccactcggttcctgcagaccgaagccgtgaccctgcaggacgtgagaggccgggactaccagaacgccatgcgggtgtggtccaacatccctggactgaaaagcaagcacgcacctctgacccctaaagaagaggagtacctgcaggcccaggtgcggagcagaagcaagctggacgcccctaaggtggatctgctggtgaagaattgcctcctgcccctgagagagtacttcaagtatttcagccagaatagtctgcccctgggaggcagcggcggcggcatggacaccgtggccctggaggacgtggccgtgaacttcacccaggaggagtgggccctgctgggccccagccagaagaagctgtacagggacgtgatgcaggagaccatcaggaacctggactgcatcaagatgatcagcgaggaccagaacatcgaggaccagtacaagaaccccaagaagaacctgaggtgcaggatggccgagaggctgagcgagagcaaggacaacagccagtgcggcggcggcccaagcagcggcgcccctcctcccagcggcggcagcccagccggctccccaacctctaccgaggagggcacctctgagtccgccacccccgagagcggccctggcacctccaccgagcccagcgagggcagcgcacccggcagccctgccggcagccccacctccacagaggagggaaccagcaccgagcccagcgaaggcagcgccccaggcaccagcaccgagcctagtgagcaggagattaaacggatcaacaagatcagaagaagacttgtgaaagacagcaacaccaagaaggccggcaagacaggccccatgaaaaccctgctggttagagtgatgacacccgatctgagagagcggctggaaaacctgagaaagaagcctgaaaatatcccccagcccatcagcaatacatctagagccaacctgaataagctgctgaccgattacaccgaaatgaagaaggcgatcctgcatgtgtactgggaagagttccagaaggaccctgtgggcctgatgagccgggtggcccagcctgccagcaagaagatcgatcagaacaagctgaaacctgagatggacgagaagggcaacctgaccaccgccggctttgcctgctctcagtgtggccagcccctgttcgtgtacaagctggagcaggtgtctgagaagggcaaggcttacaccaactacttcggacggtgcaatgtggccgagcacgaaaagctgatcctgctggcccagctgaagcccgagaaggatagcgacgaagccgtgacatatagcctgggaaagtttgggcagagggccctggatttctacagcattcatgtgaccaaggagtccacccaccccgtgaagcccctggcccagatcgccggaaacagatacgcctccggacctgtgggaaaggccctgagcgacgcatgtatgggcacaatcgcctccttcctgtctaagtaccaggacatcatcatcgaacaccagaaggtggtgaagggcaaccagaagagactggagagcctgcgggagctggccggcaaggaaaacctggaataccctagcgtgaccctgccacctcagcctcacaccaaggagggcgttgatgcctacaacgaagtgatcgcccgggtgcgaatgtgggtgaacctgaacctgtggcagaagctgaagctaagcagagatgatgccaagcctctgctgagactgaagggattcccttcctttcctctggtcgagagacaggccaacgaagtggactggtgggacatggtgtgtaacgtgaagaagctgatcaacgagaaaaaggaggatggcaaggtgttttggcagaatctggctggctacaagagacaggaagccctgagaccatacctgagcagcgaggaagatcggaagaagggaaagaaattcgctcggtaccagctgggcgacctgctgctgcacctggaaaagaagcacggcgaggactggggaaaggtgtacgacgaggcctgggagcggattgacaagaaagtggaaggcctgagcaagcacatcaagctggaagaggaacggagaagcgaggacgcccagagcaaggccgccctgaccgactggctgcgggctaaggccagcttcgtgatcgagggcctgaaggaggccgacaaggacgagttctgcagatgcgagctgaagctgcagaagtggtacggggacctgcggggaaagcccttcgccatcgaagccgagaacagcatcctggacatcagcggcttcagcaagcagtacaactgtgccttcatctggcagaaggacggcgtgaagaagctgaacctgtacctgatcatcaactacttcaagggcggcaagctgcggttcaagaagatcaaacctgaagccttcgaagccaacagattctacaccgtgatcaacaaaaagagcggcgagatcgtgcccatggaggtgaacttcaacttcgacgaccccaacctgatcatcctgcctctggcctttggcaagagacagggcagagaattcatctggaacgacctgctgtccctggaaaccggcagcctgaagctggccaacggaagagtgatcgagaagacactgtacaacagaagaacccggcaggatgagcctgccctgttcgtggccctgaccttcgagcggcgggaggtcctggactcctccaatatcaaaccaatgaacctgatcggcgtggcaagaggcgaaaacatccccgccgtgatcgccctgaccgaccccgagggctgcccactgagccggtttaaggatagcctgggaaacccaacccacatcctgagaatcggcgagagctataaggagaagcagcggaccatccaggccaagaaggaggtggagcagcggagagccggcggctacagccggaagtacgccagcaaagccaagaatctggcagacgatatggtgagaaacaccgctagagatctgctgtactacgccgtgacccaggatgccatgctgatcttcgccaacctgagccggggcttcggccggcagggcaagcggaccttcatggccgagagacagtacacacggatggaggactggctgaccgccaagctggcctacgagggcctgagcaagacctacctgtccaagacactggcccagtacacctccaagacatgcagcaactgtgggtttaccatcaccagcgccgactacgacagggtgctggagaagctgaagaagacagcaacaggctggatgaccacaattaacggcaaggagctgaaggtggagggccagattacctactacaacagatacaagagacagaacgtagtcaaggacctgtccgtcgagctggatagactgagcgaagaatctgtgaacaacgacatctcctcctggacaaagggcagaagcggagaagctctgagcctcctgaagaaaagattctcccatagacccgtgcaggagaagttcgtgtgcctgaactgcggcttcgagacacacgcagccgagcaagccgccctgaacatcgccagatcctggctgttcctgcggagccaggagtacaagaaataccagacaaacaagacaaccggcaacaccgataagagagccttcgtcgagacctggcagtccttttaccggaagaagcttaaggaggtgtggaaacctgccgtgcggtctggcggatctggcggaggctccaccagccccaagaaaaagagaaaagtctaagctgccttctgcggggcttgccttctggccatgcccttcttctctcccttgcacctgtacctcttggtctttgaataaagcctgagtaggaaggctagcaaaaaaaaaaaaaaaaaaaaaaaaaaaaaaaaaaaaaaaaaaaaaaaaaaaaaaaaaaaaaaaaaaaaaaaaaaaaaaaa

SEQ ID NO: 13530 - RNA, 5785 nt, synthetic construct
  source 1..5785: mol_type = other RNA
aggaaataagagagaaaagaagagtaagaagaaatataagagccaccatggcccctaagaagaagcgtaaagtgagccggatggaacgcctcgtctacgaggtgcggcagaagtgcagaaacatcgaggacatctgcatctcctgcggatctctgaacgtgaccctggagcacccactgttcatcggcggcatgtgccagaactgtaaaaactgttttctggagtgtgcctatcaatacgacgatgacggctaccagagctactgcaccatctgttgcggcggaagagaggtgctgatgtgtggaaataacaactgctgccggtgcttctgcgtggaatgcgtggacctgctggtgggccccggcgccgcccaggccgctattaaggaagatccttggaactgctacatgtgcggccacaagggcacatacggcctgctgagacggagagaggactggcctagcagactgcagatgttcttcgccaataaccacgaccaggagttcgacccccctaaggtgtaccctcccgtccccgccgagaagagaaagcccatccgggtcctgagcctgttcgatggcatcgccaccggtctgctggtgctgaaggacctgggcatccaggtggataggtacattgcctccgaggtgtgcgaggactccatcaccgtgggaatggtgcgtcatcagggcaagatcatgtacgtgggcgacgtgcggagcgtgacacagaagcatatccaggagtggggccctttcgacctggtgatcggcggcagcccttgcaatgacctgagcatcgtgaacccagcccggaagggcctgtacgagggaaccggcagactgttcttcgagttttacagactgctgcacgacgcccggcctaaggaaggcgacgaccggcccttcttttggctgttcgagaatgtggtggccatgggagtcagcgacaagcgggatattagccggttcctggagagcaaccccgtgatgatcgatgccaaggaagtgagcgccgcccaccgggccagatacttctggggcaatctgcctggcatgaacagacccctggccagcaccgtgaacgacaagctggagctgcaggagtgcctggagcacggccggatcgccaagttcagcaaggtgagaaccatcaccacccgaagcaacagcatcaaacaaggcaaggaccagcactttcctgtgttcatgaacgagaaggaggacatcctgtggtgtaccgagatggagagagtgttcgggttcccagtccactacacagatgtcagcaacatgtctagactggccagacagagactgctgggaagaagctggtccgtccctgtgatcagacacctgttcgcccctctgaaggagtacttcgcctgcgtgagcagcggcaacagcaacgccaacagccggggccccagcttctctagcggcctggtgccactgtccctgagagggagccacatgggccccatggagatctacaaaaccgtgagcgcctggaagcggcagcctgtgcgcgtgctgagcctgtttcggaatatcgataaagtcctgaaaagcctgggattcctggagagcggctctggctccggcggtggcaccctgaagtacgtggaggatgtgacaaacgtggtcagacgggatgtggagaagtggggccccttcgatctggtgtacggcagcacccaacccctgggcagctcttgtgaccggtgccctggctggtacatgtttcagttccaccggatcctgcagtacgccctgccgagacaggagtcccagcggccattcttttggattttcatggacaacttgctgctgaccgaggatgaccaggaaactaccactcggttcctgcagaccgaagccgtgaccctgcaggacgtgagaggccgggactaccagaacgccatgcgggtgtggtccaacatccctggactgaaaagcaagcacgcacctctgacccctaaagaagaggagtacctgcaggcccaggtgcggagcagaagcaagctggacgcccctaaggtggatctgctggtgaagaattgcctcctgcccctgagagagtacttcaagtatttcagccagaatagtctgcccctgggaggcagcggcggcggcgcccaggtgtgcgtgaccttcgacgacgtggccgtgaccttcacccaggaggagtggggccacctggaccccgcccagaggaccctgtaccaggaggtgatgctggagacctgcggcctgctgatgagcctgggctgccccgtgcccaggcccgagctgatctaccagctggagcacggccaggagctgtggaccgtgaagagggacctgagcggcagcacctgccccgtggacaagggcaagggcggcccaagcagcggcgcccctcctcccagcggcggcagcccagccggctccccaacctctaccgaggagggcacctctgagtccgccacccccgagagcggccctggcacctccaccgagcccagcgagggcagcgcacccggcagccctgccggcagccccacctccacagaggagggaaccagcaccgagcccagcgaaggcagcgccccaggcaccagcaccgagcctagtgagcaggagattaaacggatcaacaagatcagaagaagacttgtgaaagacagcaacaccaagaaggccggcaagacaggccccatgaaaaccctgctggttagagtgatgacacccgatctgagagagcggctggaaaacctgagaaagaagcctgaaaatatcccccagcccatcagcaatacatctagagccaacctgaataagctgctgaccgattacaccgaaatgaagaaggcgatcctgcatgtgtactgggaagagttccagaaggaccctgtgggcctgatgagccgggtggcccagcctgccagcaagaagatcgatcagaacaagctgaaacctgagatggacgagaagggcaacctgaccaccgccggctttgcctgctctcagtgtggccagcccctgttcgtgtacaagctggagcaggtgtctgagaagggcaaggcttacaccaactacttcggacggtgcaatgtggccgagcacgaaaagctgatcctgctggcccagctgaagcccgagaaggatagcgacgaagccgtgacatatagcctgggaaagtttgggcagagggccctggatttctacagcattcatgtgaccaaggagtccacccaccccgtgaagcccctggcccagatcgccggaaacagatacgcctccggacctgtgggaaaggccctgagcgacgcatgtatgggcacaatcgcctccttcctgtctaagtaccaggacatcatcatcgaacaccagaaggtggtgaagggcaaccagaagagactggagagcctgcgggagctggccggcaaggaaaacctggaataccctagcgtgaccctgccacctcagcctcacaccaaggagggcgttgatgcctacaacgaagtgatcgcccgggtgcgaatgtgggtgaacctgaacctgtggcagaagctgaagctaagcagagatgatgccaagcctctgctgagactgaagggattcccttcctttcctctggtcgagagacaggccaacgaagtggactggtgggacatggtgtgtaacgtgaagaagctgatcaacgagaaaaaggaggatggcaaggtgttttggcagaatctggctggctacaagagacaggaagccctgagaccatacctgagcagcgaggaagatcggaagaagggaaagaaattcgctcggtaccagctgggcgacctgctgctgcacctggaaaagaagcacggcgaggactggggaaaggtgtacgacgaggcctgggagcggattgacaagaaagtggaaggcctgagcaagcacatcaagctggaagaggaacggagaagcgaggacgcccagagcaaggccgccctgaccgactggctgcgggctaaggccagcttcgtgatcgagggcctgaaggaggccgacaaggacgagttctgcagatgcgagctgaagctgcagaagtggtacggggacctgcggggaaagcccttcgccatcgaagccgagaacagcatcctggacatcagcggcttcagcaagcagtacaactgtgccttcatctggcagaaggacggcgtgaagaagctgaacctgtacctgatcatcaactacttcaagggcggcaagctgcggttcaagaagatcaaacctgaagccttcgaagccaacagattctacaccgtgatcaacaaaaagagcggcgagatcgtgcccatggaggtgaacttcaacttcgacgaccccaacctgatcatcctgcctctggcctttggcaagagacagggcagagaattcatctggaacgacctgctgtccctggaaaccggcagcctgaagctggccaacggaagagtgatcgagaagacactgtacaacagaagaacccggcaggatgagcctgccctgttcgtggccctgaccttcgagcggcgggaggtcctggactcctccaatatcaaaccaatgaacctgatcggcgtggcaagaggcgaaaacatccccgccgtgatcgccctgaccgaccccgagggctgcccactgagccggtttaaggatagcctgggaaacccaacccacatcctgagaatcggcgagagctataaggagaagcagcggaccatccaggccaagaaggaggtggagcagcggagagccggcggctacagccggaagtacgccagcaaagccaagaatctggcagacgatatggtgagaaacaccgctagagatctgctgtactacgccgtgacccaggatgccatgctgatcttcgccaacctgagccggggcttcggccggcagggcaagcggaccttcatggccgagagacagtacacacggatggaggactggctgaccgccaagctggcctacgagggcctgagcaagacctacctgtccaagacactggcccagtacacctccaagacatgcagcaactgtgggtttaccatcaccagcgccgactacgacagggtgctggagaagctgaagaagacagcaacaggctggatgaccacaattaacggcaaggagctgaaggtggagggccagattacctactacaacagatacaagagacagaacgtagtcaaggacctgtccgtcgagctggatagactgagcgaagaatctgtgaacaacgacatctcctcctggacaaagggcagaagcggagaagctctgagcctcctgaagaaaagattctcccatagacccgtgcaggagaagttcgtgtgcctgaactgcggcttcgagacacacgcagccgagcaagccgccctgaacatcgccagatcctggctgttcctgcggagccaggagtacaagaaataccagacaaacaagacaaccggcaacaccgataagagagccttcgtcgagacctggcagtccttttaccggaagaagcttaaggaggtgtggaaacctgccgtgcggtctggcggatctggcggaggctccaccagccccaagaaaaagagaaaagtctaagctgccttctgcggggcttgccttctggccatgcccttcttctctcccttgcacctgtacctcttggtctttgaataaagcctgagtaggaaggctagcaaaaaaaaaaaaaaaaaaaaaaaaaaaaaaaaaaaaaaaaaaaaaaaaaaaaaaaaaaaaaaaaaaaaaaaaaaaaaaaa

SEQ ID NO: 13531 - RNA, 5794 nt, synthetic construct
  source 1..5794: mol_type = other RNA
aggaaataagagagaaaagaagagtaagaagaaatataagagccaccatggcccctaagaagaagcgtaaagtgagccggatggaacgcctcgtctacgaggtgcggcagaagtgcagaaacatcgaggacatctgcatctcctgcggatctctgaacgtgaccctggagcacccactgttcatcggcggcatgtgccagaactgtaaaaactgttttctggagtgtgcctatcaatacgacgatgacggctaccagagctactgcaccatctgttgcggcggaagagaggtgctgatgtgtggaaataacaactgctgccggtgcttctgcgtggaatgcgtggacctgctggtgggccccggcgccgcccaggccgctattaaggaagatccttggaactgctacatgtgcggccacaagggcacatacggcctgctgagacggagagaggactggcctagcagactgcagatgttcttcgccaataaccacgaccaggagttcgacccccctaaggtgtaccctcccgtccccgccgagaagagaaagcccatccgggtcctgagcctgttcgatggcatcgccaccggtctgctggtgctgaaggacctgggcatccaggtggataggtacattgcctccgaggtgtgcgaggactccatcaccgtgggaatggtgcgtcatcagggcaagatcatgtacgtgggcgacgtgcggagcgtgacacagaagcatatccaggagtggggccctttcgacctggtgatcggcggcagcccttgcaatgacctgagcatcgtgaacccagcccggaagggcctgtacgagggaaccggcagactgttcttcgagttttacagactgctgcacgacgcccggcctaaggaaggcgacgaccggcccttcttttggctgttcgagaatgtggtggccatgggagtcagcgacaagcgggatattagccggttcctggagagcaaccccgtgatgatcgatgccaaggaagtgagcgccgcccaccgggccagatacttctggggcaatctgcctggcatgaacagacccctggccagcaccgtgaacgacaagctggagctgcaggagtgcctggagcacggccggatcgccaagttcagcaaggtgagaaccatcaccacccgaagcaacagcatcaaacaaggcaaggaccagcactttcctgtgttcatgaacgagaaggaggacatcctgtggtgtaccgagatggagagagtgttcgggttcccagtccactacacagatgtcagcaacatgtctagactggccagacagagactgctgggaagaagctggtccgtccctgtgatcagacacctgttcgcccctctgaaggagtacttcgcctgcgtgagcagcggcaacagcaacgccaacagccggggccccagcttctctagcggcctggtgccactgtccctgagagggagccacatgggccccatggagatctacaaaaccgtgagcgcctggaagcggcagcctgtgcgcgtgctgagcctgtttcggaatatcgataaagtcctgaaaagcctgggattcctggagagcggctctggctccggcggtggcaccctgaagtacgtggaggatgtgacaaacgtggtcagacgggatgtggagaagtggggccccttcgatctggtgtacggcagcacccaacccctgggcagctcttgtgaccggtgccctggctggtacatgtttcagttccaccggatcctgcagtacgccctgccgagacaggagtcccagcggccattcttttggattttcatggacaacttgctgctgaccgaggatgaccaggaaactaccactcggttcctgcagaccgaagccgtgaccctgcaggacgtgagaggccgggactaccagaacgccatgcgggtgtggtccaacatccctggactgaaaagcaagcacgcacctctgacccctaaagaagaggagtacctgcaggcccaggtgcggagcagaagcaagctggacgcccctaaggtggatctgctggtgaagaattgcctcctgcccctgagagagtacttcaagtatttcagccagaatagtctgcccctgggaggcagcggcggcggcgtgagcttcgaggacgtggccgtgcacttcacccaggaggagtgggccctgctggaccccagccagaagagcctgtacagggacgtgatgctggagacctgcaggaacctggccgccatcggctacatctgggaggagcagaccatcgaggacgactgcaagaacttcggcaggtaccagaggcacaccatcagccacagcgagtacaccccctacgagcacgaggagtgcggcaacatgccctgcgaccccggcggcccaagcagcggcgcccctcctcccagcggcggcagcccagccggctccccaacctctaccgaggagggcacctctgagtccgccacccccgagagcggccctggcacctccaccgagcccagcgagggcagcgcacccggcagccctgccggcagccccacctccacagaggagggaaccagcaccgagcccagcgaaggcagcgccccaggcaccagcaccgagcctagtgagcaggagattaaacggatcaacaagatcagaagaagacttgtgaaagacagcaacaccaagaaggccggcaagacaggccccatgaaaaccctgctggttagagtgatgacacccgatctgagagagcggctggaaaacctgagaaagaagcctgaaaatatcccccagcccatcagcaatacatctagagccaacctgaataagctgctgaccgattacaccgaaatgaagaaggcgatcctgcatgtgtactgggaagagttccagaaggaccctgtgggcctgatgagccgggtggcccagcctgccagcaagaagatcgatcagaacaagctgaaacctgagatggacgagaagggcaacctgaccaccgccggctttgcctgctctcagtgtggccagcccctgttcgtgtacaagctggagcaggtgtctgagaagggcaaggcttacaccaactacttcggacggtgcaatgtggccgagcacgaaaagctgatcctgctggcccagctgaagcccgagaaggatagcgacgaagccgtgacatatagcctgggaaagtttgggcagagggccctggatttctacagcattcatgtgaccaaggagtccacccaccccgtgaagcccctggcccagatcgccggaaacagatacgcctccggacctgtgggaaaggccctgagcgacgcatgtatgggcacaatcgcctccttcctgtctaagtaccaggacatcatcatcgaacaccagaaggtggtgaagggcaaccagaagagactggagagcctgcgggagctggccggcaaggaaaacctggaataccctagcgtgaccctgccacctcagcctcacaccaaggagggcgttgatgcctacaacgaagtgatcgcccgggtgcgaatgtgggtgaacctgaacctgtggcagaagctgaagctaagcagagatgatgccaagcctctgctgagactgaagggattcccttcctttcctctggtcgagagacaggccaacgaagtggactggtgggacatggtgtgtaacgtgaagaagctgatcaacgagaaaaaggaggatggcaaggtgttttggcagaatctggctggctacaagagacaggaagccctgagaccatacctgagcagcgaggaagatcggaagaagggaaagaaattcgctcggtaccagctgggcgacctgctgctgcacctggaaaagaagcacggcgaggactggggaaaggtgtacgacgaggcctgggagcggattgacaagaaagtggaaggcctgagcaagcacatcaagctggaagaggaacggagaagcgaggacgcccagagcaaggccgccctgaccgactggctgcgggctaaggccagcttcgtgatcgagggcctgaaggaggccgacaaggacgagttctgcagatgcgagctgaagctgcagaagtggtacggggacctgcggggaaagcccttcgccatcgaagccgagaacagcatcctggacatcagcggcttcagcaagcagtacaactgtgccttcatctggcagaaggacggcgtgaagaagctgaacctgtacctgatcatcaactacttcaagggcggcaagctgcggttcaagaagatcaaacctgaagccttcgaagccaacagattctacaccgtgatcaacaaaaagagcggcgagatcgtgcccatggaggtgaacttcaacttcgacgaccccaacctgatcatcctgcctctggcctttggcaagagacagggcagagaattcatctggaacgacctgctgtccctggaaaccggcagcctgaagctggccaacggaagagtgatcgagaagacactgtacaacagaagaacccggcaggatgagcctgccctgttcgtggccctgaccttcgagcggcgggaggtcctggactcctccaatatcaaaccaatgaacctgatcggcgtggcaagaggcgaaaacatccccgccgtgatcgccctgaccgaccccgagggctgcccactgagccggtttaaggatagcctgggaaacccaacccacatcctgagaatcggcgagagctataaggagaagcagcggaccatccaggccaagaaggaggtggagcagcggagagccggcggctacagccggaagtacgccagcaaagccaagaatctggcagacgatatggtgagaaacaccgctagagatctgctgtactacgccgtgacccaggatgccatgctgatcttcgccaacctgagccggggcttcggccggcagggcaagcggaccttcatggccgagagacagtacacacggatggaggactggctgaccgccaagctggcctacgagggcctgagcaagacctacctgtccaagacactggcccagtacacctccaagacatgcagcaactgtgggtttaccatcaccagcgccgactacgacagggtgctggagaagctgaagaagacagcaacaggctggatgaccacaattaacggcaaggagctgaaggtggagggccagattacctactacaacagatacaagagacagaacgtagtcaaggacctgtccgtcgagctggatagactgagcgaagaatctgtgaacaacgacatctcctcctggacaaagggcagaagcggagaagctctgagcctcctgaagaaaagattctcccatagacccgtgcaggagaagttcgtgtgcctgaactgcggcttcgagacacacgcagccgagcaagccgccctgaacatcgccagatcctggctgttcctgcggagccaggagtacaagaaataccagacaaacaagacaaccggcaacaccgataagagagccttcgtcgagacctggcagtccttttaccggaagaagcttaaggaggtgtggaaacctgccgtgcggtctggcggatctggcggaggctccaccagccccaagaaaaagagaaaagtctaagctgccttctgcggggcttgccttctggccatgcccttcttctctcccttgcacctgtacctcttggtctttgaataaagcctgagtaggaaggctagcaaaaaaaaaaaaaaaaaaaaaaaaaaaaaaaaaaaaaaaaaaaaaaaaaaaaaaaaaaaaaaaaaaaaaaaaaaaaaaaa

SEQ ID NO: 13532 - RNA, 5785 nt, synthetic construct
  source 1..5785: mol_type = other RNA
aggaaataagagagaaaagaagagtaagaagaaatataagagccaccatggcccctaagaagaagcgtaaagtgagccggatggaacgcctcgtctacgaggtgcggcagaagtgcagaaacatcgaggacatctgcatctcctgcggatctctgaacgtgaccctggagcacccactgttcatcggcggcatgtgccagaactgtaaaaactgttttctggagtgtgcctatcaatacgacgatgacggctaccagagctactgcaccatctgttgcggcggaagagaggtgctgatgtgtggaaataacaactgctgccggtgcttctgcgtggaatgcgtggacctgctggtgggccccggcgccgcccaggccgctattaaggaagatccttggaactgctacatgtgcggccacaagggcacatacggcctgctgagacggagagaggactggcctagcagactgcagatgttcttcgccaataaccacgaccaggagttcgacccccctaaggtgtaccctcccgtccccgccgagaagagaaagcccatccgggtcctgagcctgttcgatggcatcgccaccggtctgctggtgctgaaggacctgggcatccaggtggataggtacattgcctccgaggtgtgcgaggactccatcaccgtgggaatggtgcgtcatcagggcaagatcatgtacgtgggcgacgtgcggagcgtgacacagaagcatatccaggagtggggccctttcgacctggtgatcggcggcagcccttgcaatgacctgagcatcgtgaacccagcccggaagggcctgtacgagggaaccggcagactgttcttcgagttttacagactgctgcacgacgcccggcctaaggaaggcgacgaccggcccttcttttggctgttcgagaatgtggtggccatgggagtcagcgacaagcgggatattagccggttcctggagagcaaccccgtgatgatcgatgccaaggaagtgagcgccgcccaccgggccagatacttctggggcaatctgcctggcatgaacagacccctggccagcaccgtgaacgacaagctggagctgcaggagtgcctggagcacggccggatcgccaagttcagcaaggtgagaaccatcaccacccgaagcaacagcatcaaacaaggcaaggaccagcactttcctgtgttcatgaacgagaaggaggacatcctgtggtgtaccgagatggagagagtgttcgggttcccagtccactacacagatgtcagcaacatgtctagactggccagacagagactgctgggaagaagctggtccgtccctgtgatcagacacctgttcgcccctctgaaggagtacttcgcctgcgtgagcagcggcaacagcaacgccaacagccggggccccagcttctctagcggcctggtgccactgtccctgagagggagccacatgggccccatggagatctacaaaaccgtgagcgcctggaagcggcagcctgtgcgcgtgctgagcctgtttcggaatatcgataaagtcctgaaaagcctgggattcctggagagcggctctggctccggcggtggcaccctgaagtacgtggaggatgtgacaaacgtggtcagacgggatgtggagaagtggggccccttcgatctggtgtacggcagcacccaacccctgggcagctcttgtgaccggtgccctggctggtacatgtttcagttccaccggatcctgcagtacgccctgccgagacaggagtcccagcggccattcttttggattttcatggacaacttgctgctgaccgaggatgaccaggaaactaccactcggttcctgcagaccgaagccgtgaccctgcaggacgtgagaggccgggactaccagaacgccatgcgggtgtggtccaacatccctggactgaaaagcaagcacgcacctctgacccctaaagaagaggagtacctgcaggcccaggtgcggagcagaagcaagctggacgcccctaaggtggatctgctggtgaagaattgcctcctgcccctgagagagtacttcaagtatttcagccagaatagtctgcccctgggaggcagcggcggcggcgccgaggagctggtgaccttcgaggacgtggccgtgcacttcagccccgaggagctgccctacctgagcgccagccagaggaacctgtacagggaggtgatgctggagaactacaggaacctggtgagcctgggctaccagttccccaagcccgacatcatcagccagctggaggaggaggagagccacgccagggaggaggacggcagcaccgtgacctgccaggactgggaggagcagagcggcggcccaagcagcggcgcccctcctcccagcggcggcagcccagccggctccccaacctctaccgaggagggcacctctgagtccgccacccccgagagcggccctggcacctccaccgagcccagcgagggcagcgcacccggcagccctgccggcagccccacctccacagaggagggaaccagcaccgagcccagcgaaggcagcgccccaggcaccagcaccgagcctagtgagcaggagattaaacggatcaacaagatcagaagaagacttgtgaaagacagcaacaccaagaaggccggcaagacaggccccatgaaaaccctgctggttagagtgatgacacccgatctgagagagcggctggaaaacctgagaaagaagcctgaaaatatcccccagcccatcagcaatacatctagagccaacctgaataagctgctgaccgattacaccgaaatgaagaaggcgatcctgcatgtgtactgggaagagttccagaaggaccctgtgggcctgatgagccgggtggcccagcctgccagcaagaagatcgatcagaacaagctgaaacctgagatggacgagaagggcaacctgaccaccgccggctttgcctgctctcagtgtggccagcccctgttcgtgtacaagctggagcaggtgtctgagaagggcaaggcttacaccaactacttcggacggtgcaatgtggccgagcacgaaaagctgatcctgctggcccagctgaagcccgagaaggatagcgacgaagccgtgacatatagcctgggaaagtttgggcagagggccctggatttctacagcattcatgtgaccaaggagtccacccaccccgtgaagcccctggcccagatcgccggaaacagatacgcctccggacctgtgggaaaggccctgagcgacgcatgtatgggcacaatcgcctccttcctgtctaagtaccaggacatcatcatcgaacaccagaaggtggtgaagggcaaccagaagagactggagagcctgcgggagctggccggcaaggaaaacctggaataccctagcgtgaccctgccacctcagcctcacaccaaggagggcgttgatgcctacaacgaagtgatcgcccgggtgcgaatgtgggtgaacctgaacctgtggcagaagctgaagctaagcagagatgatgccaagcctctgctgagactgaagggattcccttcctttcctctggtcgagagacaggccaacgaagtggactggtgggacatggtgtgtaacgtgaagaagctgatcaacgagaaaaaggaggatggcaaggtgttttggcagaatctggctggctacaagagacaggaagccctgagaccatacctgagcagcgaggaagatcggaagaagggaaagaaattcgctcggtaccagctgggcgacctgctgctgcacctggaaaagaagcacggcgaggactggggaaaggtgtacgacgaggcctgggagcggattgacaagaaagtggaaggcctgagcaagcacatcaagctggaagaggaacggagaagcgaggacgcccagagcaaggccgccctgaccgactggctgcgggctaaggccagcttcgtgatcgagggcctgaaggaggccgacaaggacgagttctgcagatgcgagctgaagctgcagaagtggtacggggacctgcggggaaagcccttcgccatcgaagccgagaacagcatcctggacatcagcggcttcagcaagcagtacaactgtgccttcatctggcagaaggacggcgtgaagaagctgaacctgtacctgatcatcaactacttcaagggcggcaagctgcggttcaagaagatcaaacctgaagccttcgaagccaacagattctacaccgtgatcaacaaaaagagcggcgagatcgtgcccatggaggtgaacttcaacttcgacgaccccaacctgatcatcctgcctctggcctttggcaagagacagggcagagaattcatctggaacgacctgctgtccctggaaaccggcagcctgaagctggccaacggaagagtgatcgagaagacactgtacaacagaagaacccggcaggatgagcctgccctgttcgtggccctgaccttcgagcggcgggaggtcctggactcctccaatatcaaaccaatgaacctgatcggcgtggcaagaggcgaaaacatccccgccgtgatcgccctgaccgaccccgagggctgcccactgagccggtttaaggatagcctgggaaacccaacccacatcctgagaatcggcgagagctataaggagaagcagcggaccatccaggccaagaaggaggtggagcagcggagagccggcggctacagccggaagtacgccagcaaagccaagaatctggcagacgatatggtgagaaacaccgctagagatctgctgtactacgccgtgacccaggatgccatgctgatcttcgccaacctgagccggggcttcggccggcagggcaagcggaccttcatggccgagagacagtacacacggatggaggactggctgaccgccaagctggcctacgagggcctgagcaagacctacctgtccaagacactggcccagtacacctccaagacatgcagcaactgtgggtttaccatcaccagcgccgactacgacagggtgctggagaagctgaagaagacagcaacaggctggatgaccacaattaacggcaaggagctgaaggtggagggccagattacctactacaacagatacaagagacagaacgtagtcaaggacctgtccgtcgagctggatagactgagcgaagaatctgtgaacaacgacatctcctcctggacaaagggcagaagcggagaagctctgagcctcctgaagaaaagattctcccatagacccgtgcaggagaagttcgtgtgcctgaactgcggcttcgagacacacgcagccgagcaagccgccctgaacatcgccagatcctggctgttcctgcggagccaggagtacaagaaataccagacaaacaagacaaccggcaacaccgataagagagccttcgtcgagacctggcagtccttttaccggaagaagcttaaggaggtgtggaaacctgccgtgcggtctggcggatctggcggaggctccaccagccccaagaaaaagagaaaagtctaagctgccttctgcggggcttgccttctggccatgcccttcttctctcccttgcacctgtacctcttggtctttgaataaagcctgagtaggaaggctagcaaaaaaaaaaaaaaaaaaaaaaaaaaaaaaaaaaaaaaaaaaaaaaaaaaaaaaaaaaaaaaaaaaaaaaaaaaaaaaaa

SEQ ID NO: 13533 - RNA, 5782 nt, synthetic construct
  source 1..5782: mol_type = other RNA
aggaaataagagagaaaagaagagtaagaagaaatataagagccaccatggcccctaagaagaagcgtaaagtgagccggatggaacgcctcgtctacgaggtgcggcagaagtgcagaaacatcgaggacatctgcatctcctgcggatctctgaacgtgaccctggagcacccactgttcatcggcggcatgtgccagaactgtaaaaactgttttctggagtgtgcctatcaatacgacgatgacggctaccagagctactgcaccatctgttgcggcggaagagaggtgctgatgtgtggaaataacaactgctgccggtgcttctgcgtggaatgcgtggacctgctggtgggccccggcgccgcccaggccgctattaaggaagatccttggaactgctacatgtgcggccacaagggcacatacggcctgctgagacggagagaggactggcctagcagactgcagatgttcttcgccaataaccacgaccaggagttcgacccccctaaggtgtaccctcccgtccccgccgagaagagaaagcccatccgggtcctgagcctgttcgatggcatcgccaccggtctgctggtgctgaaggacctgggcatccaggtggataggtacattgcctccgaggtgtgcgaggactccatcaccgtgggaatggtgcgtcatcagggcaagatcatgtacgtgggcgacgtgcggagcgtgacacagaagcatatccaggagtggggccctttcgacctggtgatcggcggcagcccttgcaatgacctgagcatcgtgaacccagcccggaagggcctgtacgagggaaccggcagactgttcttcgagttttacagactgctgcacgacgcccggcctaaggaaggcgacgaccggcccttcttttggctgttcgagaatgtggtggccatgggagtcagcgacaagcgggatattagccggttcctggagagcaaccccgtgatgatcgatgccaaggaagtgagcgccgcccaccgggccagatacttctggggcaatctgcctggcatgaacagacccctggccagcaccgtgaacgacaagctggagctgcaggagtgcctggagcacggccggatcgccaagttcagcaaggtgagaaccatcaccacccgaagcaacagcatcaaacaaggcaaggaccagcactttcctgtgttcatgaacgagaaggaggacatcctgtggtgtaccgagatggagagagtgttcgggttcccagtccactacacagatgtcagcaacatgtctagactggccagacagagactgctgggaagaagctggtccgtccctgtgatcagacacctgttcgcccctctgaaggagtacttcgcctgcgtgagcagcggcaacagcaacgccaacagccggggccccagcttctctagcggcctggtgccactgtccctgagagggagccacatgggccccatggagatctacaaaaccgtgagcgcctggaagcggcagcctgtgcgcgtgctgagcctgtttcggaatatcgataaagtcctgaaaagcctgggattcctggagagcggctctggctccggcggtggcaccctgaagtacgtggaggatgtgacaaacgtggtcagacgggatgtggagaagtggggccccttcgatctggtgtacggcagcacccaacccctgggcagctcttgtgaccggtgccctggctggtacatgtttcagttccaccggatcctgcagtacgccctgccgagacaggagtcccagcggccattcttttggattttcatggacaacttgctgctgaccgaggatgaccaggaaactaccactcggttcctgcagaccgaagccgtgaccctgcaggacgtgagaggccgggactaccagaacgccatgcgggtgtggtccaacatccctggactgaaaagcaagcacgcacctctgacccctaaagaagaggagtacctgcaggcccaggtgcggagcagaagcaagctggacgcccctaaggtggatctgctggtgaagaattgcctcctgcccctgagagagtacttcaagtatttcagccagaatagtctgcccctgggaggcagcggcggcggcgacaccgtggtgttcgaggacgtggtggtggacttcaccctggaggagtgggccctgctgaaccccgcccagagaaagctgtacagagacgtgatgctggagaccttcaagcacctggccagcgtggacaacgaggcccagctgaaggccagcggcagcatcagccagcaggacaccagcggcgagaagctgagcctgaagcagaagatcgagaagttcaccagaaagaacatctgggccggcggcccaagcagcggcgcccctcctcccagcggcggcagcccagccggctccccaacctctaccgaggagggcacctctgagtccgccacccccgagagcggccctggcacctccaccgagcccagcgagggcagcgcacccggcagccctgccggcagccccacctccacagaggagggaaccagcaccgagcccagcgaaggcagcgccccaggcaccagcaccgagcctagtgagcaggagattaaacggatcaacaagatcagaagaagacttgtgaaagacagcaacaccaagaaggccggcaagacaggccccatgaaaaccctgctggttagagtgatgacacccgatctgagagagcggctggaaaacctgagaaagaagcctgaaaatatcccccagcccatcagcaatacatctagagccaacctgaataagctgctgaccgattacaccgaaatgaagaaggcgatcctgcatgtgtactgggaagagttccagaaggaccctgtgggcctgatgagccgggtggcccagcctgccagcaagaagatcgatcagaacaagctgaaacctgagatggacgagaagggcaacctgaccaccgccggctttgcctgctctcagtgtggccagcccctgttcgtgtacaagctggagcaggtgtctgagaagggcaaggcttacaccaactacttcggacggtgcaatgtggccgagcacgaaaagctgatcctgctggcccagctgaagcccgagaaggatagcgacgaagccgtgacatatagcctgggaaagtttgggcagagggccctggatttctacagcattcatgtgaccaaggagtccacccaccccgtgaagcccctggcccagatcgccggaaacagatacgcctccggacctgtgggaaaggccctgagcgacgcatgtatgggcacaatcgcctccttcctgtctaagtaccaggacatcatcatcgaacaccagaaggtggtgaagggcaaccagaagagactggagagcctgcgggagctggccggcaaggaaaacctggaataccctagcgtgaccctgccacctcagcctcacaccaaggagggcgttgatgcctacaacgaagtgatcgcccgggtgcgaatgtgggtgaacctgaacctgtggcagaagctgaagctaagcagagatgatgccaagcctctgctgagactgaagggattcccttcctttcctctggtcgagagacaggccaacgaagtggactggtgggacatggtgtgtaacgtgaagaagctgatcaacgagaaaaaggaggatggcaaggtgttttggcagaatctggctggctacaagagacaggaagccctgagaccatacctgagcagcgaggaagatcggaagaagggaaagaaattcgctcggtaccagctgggcgacctgctgctgcacctggaaaagaagcacggcgaggactggggaaaggtgtacgacgaggcctgggagcggattgacaagaaagtggaaggcctgagcaagcacatcaagctggaagaggaacggagaagcgaggacgcccagagcaaggccgccctgaccgactggctgcgggctaaggccagcttcgtgatcgagggcctgaaggaggccgacaaggacgagttctgcagatgcgagctgaagctgcagaagtggtacggggacctgcggggaaagcccttcgccatcgaagccgagaacagcatcctggacatcagcggcttcagcaagcagtacaactgtgccttcatctggcagaaggacggcgtgaagaagctgaacctgtacctgatcatcaactacttcaagggcggcaagctgcggttcaagaagatcaaacctgaagccttcgaagccaacagattctacaccgtgatcaacaaaaagagcggcgagatcgtgcccatggaggtgaacttcaacttcgacgaccccaacctgatcatcctgcctctggcctttggcaagagacagggcagagaattcatctggaacgacctgctgtccctggaaaccggcagcctgaagctggccaacggaagagtgatcgagaagacactgtacaacagaagaacccggcaggatgagcctgccctgttcgtggccctgaccttcgagcggcgggaggtcctggactcctccaatatcaaaccaatgaacctgatcggcgtggcaagaggcgaaaacatccccgccgtgatcgccctgaccgaccccgagggctgcccactgagccggtttaaggatagcctgggaaacccaacccacatcctgagaatcggcgagagctataaggagaagcagcggaccatccaggccaagaaggaggtggagcagcggagagccggcggctacagccggaagtacgccagcaaagccaagaatctggcagacgatatggtgagaaacaccgctagagatctgctgtactacgccgtgacccaggatgccatgctgatcttcgccaacctgagccggggcttcggccggcagggcaagcggaccttcatggccgagagacagtacacacggatggaggactggctgaccgccaagctggcctacgagggcctgagcaagacctacctgtccaagacactggcccagtacacctccaagacatgcagcaactgtgggtttaccatcaccagcgccgactacgacagggtgctggagaagctgaagaagacagcaacaggctggatgaccacaattaacggcaaggagctgaaggtggagggccagattacctactacaacagatacaagagacagaacgtagtcaaggacctgtccgtcgagctggatagactgagcgaagaatctgtgaacaacgacatctcctcctggacaaagggcagaagcggagaagctctgagcctcctgaagaaaagattctcccatagacccgtgcaggagaagttcgtgtgcctgaactgcggcttcgagacacacgcagccgagcaagccgccctgaacatcgccagatcctggctgttcctgcggagccaggagtacaagaaataccagacaaacaagacaaccggcaacaccgataagagagccttcgtcgagacctggcagtccttttaccggaagaagcttaaggaggtgtggaaacctgccgtgcggtctggcggatctggcggaggctccaccagccccaagaaaaagagaaaagtctaagctgccttctgcggggcttgccttctggccatgcccttcttctctcccttgcacctgtacctcttggtctttgaataaagcctgagtaggaaggctagcaaaaaaaaaaaaaaaaaaaaaaaaaaaaaaaaaaaaaaaaaaaaaaaaaaaaaaaaaaaaaaaaaaaaaaaaaaaaaaaa

SEQ ID NO: 13534 - RNA, 5785 nt, synthetic construct
  source 1..5785: mol_type = other RNA
aggaaataagagagaaaagaagagtaagaagaaatataagagccaccatggcccctaagaagaagcgtaaagtgagccggatggaacgcctcgtctacgaggtgcggcagaagtgcagaaacatcgaggacatctgcatctcctgcggatctctgaacgtgaccctggagcacccactgttcatcggcggcatgtgccagaactgtaaaaactgttttctggagtgtgcctatcaatacgacgatgacggctaccagagctactgcaccatctgttgcggcggaagagaggtgctgatgtgtggaaataacaactgctgccggtgcttctgcgtggaatgcgtggacctgctggtgggccccggcgccgcccaggccgctattaaggaagatccttggaactgctacatgtgcggccacaagggcacatacggcctgctgagacggagagaggactggcctagcagactgcagatgttcttcgccaataaccacgaccaggagttcgacccccctaaggtgtaccctcccgtccccgccgagaagagaaagcccatccgggtcctgagcctgttcgatggcatcgccaccggtctgctggtgctgaaggacctgggcatccaggtggataggtacattgcctccgaggtgtgcgaggactccatcaccgtgggaatggtgcgtcatcagggcaagatcatgtacgtgggcgacgtgcggagcgtgacacagaagcatatccaggagtggggccctttcgacctggtgatcggcggcagcccttgcaatgacctgagcatcgtgaacccagcccggaagggcctgtacgagggaaccggcagactgttcttcgagttttacagactgctgcacgacgcccggcctaaggaaggcgacgaccggcccttcttttggctgttcgagaatgtggtggccatgggagtcagcgacaagcgggatattagccggttcctggagagcaaccccgtgatgatcgatgccaaggaagtgagcgccgcccaccgggccagatacttctggggcaatctgcctggcatgaacagacccctggccagcaccgtgaacgacaagctggagctgcaggagtgcctggagcacggccggatcgccaagttcagcaaggtgagaaccatcaccacccgaagcaacagcatcaaacaaggcaaggaccagcactttcctgtgttcatgaacgagaaggaggacatcctgtggtgtaccgagatggagagagtgttcgggttcccagtccactacacagatgtcagcaacatgtctagactggccagacagagactgctgggaagaagctggtccgtccctgtgatcagacacctgttcgcccctctgaaggagtacttcgcctgcgtgagcagcggcaacagcaacgccaacagccggggccccagcttctctagcggcctggtgccactgtccctgagagggagccacatgggccccatggagatctacaaaaccgtgagcgcctggaagcggcagcctgtgcgcgtgctgagcctgtttcggaatatcgataaagtcctgaaaagcctgggattcctggagagcggctctggctccggcggtggcaccctgaagtacgtggaggatgtgacaaacgtggtcagacgggatgtggagaagtggggccccttcgatctggtgtacggcagcacccaacccctgggcagctcttgtgaccggtgccctggctggtacatgtttcagttccaccggatcctgcagtacgccctgccgagacaggagtcccagcggccattcttttggattttcatggacaacttgctgctgaccgaggatgaccaggaaactaccactcggttcctgcagaccgaagccgtgaccctgcaggacgtgagaggccgggactaccagaacgccatgcgggtgtggtccaacatccctggactgaaaagcaagcacgcacctctgacccctaaagaagaggagtacctgcaggcccaggtgcggagcagaagcaagctggacgcccctaaggtggatctgctggtgaagaattgcctcctgcccctgagagagtacttcaagtatttcagccagaatagtctgcccctgggaggcagcggcggcggccagcagaggcccgtgagcttcaaggacgtggtggtgggcttcacccaggaggagtggcacaggctgaaccccgcccagagggccctgtacagggacgtgatgctggagacctacagcaacctggtgagcgtgggctacgagggcaccaagccctacgtgatcctgaagctggagcaggaggaggccccctggatctgcgaggccgcctgcagcggctgccactgccaggagaacatctgccagggcggcccaagcagcggcgcccctcctcccagcggcggcagcccagccggctccccaacctctaccgaggagggcacctctgagtccgccacccccgagagcggccctggcacctccaccgagcccagcgagggcagcgcacccggcagccctgccggcagccccacctccacagaggagggaaccagcaccgagcccagcgaaggcagcgccccaggcaccagcaccgagcctagtgagcaggagattaaacggatcaacaagatcagaagaagacttgtgaaagacagcaacaccaagaaggccggcaagacaggccccatgaaaaccctgctggttagagtgatgacacccgatctgagagagcggctggaaaacctgagaaagaagcctgaaaatatcccccagcccatcagcaatacatctagagccaacctgaataagctgctgaccgattacaccgaaatgaagaaggcgatcctgcatgtgtactgggaagagttccagaaggaccctgtgggcctgatgagccgggtggcccagcctgccagcaagaagatcgatcagaacaagctgaaacctgagatggacgagaagggcaacctgaccaccgccggctttgcctgctctcagtgtggccagcccctgttcgtgtacaagctggagcaggtgtctgagaagggcaaggcttacaccaactacttcggacggtgcaatgtggccgagcacgaaaagctgatcctgctggcccagctgaagcccgagaaggatagcgacgaagccgtgacatatagcctgggaaagtttgggcagagggccctggatttctacagcattcatgtgaccaaggagtccacccaccccgtgaagcccctggcccagatcgccggaaacagatacgcctccggacctgtgggaaaggccctgagcgacgcatgtatgggcacaatcgcctccttcctgtctaagtaccaggacatcatcatcgaacaccagaaggtggtgaagggcaaccagaagagactggagagcctgcgggagctggccggcaaggaaaacctggaataccctagcgtgaccctgccacctcagcctcacaccaaggagggcgttgatgcctacaacgaagtgatcgcccgggtgcgaatgtgggtgaacctgaacctgtggcagaagctgaagctaagcagagatgatgccaagcctctgctgagactgaagggattcccttcctttcctctggtcgagagacaggccaacgaagtggactggtgggacatggtgtgtaacgtgaagaagctgatcaacgagaaaaaggaggatggcaaggtgttttggcagaatctggctggctacaagagacaggaagccctgagaccatacctgagcagcgaggaagatcggaagaagggaaagaaattcgctcggtaccagctgggcgacctgctgctgcacctggaaaagaagcacggcgaggactggggaaaggtgtacgacgaggcctgggagcggattgacaagaaagtggaaggcctgagcaagcacatcaagctggaagaggaacggagaagcgaggacgcccagagcaaggccgccctgaccgactggctgcgggctaaggccagcttcgtgatcgagggcctgaaggaggccgacaaggacgagttctgcagatgcgagctgaagctgcagaagtggtacggggacctgcggggaaagcccttcgccatcgaagccgagaacagcatcctggacatcagcggcttcagcaagcagtacaactgtgccttcatctggcagaaggacggcgtgaagaagctgaacctgtacctgatcatcaactacttcaagggcggcaagctgcggttcaagaagatcaaacctgaagccttcgaagccaacagattctacaccgtgatcaacaaaaagagcggcgagatcgtgcccatggaggtgaacttcaacttcgacgaccccaacctgatcatcctgcctctggcctttggcaagagacagggcagagaattcatctggaacgacctgctgtccctggaaaccggcagcctgaagctggccaacggaagagtgatcgagaagacactgtacaacagaagaacccggcaggatgagcctgccctgttcgtggccctgaccttcgagcggcgggaggtcctggactcctccaatatcaaaccaatgaacctgatcggcgtggcaagaggcgaaaacatccccgccgtgatcgccctgaccgaccccgagggctgcccactgagccggtttaaggatagcctgggaaacccaacccacatcctgagaatcggcgagagctataaggagaagcagcggaccatccaggccaagaaggaggtggagcagcggagagccggcggctacagccggaagtacgccagcaaagccaagaatctggcagacgatatggtgagaaacaccgctagagatctgctgtactacgccgtgacccaggatgccatgctgatcttcgccaacctgagccggggcttcggccggcagggcaagcggaccttcatggccgagagacagtacacacggatggaggactggctgaccgccaagctggcctacgagggcctgagcaagacctacctgtccaagacactggcccagtacacctccaagacatgcagcaactgtgggtttaccatcaccagcgccgactacgacagggtgctggagaagctgaagaagacagcaacaggctggatgaccacaattaacggcaaggagctgaaggtggagggccagattacctactacaacagatacaagagacagaacgtagtcaaggacctgtccgtcgagctggatagactgagcgaagaatctgtgaacaacgacatctcctcctggacaaagggcagaagcggagaagctctgagcctcctgaagaaaagattctcccatagacccgtgcaggagaagttcgtgtgcctgaactgcggcttcgagacacacgcagccgagcaagccgccctgaacatcgccagatcctggctgttcctgcggagccaggagtacaagaaataccagacaaacaagacaaccggcaacaccgataagagagccttcgtcgagacctggcagtccttttaccggaagaagcttaaggaggtgtggaaacctgccgtgcggtctggcggatctggcggaggctccaccagccccaagaaaaagagaaaagtctaagctgccttctgcggggcttgccttctggccatgcccttcttctctcccttgcacctgtacctcttggtctttgaataaagcctgagtaggaaggctagcaaaaaaaaaaaaaaaaaaaaaaaaaaaaaaaaaaaaaaaaaaaaaaaaaaaaaaaaaaaaaaaaaaaaaaaaaaaaaaaa

SEQ ID NO: 13535 - RNA, 5785 nt, synthetic construct
  source 1..5785: mol_type = other RNA
aggaaataagagagaaaagaagagtaagaagaaatataagagccaccatggcccctaagaagaagcgtaaagtgagccggatggaacgcctcgtctacgaggtgcggcagaagtgcagaaacatcgaggacatctgcatctcctgcggatctctgaacgtgaccctggagcacccactgttcatcggcggcatgtgccagaactgtaaaaactgttttctggagtgtgcctatcaatacgacgatgacggctaccagagctactgcaccatctgttgcggcggaagagaggtgctgatgtgtggaaataacaactgctgccggtgcttctgcgtggaatgcgtggacctgctggtgggccccggcgccgcccaggccgctattaaggaagatccttggaactgctacatgtgcggccacaagggcacatacggcctgctgagacggagagaggactggcctagcagactgcagatgttcttcgccaataaccacgaccaggagttcgacccccctaaggtgtaccctcccgtccccgccgagaagagaaagcccatccgggtcctgagcctgttcgatggcatcgccaccggtctgctggtgctgaaggacctgggcatccaggtggataggtacattgcctccgaggtgtgcgaggactccatcaccgtgggaatggtgcgtcatcagggcaagatcatgtacgtgggcgacgtgcggagcgtgacacagaagcatatccaggagtggggccctttcgacctggtgatcggcggcagcccttgcaatgacctgagcatcgtgaacccagcccggaagggcctgtacgagggaaccggcagactgttcttcgagttttacagactgctgcacgacgcccggcctaaggaaggcgacgaccggcccttcttttggctgttcgagaatgtggtggccatgggagtcagcgacaagcgggatattagccggttcctggagagcaaccccgtgatgatcgatgccaaggaagtgagcgccgcccaccgggccagatacttctggggcaatctgcctggcatgaacagacccctggccagcaccgtgaacgacaagctggagctgcaggagtgcctggagcacggccggatcgccaagttcagcaaggtgagaaccatcaccacccgaagcaacagcatcaaacaaggcaaggaccagcactttcctgtgttcatgaacgagaaggaggacatcctgtggtgtaccgagatggagagagtgttcgggttcccagtccactacacagatgtcagcaacatgtctagactggccagacagagactgctgggaagaagctggtccgtccctgtgatcagacacctgttcgcccctctgaaggagtacttcgcctgcgtgagcagcggcaacagcaacgccaacagccggggccccagcttctctagcggcctggtgccactgtccctgagagggagccacatgggccccatggagatctacaaaaccgtgagcgcctggaagcggcagcctgtgcgcgtgctgagcctgtttcggaatatcgataaagtcctgaaaagcctgggattcctggagagcggctctggctccggcggtggcaccctgaagtacgtggaggatgtgacaaacgtggtcagacgggatgtggagaagtggggccccttcgatctggtgtacggcagcacccaacccctgggcagctcttgtgaccggtgccctggctggtacatgtttcagttccaccggatcctgcagtacgccctgccgagacaggagtcccagcggccattcttttggattttcatggacaacttgctgctgaccgaggatgaccaggaaactaccactcggttcctgcagaccgaagccgtgaccctgcaggacgtgagaggccgggactaccagaacgccatgcgggtgtggtccaacatccctggactgaaaagcaagcacgcacctctgacccctaaagaagaggagtacctgcaggcccaggtgcggagcagaagcaagctggacgcccctaaggtggatctgctggtgaagaattgcctcctgcccctgagagagtacttcaagtatttcagccagaatagtctgcccctgggaggcagcggcggcggcctgcaggaggccgtgaccttcgaggacgtggccgtgaacttcagcaacgaggagtggcagtgcctgacccacgcccagaggcacctgtacaaggacgtgatgctggagaactacggcaacgtggtgagcctgggcttccccttccccaagccccccctgatcagccacctggagcaggaggccgagctgtgcgcccaggacaggcaggacagggagttcctgagctgcagctaccccgtgagcggcggcccaagcagcggcgcccctcctcccagcggcggcagcccagccggctccccaacctctaccgaggagggcacctctgagtccgccacccccgagagcggccctggcacctccaccgagcccagcgagggcagcgcacccggcagccctgccggcagccccacctccacagaggagggaaccagcaccgagcccagcgaaggcagcgccccaggcaccagcaccgagcctagtgagcaggagattaaacggatcaacaagatcagaagaagacttgtgaaagacagcaacaccaagaaggccggcaagacaggccccatgaaaaccctgctggttagagtgatgacacccgatctgagagagcggctggaaaacctgagaaagaagcctgaaaatatcccccagcccatcagcaatacatctagagccaacctgaataagctgctgaccgattacaccgaaatgaagaaggcgatcctgcatgtgtactgggaagagttccagaaggaccctgtgggcctgatgagccgggtggcccagcctgccagcaagaagatcgatcagaacaagctgaaacctgagatggacgagaagggcaacctgaccaccgccggctttgcctgctctcagtgtggccagcccctgttcgtgtacaagctggagcaggtgtctgagaagggcaaggcttacaccaactacttcggacggtgcaatgtggccgagcacgaaaagctgatcctgctggcccagctgaagcccgagaaggatagcgacgaagccgtgacatatagcctgggaaagtttgggcagagggccctggatttctacagcattcatgtgaccaaggagtccacccaccccgtgaagcccctggcccagatcgccggaaacagatacgcctccggacctgtgggaaaggccctgagcgacgcatgtatgggcacaatcgcctccttcctgtctaagtaccaggacatcatcatcgaacaccagaaggtggtgaagggcaaccagaagagactggagagcctgcgggagctggccggcaaggaaaacctggaataccctagcgtgaccctgccacctcagcctcacaccaaggagggcgttgatgcctacaacgaagtgatcgcccgggtgcgaatgtgggtgaacctgaacctgtggcagaagctgaagctaagcagagatgatgccaagcctctgctgagactgaagggattcccttcctttcctctggtcgagagacaggccaacgaagtggactggtgggacatggtgtgtaacgtgaagaagctgatcaacgagaaaaaggaggatggcaaggtgttttggcagaatctggctggctacaagagacaggaagccctgagaccatacctgagcagcgaggaagatcggaagaagggaaagaaattcgctcggtaccagctgggcgacctgctgctgcacctggaaaagaagcacggcgaggactggggaaaggtgtacgacgaggcctgggagcggattgacaagaaagtggaaggcctgagcaagcacatcaagctggaagaggaacggagaagcgaggacgcccagagcaaggccgccctgaccgactggctgcgggctaaggccagcttcgtgatcgagggcctgaaggaggccgacaaggacgagttctgcagatgcgagctgaagctgcagaagtggtacggggacctgcggggaaagcccttcgccatcgaagccgagaacagcatcctggacatcagcggcttcagcaagcagtacaactgtgccttcatctggcagaaggacggcgtgaagaagctgaacctgtacctgatcatcaactacttcaagggcggcaagctgcggttcaagaagatcaaacctgaagccttcgaagccaacagattctacaccgtgatcaacaaaaagagcggcgagatcgtgcccatggaggtgaacttcaacttcgacgaccccaacctgatcatcctgcctctggcctttggcaagagacagggcagagaattcatctggaacgacctgctgtccctggaaaccggcagcctgaagctggccaacggaagagtgatcgagaagacactgtacaacagaagaacccggcaggatgagcctgccctgttcgtggccctgaccttcgagcggcgggaggtcctggactcctccaatatcaaaccaatgaacctgatcggcgtggcaagaggcgaaaacatccccgccgtgatcgccctgaccgaccccgagggctgcccactgagccggtttaaggatagcctgggaaacccaacccacatcctgagaatcggcgagagctataaggagaagcagcggaccatccaggccaagaaggaggtggagcagcggagagccggcggctacagccggaagtacgccagcaaagccaagaatctggcagacgatatggtgagaaacaccgctagagatctgctgtactacgccgtgacccaggatgccatgctgatcttcgccaacctgagccggggcttcggccggcagggcaagcggaccttcatggccgagagacagtacacacggatggaggactggctgaccgccaagctggcctacgagggcctgagcaagacctacctgtccaagacactggcccagtacacctccaagacatgcagcaactgtgggtttaccatcaccagcgccgactacgacagggtgctggagaagctgaagaagacagcaacaggctggatgaccacaattaacggcaaggagctgaaggtggagggccagattacctactacaacagatacaagagacagaacgtagtcaaggacctgtccgtcgagctggatagactgagcgaagaatctgtgaacaacgacatctcctcctggacaaagggcagaagcggagaagctctgagcctcctgaagaaaagattctcccatagacccgtgcaggagaagttcgtgtgcctgaactgcggcttcgagacacacgcagccgagcaagccgccctgaacatcgccagatcctggctgttcctgcggagccaggagtacaagaaataccagacaaacaagacaaccggcaacaccgataagagagccttcgtcgagacctggcagtccttttaccggaagaagcttaaggaggtgtggaaacctgccgtgcggtctggcggatctggcggaggctccaccagccccaagaaaaagagaaaagtctaagctgccttctgcggggcttgccttctggccatgcccttcttctctcccttgcacctgtacctcttggtctttgaataaagcctgagtaggaaggctagcaaaaaaaaaaaaaaaaaaaaaaaaaaaaaaaaaaaaaaaaaaaaaaaaaaaaaaaaaaaaaaaaaaaaaaaaaaaaaaaa

SEQ ID NO: 13536 - RNA, 5785 nt, synthetic construct
  source 1..5785: mol_type = other RNA
aggaaataagagagaaaagaagagtaagaagaaatataagagccaccatggcccctaagaagaagcgtaaagtgagccggatggaacgcctcgtctacgaggtgcggcagaagtgcagaaacatcgaggacatctgcatctcctgcggatctctgaacgtgaccctggagcacccactgttcatcggcggcatgtgccagaactgtaaaaactgttttctggagtgtgcctatcaatacgacgatgacggctaccagagctactgcaccatctgttgcggcggaagagaggtgctgatgtgtggaaataacaactgctgccggtgcttctgcgtggaatgcgtggacctgctggtgggccccggcgccgcccaggccgctattaaggaagatccttggaactgctacatgtgcggccacaagggcacatacggcctgctgagacggagagaggactggcctagcagactgcagatgttcttcgccaataaccacgaccaggagttcgacccccctaaggtgtaccctcccgtccccgccgagaagagaaagcccatccgggtcctgagcctgttcgatggcatcgccaccggtctgctggtgctgaaggacctgggcatccaggtggataggtacattgcctccgaggtgtgcgaggactccatcaccgtgggaatggtgcgtcatcagggcaagatcatgtacgtgggcgacgtgcggagcgtgacacagaagcatatccaggagtggggccctttcgacctggtgatcggcggcagcccttgcaatgacctgagcatcgtgaacccagcccggaagggcctgtacgagggaaccggcagactgttcttcgagttttacagactgctgcacgacgcccggcctaaggaaggcgacgaccggcccttcttttggctgttcgagaatgtggtggccatgggagtcagcgacaagcgggatattagccggttcctggagagcaaccccgtgatgatcgatgccaaggaagtgagcgccgcccaccgggccagatacttctggggcaatctgcctggcatgaacagacccctggccagcaccgtgaacgacaagctggagctgcaggagtgcctggagcacggccggatcgccaagttcagcaaggtgagaaccatcaccacccgaagcaacagcatcaaacaaggcaaggaccagcactttcctgtgttcatgaacgagaaggaggacatcctgtggtgtaccgagatggagagagtgttcgggttcccagtccactacacagatgtcagcaacatgtctagactggccagacagagactgctgggaagaagctggtccgtccctgtgatcagacacctgttcgcccctctgaaggagtacttcgcctgcgtgagcagcggcaacagcaacgccaacagccggggccccagcttctctagcggcctggtgccactgtccctgagagggagccacatgggccccatggagatctacaaaaccgtgagcgcctggaagcggcagcctgtgcgcgtgctgagcctgtttcggaatatcgataaagtcctgaaaagcctgggattcctggagagcggctctggctccggcggtggcaccctgaagtacgtggaggatgtgacaaacgtggtcagacgggatgtggagaagtggggccccttcgatctggtgtacggcagcacccaacccctgggcagctcttgtgaccggtgccctggctggtacatgtttcagttccaccggatcctgcagtacgccctgccgagacaggagtcccagcggccattcttttggattttcatggacaacttgctgctgaccgaggatgaccaggaaactaccactcggttcctgcagaccgaagccgtgaccctgcaggacgtgagaggccgggactaccagaacgccatgcgggtgtggtccaacatccctggactgaaaagcaagcacgcacctctgacccctaaagaagaggagtacctgcaggcccaggtgcggagcagaagcaagctggacgcccctaaggtggatctgctggtgaagaattgcctcctgcccctgagagagtacttcaagtatttcagccagaatagtctgcccctgggaggcagcggcggcggctgctaccaggacagcgtgaccttcgacgacgtggccgtggacttcacccaggaggagtggaccctgctggacagcacccagaggagcctgtacagcgacgtgatgctggagaactacaagaacctggccaccgtgggcggccagatcatcaagcccagcctgatcagctggctggagcaggaggagagcaagaccgtgcagggcggcgtgctgcagggcaggaagacccagtggaggggcaccggcggcccaagcagcggcgcccctcctcccagcggcggcagcccagccggctccccaacctctaccgaggagggcacctctgagtccgccacccccgagagcggccctggcacctccaccgagcccagcgagggcagcgcacccggcagccctgccggcagccccacctccacagaggagggaaccagcaccgagcccagcgaaggcagcgccccaggcaccagcaccgagcctagtgagcaggagattaaacggatcaacaagatcagaagaagacttgtgaaagacagcaacaccaagaaggccggcaagacaggccccatgaaaaccctgctggttagagtgatgacacccgatctgagagagcggctggaaaacctgagaaagaagcctgaaaatatcccccagcccatcagcaatacatctagagccaacctgaataagctgctgaccgattacaccgaaatgaagaaggcgatcctgcatgtgtactgggaagagttccagaaggaccctgtgggcctgatgagccgggtggcccagcctgccagcaagaagatcgatcagaacaagctgaaacctgagatggacgagaagggcaacctgaccaccgccggctttgcctgctctcagtgtggccagcccctgttcgtgtacaagctggagcaggtgtctgagaagggcaaggcttacaccaactacttcggacggtgcaatgtggccgagcacgaaaagctgatcctgctggcccagctgaagcccgagaaggatagcgacgaagccgtgacatatagcctgggaaagtttgggcagagggccctggatttctacagcattcatgtgaccaaggagtccacccaccccgtgaagcccctggcccagatcgccggaaacagatacgcctccggacctgtgggaaaggccctgagcgacgcatgtatgggcacaatcgcctccttcctgtctaagtaccaggacatcatcatcgaacaccagaaggtggtgaagggcaaccagaagagactggagagcctgcgggagctggccggcaaggaaaacctggaataccctagcgtgaccctgccacctcagcctcacaccaaggagggcgttgatgcctacaacgaagtgatcgcccgggtgcgaatgtgggtgaacctgaacctgtggcagaagctgaagctaagcagagatgatgccaagcctctgctgagactgaagggattcccttcctttcctctggtcgagagacaggccaacgaagtggactggtgggacatggtgtgtaacgtgaagaagctgatcaacgagaaaaaggaggatggcaaggtgttttggcagaatctggctggctacaagagacaggaagccctgagaccatacctgagcagcgaggaagatcggaagaagggaaagaaattcgctcggtaccagctgggcgacctgctgctgcacctggaaaagaagcacggcgaggactggggaaaggtgtacgacgaggcctgggagcggattgacaagaaagtggaaggcctgagcaagcacatcaagctggaagaggaacggagaagcgaggacgcccagagcaaggccgccctgaccgactggctgcgggctaaggccagcttcgtgatcgagggcctgaaggaggccgacaaggacgagttctgcagatgcgagctgaagctgcagaagtggtacggggacctgcggggaaagcccttcgccatcgaagccgagaacagcatcctggacatcagcggcttcagcaagcagtacaactgtgccttcatctggcagaaggacggcgtgaagaagctgaacctgtacctgatcatcaactacttcaagggcggcaagctgcggttcaagaagatcaaacctgaagccttcgaagccaacagattctacaccgtgatcaacaaaaagagcggcgagatcgtgcccatggaggtgaacttcaacttcgacgaccccaacctgatcatcctgcctctggcctttggcaagagacagggcagagaattcatctggaacgacctgctgtccctggaaaccggcagcctgaagctggccaacggaagagtgatcgagaagacactgtacaacagaagaacccggcaggatgagcctgccctgttcgtggccctgaccttcgagcggcgggaggtcctggactcctccaatatcaaaccaatgaacctgatcggcgtggcaagaggcgaaaacatccccgccgtgatcgccctgaccgaccccgagggctgcccactgagccggtttaaggatagcctgggaaacccaacccacatcctgagaatcggcgagagctataaggagaagcagcggaccatccaggccaagaaggaggtggagcagcggagagccggcggctacagccggaagtacgccagcaaagccaagaatctggcagacgatatggtgagaaacaccgctagagatctgctgtactacgccgtgacccaggatgccatgctgatcttcgccaacctgagccggggcttcggccggcagggcaagcggaccttcatggccgagagacagtacacacggatggaggactggctgaccgccaagctggcctacgagggcctgagcaagacctacctgtccaagacactggcccagtacacctccaagacatgcagcaactgtgggtttaccatcaccagcgccgactacgacagggtgctggagaagctgaagaagacagcaacaggctggatgaccacaattaacggcaaggagctgaaggtggagggccagattacctactacaacagatacaagagacagaacgtagtcaaggacctgtccgtcgagctggatagactgagcgaagaatctgtgaacaacgacatctcctcctggacaaagggcagaagcggagaagctctgagcctcctgaagaaaagattctcccatagacccgtgcaggagaagttcgtgtgcctgaactgcggcttcgagacacacgcagccgagcaagccgccctgaacatcgccagatcctggctgttcctgcggagccaggagtacaagaaataccagacaaacaagacaaccggcaacaccgataagagagccttcgtcgagacctggcagtccttttaccggaagaagcttaaggaggtgtggaaacctgccgtgcggtctggcggatctggcggaggctccaccagccccaagaaaaagagaaaagtctaagctgccttctgcggggcttgccttctggccatgcccttcttctctcccttgcacctgtacctcttggtctttgaataaagcctgagtaggaaggctagcaaaaaaaaaaaaaaaaaaaaaaaaaaaaaaaaaaaaaaaaaaaaaaaaaaaaaaaaaaaaaaaaaaaaaaaaaaaaaaaa

SEQ ID NO: 13537 - RNA, 5785 nt, synthetic construct
  source 1..5785: mol_type = other RNA
aggaaataagagagaaaagaagagtaagaagaaatataagagccaccatggcccctaagaagaagcgtaaagtgagccggatggaacgcctcgtctacgaggtgcggcagaagtgcagaaacatcgaggacatctgcatctcctgcggatctctgaacgtgaccctggagcacccactgttcatcggcggcatgtgccagaactgtaaaaactgttttctggagtgtgcctatcaatacgacgatgacggctaccagagctactgcaccatctgttgcggcggaagagaggtgctgatgtgtggaaataacaactgctgccggtgcttctgcgtggaatgcgtggacctgctggtgggccccggcgccgcccaggccgctattaaggaagatccttggaactgctacatgtgcggccacaagggcacatacggcctgctgagacggagagaggactggcctagcagactgcagatgttcttcgccaataaccacgaccaggagttcgacccccctaaggtgtaccctcccgtccccgccgagaagagaaagcccatccgggtcctgagcctgttcgatggcatcgccaccggtctgctggtgctgaaggacctgggcatccaggtggataggtacattgcctccgaggtgtgcgaggactccatcaccgtgggaatggtgcgtcatcagggcaagatcatgtacgtgggcgacgtgcggagcgtgacacagaagcatatccaggagtggggccctttcgacctggtgatcggcggcagcccttgcaatgacctgagcatcgtgaacccagcccggaagggcctgtacgagggaaccggcagactgttcttcgagttttacagactgctgcacgacgcccggcctaaggaaggcgacgaccggcccttcttttggctgttcgagaatgtggtggccatgggagtcagcgacaagcgggatattagccggttcctggagagcaaccccgtgatgatcgatgccaaggaagtgagcgccgcccaccgggccagatacttctggggcaatctgcctggcatgaacagacccctggccagcaccgtgaacgacaagctggagctgcaggagtgcctggagcacggccggatcgccaagttcagcaaggtgagaaccatcaccacccgaagcaacagcatcaaacaaggcaaggaccagcactttcctgtgttcatgaacgagaaggaggacatcctgtggtgtaccgagatggagagagtgttcgggttcccagtccactacacagatgtcagcaacatgtctagactggccagacagagactgctgggaagaagctggtccgtccctgtgatcagacacctgttcgcccctctgaaggagtacttcgcctgcgtgagcagcggcaacagcaacgccaacagccggggccccagcttctctagcggcctggtgccactgtccctgagagggagccacatgggccccatggagatctacaaaaccgtgagcgcctggaagcggcagcctgtgcgcgtgctgagcctgtttcggaatatcgataaagtcctgaaaagcctgggattcctggagagcggctctggctccggcggtggcaccctgaagtacgtggaggatgtgacaaacgtggtcagacgggatgtggagaagtggggccccttcgatctggtgtacggcagcacccaacccctgggcagctcttgtgaccggtgccctggctggtacatgtttcagttccaccggatcctgcagtacgccctgccgagacaggagtcccagcggccattcttttggattttcatggacaacttgctgctgaccgaggatgaccaggaaactaccactcggttcctgcagaccgaagccgtgaccctgcaggacgtgagaggccgggactaccagaacgccatgcgggtgtggtccaacatccctggactgaaaagcaagcacgcacctctgacccctaaagaagaggagtacctgcaggcccaggtgcggagcagaagcaagctggacgcccctaaggtggatctgctggtgaagaattgcctcctgcccctgagagagtacttcaagtatttcagccagaatagtctgcccctgggaggcagcggcggcggcagccaggagctggtgaccttcgaggacgtggccatctacttcaccgaggaggagtggggcctgctggaccccgcccagaggaagctgtacagggacgtgatgctggagaacttcggcaacgtgctgctgctgggcttccccgtgagcaagcccgacatcatcagcaagctggagaggggcgagatcccctgcgtgcccttcctgcccaggaagaagatcctggtgatcaggctgggcggcggcggcggcccaagcagcggcgcccctcctcccagcggcggcagcccagccggctccccaacctctaccgaggagggcacctctgagtccgccacccccgagagcggccctggcacctccaccgagcccagcgagggcagcgcacccggcagccctgccggcagccccacctccacagaggagggaaccagcaccgagcccagcgaaggcagcgccccaggcaccagcaccgagcctagtgagcaggagattaaacggatcaacaagatcagaagaagacttgtgaaagacagcaacaccaagaaggccggcaagacaggccccatgaaaaccctgctggttagagtgatgacacccgatctgagagagcggctggaaaacctgagaaagaagcctgaaaatatcccccagcccatcagcaatacatctagagccaacctgaataagctgctgaccgattacaccgaaatgaagaaggcgatcctgcatgtgtactgggaagagttccagaaggaccctgtgggcctgatgagccgggtggcccagcctgccagcaagaagatcgatcagaacaagctgaaacctgagatggacgagaagggcaacctgaccaccgccggctttgcctgctctcagtgtggccagcccctgttcgtgtacaagctggagcaggtgtctgagaagggcaaggcttacaccaactacttcggacggtgcaatgtggccgagcacgaaaagctgatcctgctggcccagctgaagcccgagaaggatagcgacgaagccgtgacatatagcctgggaaagtttgggcagagggccctggatttctacagcattcatgtgaccaaggagtccacccaccccgtgaagcccctggcccagatcgccggaaacagatacgcctccggacctgtgggaaaggccctgagcgacgcatgtatgggcacaatcgcctccttcctgtctaagtaccaggacatcatcatcgaacaccagaaggtggtgaagggcaaccagaagagactggagagcctgcgggagctggccggcaaggaaaacctggaataccctagcgtgaccctgccacctcagcctcacaccaaggagggcgttgatgcctacaacgaagtgatcgcccgggtgcgaatgtgggtgaacctgaacctgtggcagaagctgaagctaagcagagatgatgccaagcctctgctgagactgaagggattcccttcctttcctctggtcgagagacaggccaacgaagtggactggtgggacatggtgtgtaacgtgaagaagctgatcaacgagaaaaaggaggatggcaaggtgttttggcagaatctggctggctacaagagacaggaagccctgagaccatacctgagcagcgaggaagatcggaagaagggaaagaaattcgctcggtaccagctgggcgacctgctgctgcacctggaaaagaagcacggcgaggactggggaaaggtgtacgacgaggcctgggagcggattgacaagaaagtggaaggcctgagcaagcacatcaagctggaagaggaacggagaagcgaggacgcccagagcaaggccgccctgaccgactggctgcgggctaaggccagcttcgtgatcgagggcctgaaggaggccgacaaggacgagttctgcagatgcgagctgaagctgcagaagtggtacggggacctgcggggaaagcccttcgccatcgaagccgagaacagcatcctggacatcagcggcttcagcaagcagtacaactgtgccttcatctggcagaaggacggcgtgaagaagctgaacctgtacctgatcatcaactacttcaagggcggcaagctgcggttcaagaagatcaaacctgaagccttcgaagccaacagattctacaccgtgatcaacaaaaagagcggcgagatcgtgcccatggaggtgaacttcaacttcgacgaccccaacctgatcatcctgcctctggcctttggcaagagacagggcagagaattcatctggaacgacctgctgtccctggaaaccggcagcctgaagctggccaacggaagagtgatcgagaagacactgtacaacagaagaacccggcaggatgagcctgccctgttcgtggccctgaccttcgagcggcgggaggtcctggactcctccaatatcaaaccaatgaacctgatcggcgtggcaagaggcgaaaacatccccgccgtgatcgccctgaccgaccccgagggctgcccactgagccggtttaaggatagcctgggaaacccaacccacatcctgagaatcggcgagagctataaggagaagcagcggaccatccaggccaagaaggaggtggagcagcggagagccggcggctacagccggaagtacgccagcaaagccaagaatctggcagacgatatggtgagaaacaccgctagagatctgctgtactacgccgtgacccaggatgccatgctgatcttcgccaacctgagccggggcttcggccggcagggcaagcggaccttcatggccgagagacagtacacacggatggaggactggctgaccgccaagctggcctacgagggcctgagcaagacctacctgtccaagacactggcccagtacacctccaagacatgcagcaactgtgggtttaccatcaccagcgccgactacgacagggtgctggagaagctgaagaagacagcaacaggctggatgaccacaattaacggcaaggagctgaaggtggagggccagattacctactacaacagatacaagagacagaacgtagtcaaggacctgtccgtcgagctggatagactgagcgaagaatctgtgaacaacgacatctcctcctggacaaagggcagaagcggagaagctctgagcctcctgaagaaaagattctcccatagacccgtgcaggagaagttcgtgtgcctgaactgcggcttcgagacacacgcagccgagcaagccgccctgaacatcgccagatcctggctgttcctgcggagccaggagtacaagaaataccagacaaacaagacaaccggcaacaccgataagagagccttcgtcgagacctggcagtccttttaccggaagaagcttaaggaggtgtggaaacctgccgtgcggtctggcggatctggcggaggctccaccagccccaagaaaaagagaaaagtctaagctgccttctgcggggcttgccttctggccatgcccttcttctctcccttgcacctgtacctcttggtctttgaataaagcctgagtaggaaggctagcaaaaaaaaaaaaaaaaaaaaaaaaaaaaaaaaaaaaaaaaaaaaaaaaaaaaaaaaaaaaaaaaaaaaaaaaaaaaaaaa

SEQ ID NO: 13538 - RNA, 5785 nt, synthetic construct
  source 1..5785: mol_type = other RNA
aggaaataagagagaaaagaagagtaagaagaaatataagagccaccatggcccctaagaagaagcgtaaagtgagccggatggaacgcctcgtctacgaggtgcggcagaagtgcagaaacatcgaggacatctgcatctcctgcggatctctgaacgtgaccctggagcacccactgttcatcggcggcatgtgccagaactgtaaaaactgttttctggagtgtgcctatcaatacgacgatgacggctaccagagctactgcaccatctgttgcggcggaagagaggtgctgatgtgtggaaataacaactgctgccggtgcttctgcgtggaatgcgtggacctgctggtgggccccggcgccgcccaggccgctattaaggaagatccttggaactgctacatgtgcggccacaagggcacatacggcctgctgagacggagagaggactggcctagcagactgcagatgttcttcgccaataaccacgaccaggagttcgacccccctaaggtgtaccctcccgtccccgccgagaagagaaagcccatccgggtcctgagcctgttcgatggcatcgccaccggtctgctggtgctgaaggacctgggcatccaggtggataggtacattgcctccgaggtgtgcgaggactccatcaccgtgggaatggtgcgtcatcagggcaagatcatgtacgtgggcgacgtgcggagcgtgacacagaagcatatccaggagtggggccctttcgacctggtgatcggcggcagcccttgcaatgacctgagcatcgtgaacccagcccggaagggcctgtacgagggaaccggcagactgttcttcgagttttacagactgctgcacgacgcccggcctaaggaaggcgacgaccggcccttcttttggctgttcgagaatgtggtggccatgggagtcagcgacaagcgggatattagccggttcctggagagcaaccccgtgatgatcgatgccaaggaagtgagcgccgcccaccgggccagatacttctggggcaatctgcctggcatgaacagacccctggccagcaccgtgaacgacaagctggagctgcaggagtgcctggagcacggccggatcgccaagttcagcaaggtgagaaccatcaccacccgaagcaacagcatcaaacaaggcaaggaccagcactttcctgtgttcatgaacgagaaggaggacatcctgtggtgtaccgagatggagagagtgttcgggttcccagtccactacacagatgtcagcaacatgtctagactggccagacagagactgctgggaagaagctggtccgtccctgtgatcagacacctgttcgcccctctgaaggagtacttcgcctgcgtgagcagcggcaacagcaacgccaacagccggggccccagcttctctagcggcctggtgccactgtccctgagagggagccacatgggccccatggagatctacaaaaccgtgagcgcctggaagcggcagcctgtgcgcgtgctgagcctgtttcggaatatcgataaagtcctgaaaagcctgggattcctggagagcggctctggctccggcggtggcaccctgaagtacgtggaggatgtgacaaacgtggtcagacgggatgtggagaagtggggccccttcgatctggtgtacggcagcacccaacccctgggcagctcttgtgaccggtgccctggctggtacatgtttcagttccaccggatcctgcagtacgccctgccgagacaggagtcccagcggccattcttttggattttcatggacaacttgctgctgaccgaggatgaccaggaaactaccactcggttcctgcagaccgaagccgtgaccctgcaggacgtgagaggccgggactaccagaacgccatgcgggtgtggtccaacatccctggactgaaaagcaagcacgcacctctgacccctaaagaagaggagtacctgcaggcccaggtgcggagcagaagcaagctggacgcccctaaggtggatctgctggtgaagaattgcctcctgcccctgagagagtacttcaagtatttcagccagaatagtctgcccctgggaggcagcggcggcggcctgttcgagagcgtgagcttcaaggacgtgaccatcgacttcagctgggaggagtggcagcagctggacttcgcccagaagagcctgtacagggacgtgatgctggagaactacttcaacctgatcagcgtgggctgccaggtgcccaagcccgaggtgatcttcaacctggagcaggtggagaacccctgcatgctgcacaggaagatcagcaggcagagctgcctggacggcgacatcggcggcggcccaagcagcggcgcccctcctcccagcggcggcagcccagccggctccccaacctctaccgaggagggcacctctgagtccgccacccccgagagcggccctggcacctccaccgagcccagcgagggcagcgcacccggcagccctgccggcagccccacctccacagaggagggaaccagcaccgagcccagcgaaggcagcgccccaggcaccagcaccgagcctagtgagcaggagattaaacggatcaacaagatcagaagaagacttgtgaaagacagcaacaccaagaaggccggcaagacaggccccatgaaaaccctgctggttagagtgatgacacccgatctgagagagcggctggaaaacctgagaaagaagcctgaaaatatcccccagcccatcagcaatacatctagagccaacctgaataagctgctgaccgattacaccgaaatgaagaaggcgatcctgcatgtgtactgggaagagttccagaaggaccctgtgggcctgatgagccgggtggcccagcctgccagcaagaagatcgatcagaacaagctgaaacctgagatggacgagaagggcaacctgaccaccgccggctttgcctgctctcagtgtggccagcccctgttcgtgtacaagctggagcaggtgtctgagaagggcaaggcttacaccaactacttcggacggtgcaatgtggccgagcacgaaaagctgatcctgctggcccagctgaagcccgagaaggatagcgacgaagccgtgacatatagcctgggaaagtttgggcagagggccctggatttctacagcattcatgtgaccaaggagtccacccaccccgtgaagcccctggcccagatcgccggaaacagatacgcctccggacctgtgggaaaggccctgagcgacgcatgtatgggcacaatcgcctccttcctgtctaagtaccaggacatcatcatcgaacaccagaaggtggtgaagggcaaccagaagagactggagagcctgcgggagctggccggcaaggaaaacctggaataccctagcgtgaccctgccacctcagcctcacaccaaggagggcgttgatgcctacaacgaagtgatcgcccgggtgcgaatgtgggtgaacctgaacctgtggcagaagctgaagctaagcagagatgatgccaagcctctgctgagactgaagggattcccttcctttcctctggtcgagagacaggccaacgaagtggactggtgggacatggtgtgtaacgtgaagaagctgatcaacgagaaaaaggaggatggcaaggtgttttggcagaatctggctggctacaagagacaggaagccctgagaccatacctgagcagcgaggaagatcggaagaagggaaagaaattcgctcggtaccagctgggcgacctgctgctgcacctggaaaagaagcacggcgaggactggggaaaggtgtacgacgaggcctgggagcggattgacaagaaagtggaaggcctgagcaagcacatcaagctggaagaggaacggagaagcgaggacgcccagagcaaggccgccctgaccgactggctgcgggctaaggccagcttcgtgatcgagggcctgaaggaggccgacaaggacgagttctgcagatgcgagctgaagctgcagaagtggtacggggacctgcggggaaagcccttcgccatcgaagccgagaacagcatcctggacatcagcggcttcagcaagcagtacaactgtgccttcatctggcagaaggacggcgtgaagaagctgaacctgtacctgatcatcaactacttcaagggcggcaagctgcggttcaagaagatcaaacctgaagccttcgaagccaacagattctacaccgtgatcaacaaaaagagcggcgagatcgtgcccatggaggtgaacttcaacttcgacgaccccaacctgatcatcctgcctctggcctttggcaagagacagggcagagaattcatctggaacgacctgctgtccctggaaaccggcagcctgaagctggccaacggaagagtgatcgagaagacactgtacaacagaagaacccggcaggatgagcctgccctgttcgtggccctgaccttcgagcggcgggaggtcctggactcctccaatatcaaaccaatgaacctgatcggcgtggcaagaggcgaaaacatccccgccgtgatcgccctgaccgaccccgagggctgcccactgagccggtttaaggatagcctgggaaacccaacccacatcctgagaatcggcgagagctataaggagaagcagcggaccatccaggccaagaaggaggtggagcagcggagagccggcggctacagccggaagtacgccagcaaagccaagaatctggcagacgatatggtgagaaacaccgctagagatctgctgtactacgccgtgacccaggatgccatgctgatcttcgccaacctgagccggggcttcggccggcagggcaagcggaccttcatggccgagagacagtacacacggatggaggactggctgaccgccaagctggcctacgagggcctgagcaagacctacctgtccaagacactggcccagtacacctccaagacatgcagcaactgtgggtttaccatcaccagcgccgactacgacagggtgctggagaagctgaagaagacagcaacaggctggatgaccacaattaacggcaaggagctgaaggtggagggccagattacctactacaacagatacaagagacagaacgtagtcaaggacctgtccgtcgagctggatagactgagcgaagaatctgtgaacaacgacatctcctcctggacaaagggcagaagcggagaagctctgagcctcctgaagaaaagattctcccatagacccgtgcaggagaagttcgtgtgcctgaactgcggcttcgagacacacgcagccgagcaagccgccctgaacatcgccagatcctggctgttcctgcggagccaggagtacaagaaataccagacaaacaagacaaccggcaacaccgataagagagccttcgtcgagacctggcagtccttttaccggaagaagcttaaggaggtgtggaaacctgccgtgcggtctggcggatctggcggaggctccaccagccccaagaaaaagagaaaagtctaagctgccttctgcggggcttgccttctggccatgcccttcttctctcccttgcacctgtacctcttggtctttgaataaagcctgagtaggaaggctagcaaaaaaaaaaaaaaaaaaaaaaaaaaaaaaaaaaaaaaaaaaaaaaaaaaaaaaaaaaaaaaaaaaaaaaaaaaaaaaaa

SEQ ID NO: 13539 - RNA, 5785 nt, synthetic construct
  source 1..5785: mol_type = other RNA
aggaaataagagagaaaagaagagtaagaagaaatataagagccaccatggcccctaagaagaagcgtaaagtgagccggatggaacgcctcgtctacgaggtgcggcagaagtgcagaaacatcgaggacatctgcatctcctgcggatctctgaacgtgaccctggagcacccactgttcatcggcggcatgtgccagaactgtaaaaactgttttctggagtgtgcctatcaatacgacgatgacggctaccagagctactgcaccatctgttgcggcggaagagaggtgctgatgtgtggaaataacaactgctgccggtgcttctgcgtggaatgcgtggacctgctggtgggccccggcgccgcccaggccgctattaaggaagatccttggaactgctacatgtgcggccacaagggcacatacggcctgctgagacggagagaggactggcctagcagactgcagatgttcttcgccaataaccacgaccaggagttcgacccccctaaggtgtaccctcccgtccccgccgagaagagaaagcccatccgggtcctgagcctgttcgatggcatcgccaccggtctgctggtgctgaaggacctgggcatccaggtggataggtacattgcctccgaggtgtgcgaggactccatcaccgtgggaatggtgcgtcatcagggcaagatcatgtacgtgggcgacgtgcggagcgtgacacagaagcatatccaggagtggggccctttcgacctggtgatcggcggcagcccttgcaatgacctgagcatcgtgaacccagcccggaagggcctgtacgagggaaccggcagactgttcttcgagttttacagactgctgcacgacgcccggcctaaggaaggcgacgaccggcccttcttttggctgttcgagaatgtggtggccatgggagtcagcgacaagcgggatattagccggttcctggagagcaaccccgtgatgatcgatgccaaggaagtgagcgccgcccaccgggccagatacttctggggcaatctgcctggcatgaacagacccctggccagcaccgtgaacgacaagctggagctgcaggagtgcctggagcacggccggatcgccaagttcagcaaggtgagaaccatcaccacccgaagcaacagcatcaaacaaggcaaggaccagcactttcctgtgttcatgaacgagaaggaggacatcctgtggtgtaccgagatggagagagtgttcgggttcccagtccactacacagatgtcagcaacatgtctagactggccagacagagactgctgggaagaagctggtccgtccctgtgatcagacacctgttcgcccctctgaaggagtacttcgcctgcgtgagcagcggcaacagcaacgccaacagccggggccccagcttctctagcggcctggtgccactgtccctgagagggagccacatgggccccatggagatctacaaaaccgtgagcgcctggaagcggcagcctgtgcgcgtgctgagcctgtttcggaatatcgataaagtcctgaaaagcctgggattcctggagagcggctctggctccggcggtggcaccctgaagtacgtggaggatgtgacaaacgtggtcagacgggatgtggagaagtggggccccttcgatctggtgtacggcagcacccaacccctgggcagctcttgtgaccggtgccctggctggtacatgtttcagttccaccggatcctgcagtacgccctgccgagacaggagtcccagcggccattcttttggattttcatggacaacttgctgctgaccgaggatgaccaggaaactaccactcggttcctgcagaccgaagccgtgaccctgcaggacgtgagaggccgggactaccagaacgccatgcgggtgtggtccaacatccctggactgaaaagcaagcacgcacctctgacccctaaagaagaggagtacctgcaggcccaggtgcggagcagaagcaagctggacgcccctaaggtggatctgctggtgaagaattgcctcctgcccctgagagagtacttcaagtatttcagccagaatagtctgcccctgggaggcagcggcggcggcgcccagggcctggtgctgttcgaggacgtgagcgtggacttcacccagaaggagtggcagctgctggacaggacccagaggctgctgtacagggacgtgatgctggagaactacggccacctggtgagcctgggccactgcgtgagcaagcccgagctgatcctgaagctggagcaggaggaggagccctggatcctgaagggccagctggccagcgagagccaccccgaggtgcagaggaccggcggcccaagcagcggcgcccctcctcccagcggcggcagcccagccggctccccaacctctaccgaggagggcacctctgagtccgccacccccgagagcggccctggcacctccaccgagcccagcgagggcagcgcacccggcagccctgccggcagccccacctccacagaggagggaaccagcaccgagcccagcgaaggcagcgccccaggcaccagcaccgagcctagtgagcaggagattaaacggatcaacaagatcagaagaagacttgtgaaagacagcaacaccaagaaggccggcaagacaggccccatgaaaaccctgctggttagagtgatgacacccgatctgagagagcggctggaaaacctgagaaagaagcctgaaaatatcccccagcccatcagcaatacatctagagccaacctgaataagctgctgaccgattacaccgaaatgaagaaggcgatcctgcatgtgtactgggaagagttccagaaggaccctgtgggcctgatgagccgggtggcccagcctgccagcaagaagatcgatcagaacaagctgaaacctgagatggacgagaagggcaacctgaccaccgccggctttgcctgctctcagtgtggccagcccctgttcgtgtacaagctggagcaggtgtctgagaagggcaaggcttacaccaactacttcggacggtgcaatgtggccgagcacgaaaagctgatcctgctggcccagctgaagcccgagaaggatagcgacgaagccgtgacatatagcctgggaaagtttgggcagagggccctggatttctacagcattcatgtgaccaaggagtccacccaccccgtgaagcccctggcccagatcgccggaaacagatacgcctccggacctgtgggaaaggccctgagcgacgcatgtatgggcacaatcgcctccttcctgtctaagtaccaggacatcatcatcgaacaccagaaggtggtgaagggcaaccagaagagactggagagcctgcgggagctggccggcaaggaaaacctggaataccctagcgtgaccctgccacctcagcctcacaccaaggagggcgttgatgcctacaacgaagtgatcgcccgggtgcgaatgtgggtgaacctgaacctgtggcagaagctgaagctaagcagagatgatgccaagcctctgctgagactgaagggattcccttcctttcctctggtcgagagacaggccaacgaagtggactggtgggacatggtgtgtaacgtgaagaagctgatcaacgagaaaaaggaggatggcaaggtgttttggcagaatctggctggctacaagagacaggaagccctgagaccatacctgagcagcgaggaagatcggaagaagggaaagaaattcgctcggtaccagctgggcgacctgctgctgcacctggaaaagaagcacggcgaggactggggaaaggtgtacgacgaggcctgggagcggattgacaagaaagtggaaggcctgagcaagcacatcaagctggaagaggaacggagaagcgaggacgcccagagcaaggccgccctgaccgactggctgcgggctaaggccagcttcgtgatcgagggcctgaaggaggccgacaaggacgagttctgcagatgcgagctgaagctgcagaagtggtacggggacctgcggggaaagcccttcgccatcgaagccgagaacagcatcctggacatcagcggcttcagcaagcagtacaactgtgccttcatctggcagaaggacggcgtgaagaagctgaacctgtacctgatcatcaactacttcaagggcggcaagctgcggttcaagaagatcaaacctgaagccttcgaagccaacagattctacaccgtgatcaacaaaaagagcggcgagatcgtgcccatggaggtgaacttcaacttcgacgaccccaacctgatcatcctgcctctggcctttggcaagagacagggcagagaattcatctggaacgacctgctgtccctggaaaccggcagcctgaagctggccaacggaagagtgatcgagaagacactgtacaacagaagaacccggcaggatgagcctgccctgttcgtggccctgaccttcgagcggcgggaggtcctggactcctccaatatcaaaccaatgaacctgatcggcgtggcaagaggcgaaaacatccccgccgtgatcgccctgaccgaccccgagggctgcccactgagccggtttaaggatagcctgggaaacccaacccacatcctgagaatcggcgagagctataaggagaagcagcggaccatccaggccaagaaggaggtggagcagcggagagccggcggctacagccggaagtacgccagcaaagccaagaatctggcagacgatatggtgagaaacaccgctagagatctgctgtactacgccgtgacccaggatgccatgctgatcttcgccaacctgagccggggcttcggccggcagggcaagcggaccttcatggccgagagacagtacacacggatggaggactggctgaccgccaagctggcctacgagggcctgagcaagacctacctgtccaagacactggcccagtacacctccaagacatgcagcaactgtgggtttaccatcaccagcgccgactacgacagggtgctggagaagctgaagaagacagcaacaggctggatgaccacaattaacggcaaggagctgaaggtggagggccagattacctactacaacagatacaagagacagaacgtagtcaaggacctgtccgtcgagctggatagactgagcgaagaatctgtgaacaacgacatctcctcctggacaaagggcagaagcggagaagctctgagcctcctgaagaaaagattctcccatagacccgtgcaggagaagttcgtgtgcctgaactgcggcttcgagacacacgcagccgagcaagccgccctgaacatcgccagatcctggctgttcctgcggagccaggagtacaagaaataccagacaaacaagacaaccggcaacaccgataagagagccttcgtcgagacctggcagtccttttaccggaagaagcttaaggaggtgtggaaacctgccgtgcggtctggcggatctggcggaggctccaccagccccaagaaaaagagaaaagtctaagctgccttctgcggggcttgccttctggccatgcccttcttctctcccttgcacctgtacctcttggtctttgaataaagcctgagtaggaaggctagcaaaaaaaaaaaaaaaaaaaaaaaaaaaaaaaaaaaaaaaaaaaaaaaaaaaaaaaaaaaaaaaaaaaaaaaaaaaaaaaa

SEQ ID NO: 13540 - RNA, 5785 nt, synthetic construct
  source 1..5785: mol_type = other RNA
aggaaataagagagaaaagaagagtaagaagaaatataagagccaccatggcccctaagaagaagcgtaaagtgagccggatggaacgcctcgtctacgaggtgcggcagaagtgcagaaacatcgaggacatctgcatctcctgcggatctctgaacgtgaccctggagcacccactgttcatcggcggcatgtgccagaactgtaaaaactgttttctggagtgtgcctatcaatacgacgatgacggctaccagagctactgcaccatctgttgcggcggaagagaggtgctgatgtgtggaaataacaactgctgccggtgcttctgcgtggaatgcgtggacctgctggtgggccccggcgccgcccaggccgctattaaggaagatccttggaactgctacatgtgcggccacaagggcacatacggcctgctgagacggagagaggactggcctagcagactgcagatgttcttcgccaataaccacgaccaggagttcgacccccctaaggtgtaccctcccgtccccgccgagaagagaaagcccatccgggtcctgagcctgttcgatggcatcgccaccggtctgctggtgctgaaggacctgggcatccaggtggataggtacattgcctccgaggtgtgcgaggactccatcaccgtgggaatggtgcgtcatcagggcaagatcatgtacgtgggcgacgtgcggagcgtgacacagaagcatatccaggagtggggccctttcgacctggtgatcggcggcagcccttgcaatgacctgagcatcgtgaacccagcccggaagggcctgtacgagggaaccggcagactgttcttcgagttttacagactgctgcacgacgcccggcctaaggaaggcgacgaccggcccttcttttggctgttcgagaatgtggtggccatgggagtcagcgacaagcgggatattagccggttcctggagagcaaccccgtgatgatcgatgccaaggaagtgagcgccgcccaccgggccagatacttctggggcaatctgcctggcatgaacagacccctggccagcaccgtgaacgacaagctggagctgcaggagtgcctggagcacggccggatcgccaagttcagcaaggtgagaaccatcaccacccgaagcaacagcatcaaacaaggcaaggaccagcactttcctgtgttcatgaacgagaaggaggacatcctgtggtgtaccgagatggagagagtgttcgggttcccagtccactacacagatgtcagcaacatgtctagactggccagacagagactgctgggaagaagctggtccgtccctgtgatcagacacctgttcgcccctctgaaggagtacttcgcctgcgtgagcagcggcaacagcaacgccaacagccggggccccagcttctctagcggcctggtgccactgtccctgagagggagccacatgggccccatggagatctacaaaaccgtgagcgcctggaagcggcagcctgtgcgcgtgctgagcctgtttcggaatatcgataaagtcctgaaaagcctgggattcctggagagcggctctggctccggcggtggcaccctgaagtacgtggaggatgtgacaaacgtggtcagacgggatgtggagaagtggggccccttcgatctggtgtacggcagcacccaacccctgggcagctcttgtgaccggtgccctggctggtacatgtttcagttccaccggatcctgcagtacgccctgccgagacaggagtcccagcggccattcttttggattttcatggacaacttgctgctgaccgaggatgaccaggaaactaccactcggttcctgcagaccgaagccgtgaccctgcaggacgtgagaggccgggactaccagaacgccatgcgggtgtggtccaacatccctggactgaaaagcaagcacgcacctctgacccctaaagaagaggagtacctgcaggcccaggtgcggagcagaagcaagctggacgcccctaaggtggatctgctggtgaagaattgcctcctgcccctgagagagtacttcaagtatttcagccagaatagtctgcccctgggaggcagcggcggcggcacccagggcagcctgagcttcagggacgtgaccgtgggcttcacccaggaggagtggcagcacctggaccccgcccagaggagcctgtacagggacgtgatgctggagaactacagccacctggtgagcctgggctacagcatcagcaagcccgaggtgatcctgaagctggagcagggcgaggagccctggatcctggaggaggagttccccagccagagcgacctggagctgatcaagagcggcggcccaagcagcggcgcccctcctcccagcggcggcagcccagccggctccccaacctctaccgaggagggcacctctgagtccgccacccccgagagcggccctggcacctccaccgagcccagcgagggcagcgcacccggcagccctgccggcagccccacctccacagaggagggaaccagcaccgagcccagcgaaggcagcgccccaggcaccagcaccgagcctagtgagcaggagattaaacggatcaacaagatcagaagaagacttgtgaaagacagcaacaccaagaaggccggcaagacaggccccatgaaaaccctgctggttagagtgatgacacccgatctgagagagcggctggaaaacctgagaaagaagcctgaaaatatcccccagcccatcagcaatacatctagagccaacctgaataagctgctgaccgattacaccgaaatgaagaaggcgatcctgcatgtgtactgggaagagttccagaaggaccctgtgggcctgatgagccgggtggcccagcctgccagcaagaagatcgatcagaacaagctgaaacctgagatggacgagaagggcaacctgaccaccgccggctttgcctgctctcagtgtggccagcccctgttcgtgtacaagctggagcaggtgtctgagaagggcaaggcttacaccaactacttcggacggtgcaatgtggccgagcacgaaaagctgatcctgctggcccagctgaagcccgagaaggatagcgacgaagccgtgacatatagcctgggaaagtttgggcagagggccctggatttctacagcattcatgtgaccaaggagtccacccaccccgtgaagcccctggcccagatcgccggaaacagatacgcctccggacctgtgggaaaggccctgagcgacgcatgtatgggcacaatcgcctccttcctgtctaagtaccaggacatcatcatcgaacaccagaaggtggtgaagggcaaccagaagagactggagagcctgcgggagctggccggcaaggaaaacctggaataccctagcgtgaccctgccacctcagcctcacaccaaggagggcgttgatgcctacaacgaagtgatcgcccgggtgcgaatgtgggtgaacctgaacctgtggcagaagctgaagctaagcagagatgatgccaagcctctgctgagactgaagggattcccttcctttcctctggtcgagagacaggccaacgaagtggactggtgggacatggtgtgtaacgtgaagaagctgatcaacgagaaaaaggaggatggcaaggtgttttggcagaatctggctggctacaagagacaggaagccctgagaccatacctgagcagcgaggaagatcggaagaagggaaagaaattcgctcggtaccagctgggcgacctgctgctgcacctggaaaagaagcacggcgaggactggggaaaggtgtacgacgaggcctgggagcggattgacaagaaagtggaaggcctgagcaagcacatcaagctggaagaggaacggagaagcgaggacgcccagagcaaggccgccctgaccgactggctgcgggctaaggccagcttcgtgatcgagggcctgaaggaggccgacaaggacgagttctgcagatgcgagctgaagctgcagaagtggtacggggacctgcggggaaagcccttcgccatcgaagccgagaacagcatcctggacatcagcggcttcagcaagcagtacaactgtgccttcatctggcagaaggacggcgtgaagaagctgaacctgtacctgatcatcaactacttcaagggcggcaagctgcggttcaagaagatcaaacctgaagccttcgaagccaacagattctacaccgtgatcaacaaaaagagcggcgagatcgtgcccatggaggtgaacttcaacttcgacgaccccaacctgatcatcctgcctctggcctttggcaagagacagggcagagaattcatctggaacgacctgctgtccctggaaaccggcagcctgaagctggccaacggaagagtgatcgagaagacactgtacaacagaagaacccggcaggatgagcctgccctgttcgtggccctgaccttcgagcggcgggaggtcctggactcctccaatatcaaaccaatgaacctgatcggcgtggcaagaggcgaaaacatccccgccgtgatcgccctgaccgaccccgagggctgcccactgagccggtttaaggatagcctgggaaacccaacccacatcctgagaatcggcgagagctataaggagaagcagcggaccatccaggccaagaaggaggtggagcagcggagagccggcggctacagccggaagtacgccagcaaagccaagaatctggcagacgatatggtgagaaacaccgctagagatctgctgtactacgccgtgacccaggatgccatgctgatcttcgccaacctgagccggggcttcggccggcagggcaagcggaccttcatggccgagagacagtacacacggatggaggactggctgaccgccaagctggcctacgagggcctgagcaagacctacctgtccaagacactggcccagtacacctccaagacatgcagcaactgtgggtttaccatcaccagcgccgactacgacagggtgctggagaagctgaagaagacagcaacaggctggatgaccacaattaacggcaaggagctgaaggtggagggccagattacctactacaacagatacaagagacagaacgtagtcaaggacctgtccgtcgagctggatagactgagcgaagaatctgtgaacaacgacatctcctcctggacaaagggcagaagcggagaagctctgagcctcctgaagaaaagattctcccatagacccgtgcaggagaagttcgtgtgcctgaactgcggcttcgagacacacgcagccgagcaagccgccctgaacatcgccagatcctggctgttcctgcggagccaggagtacaagaaataccagacaaacaagacaaccggcaacaccgataagagagccttcgtcgagacctggcagtccttttaccggaagaagcttaaggaggtgtggaaacctgccgtgcggtctggcggatctggcggaggctccaccagccccaagaaaaagagaaaagtctaagctgccttctgcggggcttgccttctggccatgcccttcttctctcccttgcacctgtacctcttggtctttgaataaagcctgagtaggaaggctagcaaaaaaaaaaaaaaaaaaaaaaaaaaaaaaaaaaaaaaaaaaaaaaaaaaaaaaaaaaaaaaaaaaaaaaaaaaaaaaaa

SEQ ID NO: 13541 - RNA, 5785 nt, synthetic construct
  source 1..5785: mol_type = other RNA
aggaaataagagagaaaagaagagtaagaagaaatataagagccaccatggcccctaagaagaagcgtaaagtgagccggatggaacgcctcgtctacgaggtgcggcagaagtgcagaaacatcgaggacatctgcatctcctgcggatctctgaacgtgaccctggagcacccactgttcatcggcggcatgtgccagaactgtaaaaactgttttctggagtgtgcctatcaatacgacgatgacggctaccagagctactgcaccatctgttgcggcggaagagaggtgctgatgtgtggaaataacaactgctgccggtgcttctgcgtggaatgcgtggacctgctggtgggccccggcgccgcccaggccgctattaaggaagatccttggaactgctacatgtgcggccacaagggcacatacggcctgctgagacggagagaggactggcctagcagactgcagatgttcttcgccaataaccacgaccaggagttcgacccccctaaggtgtaccctcccgtccccgccgagaagagaaagcccatccgggtcctgagcctgttcgatggcatcgccaccggtctgctggtgctgaaggacctgggcatccaggtggataggtacattgcctccgaggtgtgcgaggactccatcaccgtgggaatggtgcgtcatcagggcaagatcatgtacgtgggcgacgtgcggagcgtgacacagaagcatatccaggagtggggccctttcgacctggtgatcggcggcagcccttgcaatgacctgagcatcgtgaacccagcccggaagggcctgtacgagggaaccggcagactgttcttcgagttttacagactgctgcacgacgcccggcctaaggaaggcgacgaccggcccttcttttggctgttcgagaatgtggtggccatgggagtcagcgacaagcgggatattagccggttcctggagagcaaccccgtgatgatcgatgccaaggaagtgagcgccgcccaccgggccagatacttctggggcaatctgcctggcatgaacagacccctggccagcaccgtgaacgacaagctggagctgcaggagtgcctggagcacggccggatcgccaagttcagcaaggtgagaaccatcaccacccgaagcaacagcatcaaacaaggcaaggaccagcactttcctgtgttcatgaacgagaaggaggacatcctgtggtgtaccgagatggagagagtgttcgggttcccagtccactacacagatgtcagcaacatgtctagactggccagacagagactgctgggaagaagctggtccgtccctgtgatcagacacctgttcgcccctctgaaggagtacttcgcctgcgtgagcagcggcaacagcaacgccaacagccggggccccagcttctctagcggcctggtgccactgtccctgagagggagccacatgggccccatggagatctacaaaaccgtgagcgcctggaagcggcagcctgtgcgcgtgctgagcctgtttcggaatatcgataaagtcctgaaaagcctgggattcctggagagcggctctggctccggcggtggcaccctgaagtacgtggaggatgtgacaaacgtggtcagacgggatgtggagaagtggggccccttcgatctggtgtacggcagcacccaacccctgggcagctcttgtgaccggtgccctggctggtacatgtttcagttccaccggatcctgcagtacgccctgccgagacaggagtcccagcggccattcttttggattttcatggacaacttgctgctgaccgaggatgaccaggaaactaccactcggttcctgcagaccgaagccgtgaccctgcaggacgtgagaggccgggactaccagaacgccatgcgggtgtggtccaacatccctggactgaaaagcaagcacgcacctctgacccctaaagaagaggagtacctgcaggcccaggtgcggagcagaagcaagctggacgcccctaaggtggatctgctggtgaagaattgcctcctgcccctgagagagtacttcaagtatttcagccagaatagtctgcccctgggaggcagcggcggcggccaggccgagctgaccttcgaggacgtggccgtgttcctgagccaggaggagtggggcaggctggaccccgcccagaggggcctgtacagggacgtgatgctggagacctacaggaacctggtgagcctgggcgccggccccgccggccccaagcccggcgtgatcacccagctggagaggggcgacgagccctgggtgctggacacccagggcgtggagggcagggagaggcagaaggtggacggcggcccaagcagcggcgcccctcctcccagcggcggcagcccagccggctccccaacctctaccgaggagggcacctctgagtccgccacccccgagagcggccctggcacctccaccgagcccagcgagggcagcgcacccggcagccctgccggcagccccacctccacagaggagggaaccagcaccgagcccagcgaaggcagcgccccaggcaccagcaccgagcctagtgagcaggagattaaacggatcaacaagatcagaagaagacttgtgaaagacagcaacaccaagaaggccggcaagacaggccccatgaaaaccctgctggttagagtgatgacacccgatctgagagagcggctggaaaacctgagaaagaagcctgaaaatatcccccagcccatcagcaatacatctagagccaacctgaataagctgctgaccgattacaccgaaatgaagaaggcgatcctgcatgtgtactgggaagagttccagaaggaccctgtgggcctgatgagccgggtggcccagcctgccagcaagaagatcgatcagaacaagctgaaacctgagatggacgagaagggcaacctgaccaccgccggctttgcctgctctcagtgtggccagcccctgttcgtgtacaagctggagcaggtgtctgagaagggcaaggcttacaccaactacttcggacggtgcaatgtggccgagcacgaaaagctgatcctgctggcccagctgaagcccgagaaggatagcgacgaagccgtgacatatagcctgggaaagtttgggcagagggccctggatttctacagcattcatgtgaccaaggagtccacccaccccgtgaagcccctggcccagatcgccggaaacagatacgcctccggacctgtgggaaaggccctgagcgacgcatgtatgggcacaatcgcctccttcctgtctaagtaccaggacatcatcatcgaacaccagaaggtggtgaagggcaaccagaagagactggagagcctgcgggagctggccggcaaggaaaacctggaataccctagcgtgaccctgccacctcagcctcacaccaaggagggcgttgatgcctacaacgaagtgatcgcccgggtgcgaatgtgggtgaacctgaacctgtggcagaagctgaagctaagcagagatgatgccaagcctctgctgagactgaagggattcccttcctttcctctggtcgagagacaggccaacgaagtggactggtgggacatggtgtgtaacgtgaagaagctgatcaacgagaaaaaggaggatggcaaggtgttttggcagaatctggctggctacaagagacaggaagccctgagaccatacctgagcagcgaggaagatcggaagaagggaaagaaattcgctcggtaccagctgggcgacctgctgctgcacctggaaaagaagcacggcgaggactggggaaaggtgtacgacgaggcctgggagcggattgacaagaaagtggaaggcctgagcaagcacatcaagctggaagaggaacggagaagcgaggacgcccagagcaaggccgccctgaccgactggctgcgggctaaggccagcttcgtgatcgagggcctgaaggaggccgacaaggacgagttctgcagatgcgagctgaagctgcagaagtggtacggggacctgcggggaaagcccttcgccatcgaagccgagaacagcatcctggacatcagcggcttcagcaagcagtacaactgtgccttcatctggcagaaggacggcgtgaagaagctgaacctgtacctgatcatcaactacttcaagggcggcaagctgcggttcaagaagatcaaacctgaagccttcgaagccaacagattctacaccgtgatcaacaaaaagagcggcgagatcgtgcccatggaggtgaacttcaacttcgacgaccccaacctgatcatcctgcctctggcctttggcaagagacagggcagagaattcatctggaacgacctgctgtccctggaaaccggcagcctgaagctggccaacggaagagtgatcgagaagacactgtacaacagaagaacccggcaggatgagcctgccctgttcgtggccctgaccttcgagcggcgggaggtcctggactcctccaatatcaaaccaatgaacctgatcggcgtggcaagaggcgaaaacatccccgccgtgatcgccctgaccgaccccgagggctgcccactgagccggtttaaggatagcctgggaaacccaacccacatcctgagaatcggcgagagctataaggagaagcagcggaccatccaggccaagaaggaggtggagcagcggagagccggcggctacagccggaagtacgccagcaaagccaagaatctggcagacgatatggtgagaaacaccgctagagatctgctgtactacgccgtgacccaggatgccatgctgatcttcgccaacctgagccggggcttcggccggcagggcaagcggaccttcatggccgagagacagtacacacggatggaggactggctgaccgccaagctggcctacgagggcctgagcaagacctacctgtccaagacactggcccagtacacctccaagacatgcagcaactgtgggtttaccatcaccagcgccgactacgacagggtgctggagaagctgaagaagacagcaacaggctggatgaccacaattaacggcaaggagctgaaggtggagggccagattacctactacaacagatacaagagacagaacgtagtcaaggacctgtccgtcgagctggatagactgagcgaagaatctgtgaacaacgacatctcctcctggacaaagggcagaagcggagaagctctgagcctcctgaagaaaagattctcccatagacccgtgcaggagaagttcgtgtgcctgaactgcggcttcgagacacacgcagccgagcaagccgccctgaacatcgccagatcctggctgttcctgcggagccaggagtacaagaaataccagacaaacaagacaaccggcaacaccgataagagagccttcgtcgagacctggcagtccttttaccggaagaagcttaaggaggtgtggaaacctgccgtgcggtctggcggatctggcggaggctccaccagccccaagaaaaagagaaaagtctaagctgccttctgcggggcttgccttctggccatgcccttcttctctcccttgcacctgtacctcttggtctttgaataaagcctgagtaggaaggctagcaaaaaaaaaaaaaaaaaaaaaaaaaaaaaaaaaaaaaaaaaaaaaaaaaaaaaaaaaaaaaaaaaaaaaaaaaaaaaaaa

SEQ ID NO: 13542 - RNA, 5785 nt, synthetic construct
  source 1..5785: mol_type = other RNA
aggaaataagagagaaaagaagagtaagaagaaatataagagccaccatggcccctaagaagaagcgtaaagtgagccggatggaacgcctcgtctacgaggtgcggcagaagtgcagaaacatcgaggacatctgcatctcctgcggatctctgaacgtgaccctggagcacccactgttcatcggcggcatgtgccagaactgtaaaaactgttttctggagtgtgcctatcaatacgacgatgacggctaccagagctactgcaccatctgttgcggcggaagagaggtgctgatgtgtggaaataacaactgctgccggtgcttctgcgtggaatgcgtggacctgctggtgggccccggcgccgcccaggccgctattaaggaagatccttggaactgctacatgtgcggccacaagggcacatacggcctgctgagacggagagaggactggcctagcagactgcagatgttcttcgccaataaccacgaccaggagttcgacccccctaaggtgtaccctcccgtccccgccgagaagagaaagcccatccgggtcctgagcctgttcgatggcatcgccaccggtctgctggtgctgaaggacctgggcatccaggtggataggtacattgcctccgaggtgtgcgaggactccatcaccgtgggaatggtgcgtcatcagggcaagatcatgtacgtgggcgacgtgcggagcgtgacacagaagcatatccaggagtggggccctttcgacctggtgatcggcggcagcccttgcaatgacctgagcatcgtgaacccagcccggaagggcctgtacgagggaaccggcagactgttcttcgagttttacagactgctgcacgacgcccggcctaaggaaggcgacgaccggcccttcttttggctgttcgagaatgtggtggccatgggagtcagcgacaagcgggatattagccggttcctggagagcaaccccgtgatgatcgatgccaaggaagtgagcgccgcccaccgggccagatacttctggggcaatctgcctggcatgaacagacccctggccagcaccgtgaacgacaagctggagctgcaggagtgcctggagcacggccggatcgccaagttcagcaaggtgagaaccatcaccacccgaagcaacagcatcaaacaaggcaaggaccagcactttcctgtgttcatgaacgagaaggaggacatcctgtggtgtaccgagatggagagagtgttcgggttcccagtccactacacagatgtcagcaacatgtctagactggccagacagagactgctgggaagaagctggtccgtccctgtgatcagacacctgttcgcccctctgaaggagtacttcgcctgcgtgagcagcggcaacagcaacgccaacagccggggccccagcttctctagcggcctggtgccactgtccctgagagggagccacatgggccccatggagatctacaaaaccgtgagcgcctggaagcggcagcctgtgcgcgtgctgagcctgtttcggaatatcgataaagtcctgaaaagcctgggattcctggagagcggctctggctccggcggtggcaccctgaagtacgtggaggatgtgacaaacgtggtcagacgggatgtggagaagtggggccccttcgatctggtgtacggcagcacccaacccctgggcagctcttgtgaccggtgccctggctggtacatgtttcagttccaccggatcctgcagtacgccctgccgagacaggagtcccagcggccattcttttggattttcatggacaacttgctgctgaccgaggatgaccaggaaactaccactcggttcctgcagaccgaagccgtgaccctgcaggacgtgagaggccgggactaccagaacgccatgcgggtgtggtccaacatccctggactgaaaagcaagcacgcacctctgacccctaaagaagaggagtacctgcaggcccaggtgcggagcagaagcaagctggacgcccctaaggtggatctgctggtgaagaattgcctcctgcccctgagagagtacttcaagtatttcagccagaatagtctgcccctgggaggcagcggcggcggcgcccaggtgcccgtgaccttcgaggacatcgccatctacttcagccaggaggagtgggagtacctggacgagggccagaaggccctgtacagggaggtgatgaaggagaactacgagaccctgctgctgctgggctgccccggcctgaagcccgtgatcatcagcagcatcgagcagggcgaggagccctgcgtgaggaagctgcaggagagggccgagctgtaccccaccgccggcgacgagggcggcccaagcagcggcgcccctcctcccagcggcggcagcccagccggctccccaacctctaccgaggagggcacctctgagtccgccacccccgagagcggccctggcacctccaccgagcccagcgagggcagcgcacccggcagccctgccggcagccccacctccacagaggagggaaccagcaccgagcccagcgaaggcagcgccccaggcaccagcaccgagcctagtgagcaggagattaaacggatcaacaagatcagaagaagacttgtgaaagacagcaacaccaagaaggccggcaagacaggccccatgaaaaccctgctggttagagtgatgacacccgatctgagagagcggctggaaaacctgagaaagaagcctgaaaatatcccccagcccatcagcaatacatctagagccaacctgaataagctgctgaccgattacaccgaaatgaagaaggcgatcctgcatgtgtactgggaagagttccagaaggaccctgtgggcctgatgagccgggtggcccagcctgccagcaagaagatcgatcagaacaagctgaaacctgagatggacgagaagggcaacctgaccaccgccggctttgcctgctctcagtgtggccagcccctgttcgtgtacaagctggagcaggtgtctgagaagggcaaggcttacaccaactacttcggacggtgcaatgtggccgagcacgaaaagctgatcctgctggcccagctgaagcccgagaaggatagcgacgaagccgtgacatatagcctgggaaagtttgggcagagggccctggatttctacagcattcatgtgaccaaggagtccacccaccccgtgaagcccctggcccagatcgccggaaacagatacgcctccggacctgtgggaaaggccctgagcgacgcatgtatgggcacaatcgcctccttcctgtctaagtaccaggacatcatcatcgaacaccagaaggtggtgaagggcaaccagaagagactggagagcctgcgggagctggccggcaaggaaaacctggaataccctagcgtgaccctgccacctcagcctcacaccaaggagggcgttgatgcctacaacgaagtgatcgcccgggtgcgaatgtgggtgaacctgaacctgtggcagaagctgaagctaagcagagatgatgccaagcctctgctgagactgaagggattcccttcctttcctctggtcgagagacaggccaacgaagtggactggtgggacatggtgtgtaacgtgaagaagctgatcaacgagaaaaaggaggatggcaaggtgttttggcagaatctggctggctacaagagacaggaagccctgagaccatacctgagcagcgaggaagatcggaagaagggaaagaaattcgctcggtaccagctgggcgacctgctgctgcacctggaaaagaagcacggcgaggactggggaaaggtgtacgacgaggcctgggagcggattgacaagaaagtggaaggcctgagcaagcacatcaagctggaagaggaacggagaagcgaggacgcccagagcaaggccgccctgaccgactggctgcgggctaaggccagcttcgtgatcgagggcctgaaggaggccgacaaggacgagttctgcagatgcgagctgaagctgcagaagtggtacggggacctgcggggaaagcccttcgccatcgaagccgagaacagcatcctggacatcagcggcttcagcaagcagtacaactgtgccttcatctggcagaaggacggcgtgaagaagctgaacctgtacctgatcatcaactacttcaagggcggcaagctgcggttcaagaagatcaaacctgaagccttcgaagccaacagattctacaccgtgatcaacaaaaagagcggcgagatcgtgcccatggaggtgaacttcaacttcgacgaccccaacctgatcatcctgcctctggcctttggcaagagacagggcagagaattcatctggaacgacctgctgtccctggaaaccggcagcctgaagctggccaacggaagagtgatcgagaagacactgtacaacagaagaacccggcaggatgagcctgccctgttcgtggccctgaccttcgagcggcgggaggtcctggactcctccaatatcaaaccaatgaacctgatcggcgtggcaagaggcgaaaacatccccgccgtgatcgccctgaccgaccccgagggctgcccactgagccggtttaaggatagcctgggaaacccaacccacatcctgagaatcggcgagagctataaggagaagcagcggaccatccaggccaagaaggaggtggagcagcggagagccggcggctacagccggaagtacgccagcaaagccaagaatctggcagacgatatggtgagaaacaccgctagagatctgctgtactacgccgtgacccaggatgccatgctgatcttcgccaacctgagccggggcttcggccggcagggcaagcggaccttcatggccgagagacagtacacacggatggaggactggctgaccgccaagctggcctacgagggcctgagcaagacctacctgtccaagacactggcccagtacacctccaagacatgcagcaactgtgggtttaccatcaccagcgccgactacgacagggtgctggagaagctgaagaagacagcaacaggctggatgaccacaattaacggcaaggagctgaaggtggagggccagattacctactacaacagatacaagagacagaacgtagtcaaggacctgtccgtcgagctggatagactgagcgaagaatctgtgaacaacgacatctcctcctggacaaagggcagaagcggagaagctctgagcctcctgaagaaaagattctcccatagacccgtgcaggagaagttcgtgtgcctgaactgcggcttcgagacacacgcagccgagcaagccgccctgaacatcgccagatcctggctgttcctgcggagccaggagtacaagaaataccagacaaacaagacaaccggcaacaccgataagagagccttcgtcgagacctggcagtccttttaccggaagaagcttaaggaggtgtggaaacctgccgtgcggtctggcggatctggcggaggctccaccagccccaagaaaaagagaaaagtctaagctgccttctgcggggcttgccttctggccatgcccttcttctctcccttgcacctgtacctcttggtctttgaataaagcctgagtaggaaggctagcaaaaaaaaaaaaaaaaaaaaaaaaaaaaaaaaaaaaaaaaaaaaaaaaaaaaaaaaaaaaaaaaaaaaaaaaaaaaaaaa

SEQ ID NO: 13543 - RNA, 5785 nt, synthetic construct
  source 1..5785: mol_type = other RNA
aggaaataagagagaaaagaagagtaagaagaaatataagagccaccatggcccctaagaagaagcgtaaagtgagccggatggaacgcctcgtctacgaggtgcggcagaagtgcagaaacatcgaggacatctgcatctcctgcggatctctgaacgtgaccctggagcacccactgttcatcggcggcatgtgccagaactgtaaaaactgttttctggagtgtgcctatcaatacgacgatgacggctaccagagctactgcaccatctgttgcggcggaagagaggtgctgatgtgtggaaataacaactgctgccggtgcttctgcgtggaatgcgtggacctgctggtgggccccggcgccgcccaggccgctattaaggaagatccttggaactgctacatgtgcggccacaagggcacatacggcctgctgagacggagagaggactggcctagcagactgcagatgttcttcgccaataaccacgaccaggagttcgacccccctaaggtgtaccctcccgtccccgccgagaagagaaagcccatccgggtcctgagcctgttcgatggcatcgccaccggtctgctggtgctgaaggacctgggcatccaggtggataggtacattgcctccgaggtgtgcgaggactccatcaccgtgggaatggtgcgtcatcagggcaagatcatgtacgtgggcgacgtgcggagcgtgacacagaagcatatccaggagtggggccctttcgacctggtgatcggcggcagcccttgcaatgacctgagcatcgtgaacccagcccggaagggcctgtacgagggaaccggcagactgttcttcgagttttacagactgctgcacgacgcccggcctaaggaaggcgacgaccggcccttcttttggctgttcgagaatgtggtggccatgggagtcagcgacaagcgggatattagccggttcctggagagcaaccccgtgatgatcgatgccaaggaagtgagcgccgcccaccgggccagatacttctggggcaatctgcctggcatgaacagacccctggccagcaccgtgaacgacaagctggagctgcaggagtgcctggagcacggccggatcgccaagttcagcaaggtgagaaccatcaccacccgaagcaacagcatcaaacaaggcaaggaccagcactttcctgtgttcatgaacgagaaggaggacatcctgtggtgtaccgagatggagagagtgttcgggttcccagtccactacacagatgtcagcaacatgtctagactggccagacagagactgctgggaagaagctggtccgtccctgtgatcagacacctgttcgcccctctgaaggagtacttcgcctgcgtgagcagcggcaacagcaacgccaacagccggggccccagcttctctagcggcctggtgccactgtccctgagagggagccacatgggccccatggagatctacaaaaccgtgagcgcctggaagcggcagcctgtgcgcgtgctgagcctgtttcggaatatcgataaagtcctgaaaagcctgggattcctggagagcggctctggctccggcggtggcaccctgaagtacgtggaggatgtgacaaacgtggtcagacgggatgtggagaagtggggccccttcgatctggtgtacggcagcacccaacccctgggcagctcttgtgaccggtgccctggctggtacatgtttcagttccaccggatcctgcagtacgccctgccgagacaggagtcccagcggccattcttttggattttcatggacaacttgctgctgaccgaggatgaccaggaaactaccactcggttcctgcagaccgaagccgtgaccctgcaggacgtgagaggccgggactaccagaacgccatgcgggtgtggtccaacatccctggactgaaaagcaagcacgcacctctgacccctaaagaagaggagtacctgcaggcccaggtgcggagcagaagcaagctggacgcccctaaggtggatctgctggtgaagaattgcctcctgcccctgagagagtacttcaagtatttcagccagaatagtctgcccctgggaggcagcggcggcggccccaaggtgcccgtgagcttcgaggacgtgagcgtgtacttcaccaagaccgagtggaagctgctggacgtgcagcagaggatcctgtacaagaccgtgatgctggagaactaccaccacctggtgagcctgggctgcctgagcaccaagccccacctggtgagctggctggagcagggcgagggcccctggaccaccgacatctggaggacccccgccaccgccaagacccagaccgagggcggcggcccaagcagcggcgcccctcctcccagcggcggcagcccagccggctccccaacctctaccgaggagggcacctctgagtccgccacccccgagagcggccctggcacctccaccgagcccagcgagggcagcgcacccggcagccctgccggcagccccacctccacagaggagggaaccagcaccgagcccagcgaaggcagcgccccaggcaccagcaccgagcctagtgagcaggagattaaacggatcaacaagatcagaagaagacttgtgaaagacagcaacaccaagaaggccggcaagacaggccccatgaaaaccctgctggttagagtgatgacacccgatctgagagagcggctggaaaacctgagaaagaagcctgaaaatatcccccagcccatcagcaatacatctagagccaacctgaataagctgctgaccgattacaccgaaatgaagaaggcgatcctgcatgtgtactgggaagagttccagaaggaccctgtgggcctgatgagccgggtggcccagcctgccagcaagaagatcgatcagaacaagctgaaacctgagatggacgagaagggcaacctgaccaccgccggctttgcctgctctcagtgtggccagcccctgttcgtgtacaagctggagcaggtgtctgagaagggcaaggcttacaccaactacttcggacggtgcaatgtggccgagcacgaaaagctgatcctgctggcccagctgaagcccgagaaggatagcgacgaagccgtgacatatagcctgggaaagtttgggcagagggccctggatttctacagcattcatgtgaccaaggagtccacccaccccgtgaagcccctggcccagatcgccggaaacagatacgcctccggacctgtgggaaaggccctgagcgacgcatgtatgggcacaatcgcctccttcctgtctaagtaccaggacatcatcatcgaacaccagaaggtggtgaagggcaaccagaagagactggagagcctgcgggagctggccggcaaggaaaacctggaataccctagcgtgaccctgccacctcagcctcacaccaaggagggcgttgatgcctacaacgaagtgatcgcccgggtgcgaatgtgggtgaacctgaacctgtggcagaagctgaagctaagcagagatgatgccaagcctctgctgagactgaagggattcccttcctttcctctggtcgagagacaggccaacgaagtggactggtgggacatggtgtgtaacgtgaagaagctgatcaacgagaaaaaggaggatggcaaggtgttttggcagaatctggctggctacaagagacaggaagccctgagaccatacctgagcagcgaggaagatcggaagaagggaaagaaattcgctcggtaccagctgggcgacctgctgctgcacctggaaaagaagcacggcgaggactggggaaaggtgtacgacgaggcctgggagcggattgacaagaaagtggaaggcctgagcaagcacatcaagctggaagaggaacggagaagcgaggacgcccagagcaaggccgccctgaccgactggctgcgggctaaggccagcttcgtgatcgagggcctgaaggaggccgacaaggacgagttctgcagatgcgagctgaagctgcagaagtggtacggggacctgcggggaaagcccttcgccatcgaagccgagaacagcatcctggacatcagcggcttcagcaagcagtacaactgtgccttcatctggcagaaggacggcgtgaagaagctgaacctgtacctgatcatcaactacttcaagggcggcaagctgcggttcaagaagatcaaacctgaagccttcgaagccaacagattctacaccgtgatcaacaaaaagagcggcgagatcgtgcccatggaggtgaacttcaacttcgacgaccccaacctgatcatcctgcctctggcctttggcaagagacagggcagagaattcatctggaacgacctgctgtccctggaaaccggcagcctgaagctggccaacggaagagtgatcgagaagacactgtacaacagaagaacccggcaggatgagcctgccctgttcgtggccctgaccttcgagcggcgggaggtcctggactcctccaatatcaaaccaatgaacctgatcggcgtggcaagaggcgaaaacatccccgccgtgatcgccctgaccgaccccgagggctgcccactgagccggtttaaggatagcctgggaaacccaacccacatcctgagaatcggcgagagctataaggagaagcagcggaccatccaggccaagaaggaggtggagcagcggagagccggcggctacagccggaagtacgccagcaaagccaagaatctggcagacgatatggtgagaaacaccgctagagatctgctgtactacgccgtgacccaggatgccatgctgatcttcgccaacctgagccggggcttcggccggcagggcaagcggaccttcatggccgagagacagtacacacggatggaggactggctgaccgccaagctggcctacgagggcctgagcaagacctacctgtccaagacactggcccagtacacctccaagacatgcagcaactgtgggtttaccatcaccagcgccgactacgacagggtgctggagaagctgaagaagacagcaacaggctggatgaccacaattaacggcaaggagctgaaggtggagggccagattacctactacaacagatacaagagacagaacgtagtcaaggacctgtccgtcgagctggatagactgagcgaagaatctgtgaacaacgacatctcctcctggacaaagggcagaagcggagaagctctgagcctcctgaagaaaagattctcccatagacccgtgcaggagaagttcgtgtgcctgaactgcggcttcgagacacacgcagccgagcaagccgccctgaacatcgccagatcctggctgttcctgcggagccaggagtacaagaaataccagacaaacaagacaaccggcaacaccgataagagagccttcgtcgagacctggcagtccttttaccggaagaagcttaaggaggtgtggaaacctgccgtgcggtctggcggatctggcggaggctccaccagccccaagaaaaagagaaaagtctaagctgccttctgcggggcttgccttctggccatgcccttcttctctcccttgcacctgtacctcttggtctttgaataaagcctgagtaggaaggctagcaaaaaaaaaaaaaaaaaaaaaaaaaaaaaaaaaaaaaaaaaaaaaaaaaaaaaaaaaaaaaaaaaaaaaaaaaaaaaaaa

SEQ ID NO: 13544 - RNA, 5785 nt, synthetic construct
  source 1..5785: mol_type = other RNA
aggaaataagagagaaaagaagagtaagaagaaatataagagccaccatggcccctaagaagaagcgtaaagtgagccggatggaacgcctcgtctacgaggtgcggcagaagtgcagaaacatcgaggacatctgcatctcctgcggatctctgaacgtgaccctggagcacccactgttcatcggcggcatgtgccagaactgtaaaaactgttttctggagtgtgcctatcaatacgacgatgacggctaccagagctactgcaccatctgttgcggcggaagagaggtgctgatgtgtggaaataacaactgctgccggtgcttctgcgtggaatgcgtggacctgctggtgggccccggcgccgcccaggccgctattaaggaagatccttggaactgctacatgtgcggccacaagggcacatacggcctgctgagacggagagaggactggcctagcagactgcagatgttcttcgccaataaccacgaccaggagttcgacccccctaaggtgtaccctcccgtccccgccgagaagagaaagcccatccgggtcctgagcctgttcgatggcatcgccaccggtctgctggtgctgaaggacctgggcatccaggtggataggtacattgcctccgaggtgtgcgaggactccatcaccgtgggaatggtgcgtcatcagggcaagatcatgtacgtgggcgacgtgcggagcgtgacacagaagcatatccaggagtggggccctttcgacctggtgatcggcggcagcccttgcaatgacctgagcatcgtgaacccagcccggaagggcctgtacgagggaaccggcagactgttcttcgagttttacagactgctgcacgacgcccggcctaaggaaggcgacgaccggcccttcttttggctgttcgagaatgtggtggccatgggagtcagcgacaagcgggatattagccggttcctggagagcaaccccgtgatgatcgatgccaaggaagtgagcgccgcccaccgggccagatacttctggggcaatctgcctggcatgaacagacccctggccagcaccgtgaacgacaagctggagctgcaggagtgcctggagcacggccggatcgccaagttcagcaaggtgagaaccatcaccacccgaagcaacagcatcaaacaaggcaaggaccagcactttcctgtgttcatgaacgagaaggaggacatcctgtggtgtaccgagatggagagagtgttcgggttcccagtccactacacagatgtcagcaacatgtctagactggccagacagagactgctgggaagaagctggtccgtccctgtgatcagacacctgttcgcccctctgaaggagtacttcgcctgcgtgagcagcggcaacagcaacgccaacagccggggccccagcttctctagcggcctggtgccactgtccctgagagggagccacatgggccccatggagatctacaaaaccgtgagcgcctggaagcggcagcctgtgcgcgtgctgagcctgtttcggaatatcgataaagtcctgaaaagcctgggattcctggagagcggctctggctccggcggtggcaccctgaagtacgtggaggatgtgacaaacgtggtcagacgggatgtggagaagtggggccccttcgatctggtgtacggcagcacccaacccctgggcagctcttgtgaccggtgccctggctggtacatgtttcagttccaccggatcctgcagtacgccctgccgagacaggagtcccagcggccattcttttggattttcatggacaacttgctgctgaccgaggatgaccaggaaactaccactcggttcctgcagaccgaagccgtgaccctgcaggacgtgagaggccgggactaccagaacgccatgcgggtgtggtccaacatccctggactgaaaagcaagcacgcacctctgacccctaaagaagaggagtacctgcaggcccaggtgcggagcagaagcaagctggacgcccctaaggtggatctgctggtgaagaattgcctcctgcccctgagagagtacttcaagtatttcagccagaatagtctgcccctgggaggcagcggcggcggcacccaggtgagcgtgaccttcgacgacgtggccgtgaccttcacccaggaggagtggaggcagctggaccccgcccagaggaccctgtaccaggaggtgatgctggagaactgcaggctgctggtgagcctgggctgccccgtgcccaggctggagctgatcttccagctggagcagggccagaagctgtggaccgtgaagaaggacctgagcaggagcacctgccccggcaagaggtgcaggggcggcccaagcagcggcgcccctcctcccagcggcggcagcccagccggctccccaacctctaccgaggagggcacctctgagtccgccacccccgagagcggccctggcacctccaccgagcccagcgagggcagcgcacccggcagccctgccggcagccccacctccacagaggagggaaccagcaccgagcccagcgaaggcagcgccccaggcaccagcaccgagcctagtgagcaggagattaaacggatcaacaagatcagaagaagacttgtgaaagacagcaacaccaagaaggccggcaagacaggccccatgaaaaccctgctggttagagtgatgacacccgatctgagagagcggctggaaaacctgagaaagaagcctgaaaatatcccccagcccatcagcaatacatctagagccaacctgaataagctgctgaccgattacaccgaaatgaagaaggcgatcctgcatgtgtactgggaagagttccagaaggaccctgtgggcctgatgagccgggtggcccagcctgccagcaagaagatcgatcagaacaagctgaaacctgagatggacgagaagggcaacctgaccaccgccggctttgcctgctctcagtgtggccagcccctgttcgtgtacaagctggagcaggtgtctgagaagggcaaggcttacaccaactacttcggacggtgcaatgtggccgagcacgaaaagctgatcctgctggcccagctgaagcccgagaaggatagcgacgaagccgtgacatatagcctgggaaagtttgggcagagggccctggatttctacagcattcatgtgaccaaggagtccacccaccccgtgaagcccctggcccagatcgccggaaacagatacgcctccggacctgtgggaaaggccctgagcgacgcatgtatgggcacaatcgcctccttcctgtctaagtaccaggacatcatcatcgaacaccagaaggtggtgaagggcaaccagaagagactggagagcctgcgggagctggccggcaaggaaaacctggaataccctagcgtgaccctgccacctcagcctcacaccaaggagggcgttgatgcctacaacgaagtgatcgcccgggtgcgaatgtgggtgaacctgaacctgtggcagaagctgaagctaagcagagatgatgccaagcctctgctgagactgaagggattcccttcctttcctctggtcgagagacaggccaacgaagtggactggtgggacatggtgtgtaacgtgaagaagctgatcaacgagaaaaaggaggatggcaaggtgttttggcagaatctggctggctacaagagacaggaagccctgagaccatacctgagcagcgaggaagatcggaagaagggaaagaaattcgctcggtaccagctgggcgacctgctgctgcacctggaaaagaagcacggcgaggactggggaaaggtgtacgacgaggcctgggagcggattgacaagaaagtggaaggcctgagcaagcacatcaagctggaagaggaacggagaagcgaggacgcccagagcaaggccgccctgaccgactggctgcgggctaaggccagcttcgtgatcgagggcctgaaggaggccgacaaggacgagttctgcagatgcgagctgaagctgcagaagtggtacggggacctgcggggaaagcccttcgccatcgaagccgagaacagcatcctggacatcagcggcttcagcaagcagtacaactgtgccttcatctggcagaaggacggcgtgaagaagctgaacctgtacctgatcatcaactacttcaagggcggcaagctgcggttcaagaagatcaaacctgaagccttcgaagccaacagattctacaccgtgatcaacaaaaagagcggcgagatcgtgcccatggaggtgaacttcaacttcgacgaccccaacctgatcatcctgcctctggcctttggcaagagacagggcagagaattcatctggaacgacctgctgtccctggaaaccggcagcctgaagctggccaacggaagagtgatcgagaagacactgtacaacagaagaacccggcaggatgagcctgccctgttcgtggccctgaccttcgagcggcgggaggtcctggactcctccaatatcaaaccaatgaacctgatcggcgtggcaagaggcgaaaacatccccgccgtgatcgccctgaccgaccccgagggctgcccactgagccggtttaaggatagcctgggaaacccaacccacatcctgagaatcggcgagagctataaggagaagcagcggaccatccaggccaagaaggaggtggagcagcggagagccggcggctacagccggaagtacgccagcaaagccaagaatctggcagacgatatggtgagaaacaccgctagagatctgctgtactacgccgtgacccaggatgccatgctgatcttcgccaacctgagccggggcttcggccggcagggcaagcggaccttcatggccgagagacagtacacacggatggaggactggctgaccgccaagctggcctacgagggcctgagcaagacctacctgtccaagacactggcccagtacacctccaagacatgcagcaactgtgggtttaccatcaccagcgccgactacgacagggtgctggagaagctgaagaagacagcaacaggctggatgaccacaattaacggcaaggagctgaaggtggagggccagattacctactacaacagatacaagagacagaacgtagtcaaggacctgtccgtcgagctggatagactgagcgaagaatctgtgaacaacgacatctcctcctggacaaagggcagaagcggagaagctctgagcctcctgaagaaaagattctcccatagacccgtgcaggagaagttcgtgtgcctgaactgcggcttcgagacacacgcagccgagcaagccgccctgaacatcgccagatcctggctgttcctgcggagccaggagtacaagaaataccagacaaacaagacaaccggcaacaccgataagagagccttcgtcgagacctggcagtccttttaccggaagaagcttaaggaggtgtggaaacctgccgtgcggtctggcggatctggcggaggctccaccagccccaagaaaaagagaaaagtctaagctgccttctgcggggcttgccttctggccatgcccttcttctctcccttgcacctgtacctcttggtctttgaataaagcctgagtaggaaggctagcaaaaaaaaaaaaaaaaaaaaaaaaaaaaaaaaaaaaaaaaaaaaaaaaaaaaaaaaaaaaaaaaaaaaaaaaaaaaaaaa

SEQ ID NO: 13545 - RNA, 5785 nt, synthetic construct
  source 1..5785: mol_type = other RNA
aggaaataagagagaaaagaagagtaagaagaaatataagagccaccatggcccctaagaagaagcgtaaagtgagccggatggaacgcctcgtctacgaggtgcggcagaagtgcagaaacatcgaggacatctgcatctcctgcggatctctgaacgtgaccctggagcacccactgttcatcggcggcatgtgccagaactgtaaaaactgttttctggagtgtgcctatcaatacgacgatgacggctaccagagctactgcaccatctgttgcggcggaagagaggtgctgatgtgtggaaataacaactgctgccggtgcttctgcgtggaatgcgtggacctgctggtgggccccggcgccgcccaggccgctattaaggaagatccttggaactgctacatgtgcggccacaagggcacatacggcctgctgagacggagagaggactggcctagcagactgcagatgttcttcgccaataaccacgaccaggagttcgacccccctaaggtgtaccctcccgtccccgccgagaagagaaagcccatccgggtcctgagcctgttcgatggcatcgccaccggtctgctggtgctgaaggacctgggcatccaggtggataggtacattgcctccgaggtgtgcgaggactccatcaccgtgggaatggtgcgtcatcagggcaagatcatgtacgtgggcgacgtgcggagcgtgacacagaagcatatccaggagtggggccctttcgacctggtgatcggcggcagcccttgcaatgacctgagcatcgtgaacccagcccggaagggcctgtacgagggaaccggcagactgttcttcgagttttacagactgctgcacgacgcccggcctaaggaaggcgacgaccggcccttcttttggctgttcgagaatgtggtggccatgggagtcagcgacaagcgggatattagccggttcctggagagcaaccccgtgatgatcgatgccaaggaagtgagcgccgcccaccgggccagatacttctggggcaatctgcctggcatgaacagacccctggccagcaccgtgaacgacaagctggagctgcaggagtgcctggagcacggccggatcgccaagttcagcaaggtgagaaccatcaccacccgaagcaacagcatcaaacaaggcaaggaccagcactttcctgtgttcatgaacgagaaggaggacatcctgtggtgtaccgagatggagagagtgttcgggttcccagtccactacacagatgtcagcaacatgtctagactggccagacagagactgctgggaagaagctggtccgtccctgtgatcagacacctgttcgcccctctgaaggagtacttcgcctgcgtgagcagcggcaacagcaacgccaacagccggggccccagcttctctagcggcctggtgccactgtccctgagagggagccacatgggccccatggagatctacaaaaccgtgagcgcctggaagcggcagcctgtgcgcgtgctgagcctgtttcggaatatcgataaagtcctgaaaagcctgggattcctggagagcggctctggctccggcggtggcaccctgaagtacgtggaggatgtgacaaacgtggtcagacgggatgtggagaagtggggccccttcgatctggtgtacggcagcacccaacccctgggcagctcttgtgaccggtgccctggctggtacatgtttcagttccaccggatcctgcagtacgccctgccgagacaggagtcccagcggccattcttttggattttcatggacaacttgctgctgaccgaggatgaccaggaaactaccactcggttcctgcagaccgaagccgtgaccctgcaggacgtgagaggccgggactaccagaacgccatgcgggtgtggtccaacatccctggactgaaaagcaagcacgcacctctgacccctaaagaagaggagtacctgcaggcccaggtgcggagcagaagcaagctggacgcccctaaggtggatctgctggtgaagaattgcctcctgcccctgagagagtacttcaagtatttcagccagaatagtctgcccctgggaggcagcggcggcggccaggcccaggagaccctgaccttcgaggacgtggccgtggacttcacctgggaggagtggcagctgctggcccccccccagaaggacctgtacagggacgtgatgctggagaactacagcaacctgctgagcgtgggcttccaggccagcaagcccaacgtgctgagcaagctgggccagggcgagccctggaccatggaggacgagatccactgccagaccaggagcgagatctggaaggtgggcggcccaagcagcggcgcccctcctcccagcggcggcagcccagccggctccccaacctctaccgaggagggcacctctgagtccgccacccccgagagcggccctggcacctccaccgagcccagcgagggcagcgcacccggcagccctgccggcagccccacctccacagaggagggaaccagcaccgagcccagcgaaggcagcgccccaggcaccagcaccgagcctagtgagcaggagattaaacggatcaacaagatcagaagaagacttgtgaaagacagcaacaccaagaaggccggcaagacaggccccatgaaaaccctgctggttagagtgatgacacccgatctgagagagcggctggaaaacctgagaaagaagcctgaaaatatcccccagcccatcagcaatacatctagagccaacctgaataagctgctgaccgattacaccgaaatgaagaaggcgatcctgcatgtgtactgggaagagttccagaaggaccctgtgggcctgatgagccgggtggcccagcctgccagcaagaagatcgatcagaacaagctgaaacctgagatggacgagaagggcaacctgaccaccgccggctttgcctgctctcagtgtggccagcccctgttcgtgtacaagctggagcaggtgtctgagaagggcaaggcttacaccaactacttcggacggtgcaatgtggccgagcacgaaaagctgatcctgctggcccagctgaagcccgagaaggatagcgacgaagccgtgacatatagcctgggaaagtttgggcagagggccctggatttctacagcattcatgtgaccaaggagtccacccaccccgtgaagcccctggcccagatcgccggaaacagatacgcctccggacctgtgggaaaggccctgagcgacgcatgtatgggcacaatcgcctccttcctgtctaagtaccaggacatcatcatcgaacaccagaaggtggtgaagggcaaccagaagagactggagagcctgcgggagctggccggcaaggaaaacctggaataccctagcgtgaccctgccacctcagcctcacaccaaggagggcgttgatgcctacaacgaagtgatcgcccgggtgcgaatgtgggtgaacctgaacctgtggcagaagctgaagctaagcagagatgatgccaagcctctgctgagactgaagggattcccttcctttcctctggtcgagagacaggccaacgaagtggactggtgggacatggtgtgtaacgtgaagaagctgatcaacgagaaaaaggaggatggcaaggtgttttggcagaatctggctggctacaagagacaggaagccctgagaccatacctgagcagcgaggaagatcggaagaagggaaagaaattcgctcggtaccagctgggcgacctgctgctgcacctggaaaagaagcacggcgaggactggggaaaggtgtacgacgaggcctgggagcggattgacaagaaagtggaaggcctgagcaagcacatcaagctggaagaggaacggagaagcgaggacgcccagagcaaggccgccctgaccgactggctgcgggctaaggccagcttcgtgatcgagggcctgaaggaggccgacaaggacgagttctgcagatgcgagctgaagctgcagaagtggtacggggacctgcggggaaagcccttcgccatcgaagccgagaacagcatcctggacatcagcggcttcagcaagcagtacaactgtgccttcatctggcagaaggacggcgtgaagaagctgaacctgtacctgatcatcaactacttcaagggcggcaagctgcggttcaagaagatcaaacctgaagccttcgaagccaacagattctacaccgtgatcaacaaaaagagcggcgagatcgtgcccatggaggtgaacttcaacttcgacgaccccaacctgatcatcctgcctctggcctttggcaagagacagggcagagaattcatctggaacgacctgctgtccctggaaaccggcagcctgaagctggccaacggaagagtgatcgagaagacactgtacaacagaagaacccggcaggatgagcctgccctgttcgtggccctgaccttcgagcggcgggaggtcctggactcctccaatatcaaaccaatgaacctgatcggcgtggcaagaggcgaaaacatccccgccgtgatcgccctgaccgaccccgagggctgcccactgagccggtttaaggatagcctgggaaacccaacccacatcctgagaatcggcgagagctataaggagaagcagcggaccatccaggccaagaaggaggtggagcagcggagagccggcggctacagccggaagtacgccagcaaagccaagaatctggcagacgatatggtgagaaacaccgctagagatctgctgtactacgccgtgacccaggatgccatgctgatcttcgccaacctgagccggggcttcggccggcagggcaagcggaccttcatggccgagagacagtacacacggatggaggactggctgaccgccaagctggcctacgagggcctgagcaagacctacctgtccaagacactggcccagtacacctccaagacatgcagcaactgtgggtttaccatcaccagcgccgactacgacagggtgctggagaagctgaagaagacagcaacaggctggatgaccacaattaacggcaaggagctgaaggtggagggccagattacctactacaacagatacaagagacagaacgtagtcaaggacctgtccgtcgagctggatagactgagcgaagaatctgtgaacaacgacatctcctcctggacaaagggcagaagcggagaagctctgagcctcctgaagaaaagattctcccatagacccgtgcaggagaagttcgtgtgcctgaactgcggcttcgagacacacgcagccgagcaagccgccctgaacatcgccagatcctggctgttcctgcggagccaggagtacaagaaataccagacaaacaagacaaccggcaacaccgataagagagccttcgtcgagacctggcagtccttttaccggaagaagcttaaggaggtgtggaaacctgccgtgcggtctggcggatctggcggaggctccaccagccccaagaaaaagagaaaagtctaagctgccttctgcggggcttgccttctggccatgcccttcttctctcccttgcacctgtacctcttggtctttgaataaagcctgagtaggaaggctagcaaaaaaaaaaaaaaaaaaaaaaaaaaaaaaaaaaaaaaaaaaaaaaaaaaaaaaaaaaaaaaaaaaaaaaaaaaaaaaaa

SEQ ID NO: 13546 - RNA, 5785 nt, synthetic construct
  source 1..5785: mol_type = other RNA
aggaaataagagagaaaagaagagtaagaagaaatataagagccaccatggcccctaagaagaagcgtaaagtgagccggatggaacgcctcgtctacgaggtgcggcagaagtgcagaaacatcgaggacatctgcatctcctgcggatctctgaacgtgaccctggagcacccactgttcatcggcggcatgtgccagaactgtaaaaactgttttctggagtgtgcctatcaatacgacgatgacggctaccagagctactgcaccatctgttgcggcggaagagaggtgctgatgtgtggaaataacaactgctgccggtgcttctgcgtggaatgcgtggacctgctggtgggccccggcgccgcccaggccgctattaaggaagatccttggaactgctacatgtgcggccacaagggcacatacggcctgctgagacggagagaggactggcctagcagactgcagatgttcttcgccaataaccacgaccaggagttcgacccccctaaggtgtaccctcccgtccccgccgagaagagaaagcccatccgggtcctgagcctgttcgatggcatcgccaccggtctgctggtgctgaaggacctgggcatccaggtggataggtacattgcctccgaggtgtgcgaggactccatcaccgtgggaatggtgcgtcatcagggcaagatcatgtacgtgggcgacgtgcggagcgtgacacagaagcatatccaggagtggggccctttcgacctggtgatcggcggcagcccttgcaatgacctgagcatcgtgaacccagcccggaagggcctgtacgagggaaccggcagactgttcttcgagttttacagactgctgcacgacgcccggcctaaggaaggcgacgaccggcccttcttttggctgttcgagaatgtggtggccatgggagtcagcgacaagcgggatattagccggttcctggagagcaaccccgtgatgatcgatgccaaggaagtgagcgccgcccaccgggccagatacttctggggcaatctgcctggcatgaacagacccctggccagcaccgtgaacgacaagctggagctgcaggagtgcctggagcacggccggatcgccaagttcagcaaggtgagaaccatcaccacccgaagcaacagcatcaaacaaggcaaggaccagcactttcctgtgttcatgaacgagaaggaggacatcctgtggtgtaccgagatggagagagtgttcgggttcccagtccactacacagatgtcagcaacatgtctagactggccagacagagactgctgggaagaagctggtccgtccctgtgatcagacacctgttcgcccctctgaaggagtacttcgcctgcgtgagcagcggcaacagcaacgccaacagccggggccccagcttctctagcggcctggtgccactgtccctgagagggagccacatgggccccatggagatctacaaaaccgtgagcgcctggaagcggcagcctgtgcgcgtgctgagcctgtttcggaatatcgataaagtcctgaaaagcctgggattcctggagagcggctctggctccggcggtggcaccctgaagtacgtggaggatgtgacaaacgtggtcagacgggatgtggagaagtggggccccttcgatctggtgtacggcagcacccaacccctgggcagctcttgtgaccggtgccctggctggtacatgtttcagttccaccggatcctgcagtacgccctgccgagacaggagtcccagcggccattcttttggattttcatggacaacttgctgctgaccgaggatgaccaggaaactaccactcggttcctgcagaccgaagccgtgaccctgcaggacgtgagaggccgggactaccagaacgccatgcgggtgtggtccaacatccctggactgaaaagcaagcacgcacctctgacccctaaagaagaggagtacctgcaggcccaggtgcggagcagaagcaagctggacgcccctaaggtggatctgctggtgaagaattgcctcctgcccctgagagagtacttcaagtatttcagccagaatagtctgcccctgggaggcagcggcggcggcccccagggcagcctgaccttcagggacgtggccatcgagttcagccaggaggagtggaagtgcctggaccccatccagaaggccctgtacagggacgtgatgctggagaactacaggaacctgggcttcctgggcctgtgcctgcccgacctgaacatcatcagcatgctggaggagggcaaggagccctggaccgtggtgagccaggtgaagatcgccaggaaccccaactggggcgagtgcggcggcccaagcagcggcgcccctcctcccagcggcggcagcccagccggctccccaacctctaccgaggagggcacctctgagtccgccacccccgagagcggccctggcacctccaccgagcccagcgagggcagcgcacccggcagccctgccggcagccccacctccacagaggagggaaccagcaccgagcccagcgaaggcagcgccccaggcaccagcaccgagcctagtgagcaggagattaaacggatcaacaagatcagaagaagacttgtgaaagacagcaacaccaagaaggccggcaagacaggccccatgaaaaccctgctggttagagtgatgacacccgatctgagagagcggctggaaaacctgagaaagaagcctgaaaatatcccccagcccatcagcaatacatctagagccaacctgaataagctgctgaccgattacaccgaaatgaagaaggcgatcctgcatgtgtactgggaagagttccagaaggaccctgtgggcctgatgagccgggtggcccagcctgccagcaagaagatcgatcagaacaagctgaaacctgagatggacgagaagggcaacctgaccaccgccggctttgcctgctctcagtgtggccagcccctgttcgtgtacaagctggagcaggtgtctgagaagggcaaggcttacaccaactacttcggacggtgcaatgtggccgagcacgaaaagctgatcctgctggcccagctgaagcccgagaaggatagcgacgaagccgtgacatatagcctgggaaagtttgggcagagggccctggatttctacagcattcatgtgaccaaggagtccacccaccccgtgaagcccctggcccagatcgccggaaacagatacgcctccggacctgtgggaaaggccctgagcgacgcatgtatgggcacaatcgcctccttcctgtctaagtaccaggacatcatcatcgaacaccagaaggtggtgaagggcaaccagaagagactggagagcctgcgggagctggccggcaaggaaaacctggaataccctagcgtgaccctgccacctcagcctcacaccaaggagggcgttgatgcctacaacgaagtgatcgcccgggtgcgaatgtgggtgaacctgaacctgtggcagaagctgaagctaagcagagatgatgccaagcctctgctgagactgaagggattcccttcctttcctctggtcgagagacaggccaacgaagtggactggtgggacatggtgtgtaacgtgaagaagctgatcaacgagaaaaaggaggatggcaaggtgttttggcagaatctggctggctacaagagacaggaagccctgagaccatacctgagcagcgaggaagatcggaagaagggaaagaaattcgctcggtaccagctgggcgacctgctgctgcacctggaaaagaagcacggcgaggactggggaaaggtgtacgacgaggcctgggagcggattgacaagaaagtggaaggcctgagcaagcacatcaagctggaagaggaacggagaagcgaggacgcccagagcaaggccgccctgaccgactggctgcgggctaaggccagcttcgtgatcgagggcctgaaggaggccgacaaggacgagttctgcagatgcgagctgaagctgcagaagtggtacggggacctgcggggaaagcccttcgccatcgaagccgagaacagcatcctggacatcagcggcttcagcaagcagtacaactgtgccttcatctggcagaaggacggcgtgaagaagctgaacctgtacctgatcatcaactacttcaagggcggcaagctgcggttcaagaagatcaaacctgaagccttcgaagccaacagattctacaccgtgatcaacaaaaagagcggcgagatcgtgcccatggaggtgaacttcaacttcgacgaccccaacctgatcatcctgcctctggcctttggcaagagacagggcagagaattcatctggaacgacctgctgtccctggaaaccggcagcctgaagctggccaacggaagagtgatcgagaagacactgtacaacagaagaacccggcaggatgagcctgccctgttcgtggccctgaccttcgagcggcgggaggtcctggactcctccaatatcaaaccaatgaacctgatcggcgtggcaagaggcgaaaacatccccgccgtgatcgccctgaccgaccccgagggctgcccactgagccggtttaaggatagcctgggaaacccaacccacatcctgagaatcggcgagagctataaggagaagcagcggaccatccaggccaagaaggaggtggagcagcggagagccggcggctacagccggaagtacgccagcaaagccaagaatctggcagacgatatggtgagaaacaccgctagagatctgctgtactacgccgtgacccaggatgccatgctgatcttcgccaacctgagccggggcttcggccggcagggcaagcggaccttcatggccgagagacagtacacacggatggaggactggctgaccgccaagctggcctacgagggcctgagcaagacctacctgtccaagacactggcccagtacacctccaagacatgcagcaactgtgggtttaccatcaccagcgccgactacgacagggtgctggagaagctgaagaagacagcaacaggctggatgaccacaattaacggcaaggagctgaaggtggagggccagattacctactacaacagatacaagagacagaacgtagtcaaggacctgtccgtcgagctggatagactgagcgaagaatctgtgaacaacgacatctcctcctggacaaagggcagaagcggagaagctctgagcctcctgaagaaaagattctcccatagacccgtgcaggagaagttcgtgtgcctgaactgcggcttcgagacacacgcagccgagcaagccgccctgaacatcgccagatcctggctgttcctgcggagccaggagtacaagaaataccagacaaacaagacaaccggcaacaccgataagagagccttcgtcgagacctggcagtccttttaccggaagaagcttaaggaggtgtggaaacctgccgtgcggtctggcggatctggcggaggctccaccagccccaagaaaaagagaaaagtctaagctgccttctgcggggcttgccttctggccatgcccttcttctctcccttgcacctgtacctcttggtctttgaataaagcctgagtaggaaggctagcaaaaaaaaaaaaaaaaaaaaaaaaaaaaaaaaaaaaaaaaaaaaaaaaaaaaaaaaaaaaaaaaaaaaaaaaaaaaaaaa

SEQ ID NO: 13547 - RNA, 5794 nt, synthetic construct
  source 1..5794: mol_type = other RNA
aggaaataagagagaaaagaagagtaagaagaaatataagagccaccatggcccctaagaagaagcgtaaagtgagccggatggaacgcctcgtctacgaggtgcggcagaagtgcagaaacatcgaggacatctgcatctcctgcggatctctgaacgtgaccctggagcacccactgttcatcggcggcatgtgccagaactgtaaaaactgttttctggagtgtgcctatcaatacgacgatgacggctaccagagctactgcaccatctgttgcggcggaagagaggtgctgatgtgtggaaataacaactgctgccggtgcttctgcgtggaatgcgtggacctgctggtgggccccggcgccgcccaggccgctattaaggaagatccttggaactgctacatgtgcggccacaagggcacatacggcctgctgagacggagagaggactggcctagcagactgcagatgttcttcgccaataaccacgaccaggagttcgacccccctaaggtgtaccctcccgtccccgccgagaagagaaagcccatccgggtcctgagcctgttcgatggcatcgccaccggtctgctggtgctgaaggacctgggcatccaggtggataggtacattgcctccgaggtgtgcgaggactccatcaccgtgggaatggtgcgtcatcagggcaagatcatgtacgtgggcgacgtgcggagcgtgacacagaagcatatccaggagtggggccctttcgacctggtgatcggcggcagcccttgcaatgacctgagcatcgtgaacccagcccggaagggcctgtacgagggaaccggcagactgttcttcgagttttacagactgctgcacgacgcccggcctaaggaaggcgacgaccggcccttcttttggctgttcgagaatgtggtggccatgggagtcagcgacaagcgggatattagccggttcctggagagcaaccccgtgatgatcgatgccaaggaagtgagcgccgcccaccgggccagatacttctggggcaatctgcctggcatgaacagacccctggccagcaccgtgaacgacaagctggagctgcaggagtgcctggagcacggccggatcgccaagttcagcaaggtgagaaccatcaccacccgaagcaacagcatcaaacaaggcaaggaccagcactttcctgtgttcatgaacgagaaggaggacatcctgtggtgtaccgagatggagagagtgttcgggttcccagtccactacacagatgtcagcaacatgtctagactggccagacagagactgctgggaagaagctggtccgtccctgtgatcagacacctgttcgcccctctgaaggagtacttcgcctgcgtgagcagcggcaacagcaacgccaacagccggggccccagcttctctagcggcctggtgccactgtccctgagagggagccacatgggccccatggagatctacaaaaccgtgagcgcctggaagcggcagcctgtgcgcgtgctgagcctgtttcggaatatcgataaagtcctgaaaagcctgggattcctggagagcggctctggctccggcggtggcaccctgaagtacgtggaggatgtgacaaacgtggtcagacgggatgtggagaagtggggccccttcgatctggtgtacggcagcacccaacccctgggcagctcttgtgaccggtgccctggctggtacatgtttcagttccaccggatcctgcagtacgccctgccgagacaggagtcccagcggccattcttttggattttcatggacaacttgctgctgaccgaggatgaccaggaaactaccactcggttcctgcagaccgaagccgtgaccctgcaggacgtgagaggccgggactaccagaacgccatgcgggtgtggtccaacatccctggactgaaaagcaagcacgcacctctgacccctaaagaagaggagtacctgcaggcccaggtgcggagcagaagcaagctggacgcccctaaggtggatctgctggtgaagaattgcctcctgcccctgagagagtacttcaagtatttcagccagaatagtctgcccctgggaggcagcggcggcggcgtgacctacaacgacgtgcacatcgacttcacctgggaggagtggaccctgctggacctgagccagaagaacctgtacaaggacgtgatgctggagacctactggaacctgctgaccatcggctacagctgggaggaccacaacatcgaggagcactgccagagcagcaggaggtacgagaggcacgagaggagccaggccggcgagaagcccagcatctacacccagtgcatcaaggccttcgagcacctgggcggcccaagcagcggcgcccctcctcccagcggcggcagcccagccggctccccaacctctaccgaggagggcacctctgagtccgccacccccgagagcggccctggcacctccaccgagcccagcgagggcagcgcacccggcagccctgccggcagccccacctccacagaggagggaaccagcaccgagcccagcgaaggcagcgccccaggcaccagcaccgagcctagtgagcaggagattaaacggatcaacaagatcagaagaagacttgtgaaagacagcaacaccaagaaggccggcaagacaggccccatgaaaaccctgctggttagagtgatgacacccgatctgagagagcggctggaaaacctgagaaagaagcctgaaaatatcccccagcccatcagcaatacatctagagccaacctgaataagctgctgaccgattacaccgaaatgaagaaggcgatcctgcatgtgtactgggaagagttccagaaggaccctgtgggcctgatgagccgggtggcccagcctgccagcaagaagatcgatcagaacaagctgaaacctgagatggacgagaagggcaacctgaccaccgccggctttgcctgctctcagtgtggccagcccctgttcgtgtacaagctggagcaggtgtctgagaagggcaaggcttacaccaactacttcggacggtgcaatgtggccgagcacgaaaagctgatcctgctggcccagctgaagcccgagaaggatagcgacgaagccgtgacatatagcctgggaaagtttgggcagagggccctggatttctacagcattcatgtgaccaaggagtccacccaccccgtgaagcccctggcccagatcgccggaaacagatacgcctccggacctgtgggaaaggccctgagcgacgcatgtatgggcacaatcgcctccttcctgtctaagtaccaggacatcatcatcgaacaccagaaggtggtgaagggcaaccagaagagactggagagcctgcgggagctggccggcaaggaaaacctggaataccctagcgtgaccctgccacctcagcctcacaccaaggagggcgttgatgcctacaacgaagtgatcgcccgggtgcgaatgtgggtgaacctgaacctgtggcagaagctgaagctaagcagagatgatgccaagcctctgctgagactgaagggattcccttcctttcctctggtcgagagacaggccaacgaagtggactggtgggacatggtgtgtaacgtgaagaagctgatcaacgagaaaaaggaggatggcaaggtgttttggcagaatctggctggctacaagagacaggaagccctgagaccatacctgagcagcgaggaagatcggaagaagggaaagaaattcgctcggtaccagctgggcgacctgctgctgcacctggaaaagaagcacggcgaggactggggaaaggtgtacgacgaggcctgggagcggattgacaagaaagtggaaggcctgagcaagcacatcaagctggaagaggaacggagaagcgaggacgcccagagcaaggccgccctgaccgactggctgcgggctaaggccagcttcgtgatcgagggcctgaaggaggccgacaaggacgagttctgcagatgcgagctgaagctgcagaagtggtacggggacctgcggggaaagcccttcgccatcgaagccgagaacagcatcctggacatcagcggcttcagcaagcagtacaactgtgccttcatctggcagaaggacggcgtgaagaagctgaacctgtacctgatcatcaactacttcaagggcggcaagctgcggttcaagaagatcaaacctgaagccttcgaagccaacagattctacaccgtgatcaacaaaaagagcggcgagatcgtgcccatggaggtgaacttcaacttcgacgaccccaacctgatcatcctgcctctggcctttggcaagagacagggcagagaattcatctggaacgacctgctgtccctggaaaccggcagcctgaagctggccaacggaagagtgatcgagaagacactgtacaacagaagaacccggcaggatgagcctgccctgttcgtggccctgaccttcgagcggcgggaggtcctggactcctccaatatcaaaccaatgaacctgatcggcgtggcaagaggcgaaaacatccccgccgtgatcgccctgaccgaccccgagggctgcccactgagccggtttaaggatagcctgggaaacccaacccacatcctgagaatcggcgagagctataaggagaagcagcggaccatccaggccaagaaggaggtggagcagcggagagccggcggctacagccggaagtacgccagcaaagccaagaatctggcagacgatatggtgagaaacaccgctagagatctgctgtactacgccgtgacccaggatgccatgctgatcttcgccaacctgagccggggcttcggccggcagggcaagcggaccttcatggccgagagacagtacacacggatggaggactggctgaccgccaagctggcctacgagggcctgagcaagacctacctgtccaagacactggcccagtacacctccaagacatgcagcaactgtgggtttaccatcaccagcgccgactacgacagggtgctggagaagctgaagaagacagcaacaggctggatgaccacaattaacggcaaggagctgaaggtggagggccagattacctactacaacagatacaagagacagaacgtagtcaaggacctgtccgtcgagctggatagactgagcgaagaatctgtgaacaacgacatctcctcctggacaaagggcagaagcggagaagctctgagcctcctgaagaaaagattctcccatagacccgtgcaggagaagttcgtgtgcctgaactgcggcttcgagacacacgcagccgagcaagccgccctgaacatcgccagatcctggctgttcctgcggagccaggagtacaagaaataccagacaaacaagacaaccggcaacaccgataagagagccttcgtcgagacctggcagtccttttaccggaagaagcttaaggaggtgtggaaacctgccgtgcggtctggcggatctggcggaggctccaccagccccaagaaaaagagaaaagtctaagctgccttctgcggggcttgccttctggccatgcccttcttctctcccttgcacctgtacctcttggtctttgaataaagcctgagtaggaaggctagcaaaaaaaaaaaaaaaaaaaaaaaaaaaaaaaaaaaaaaaaaaaaaaaaaaaaaaaaaaaaaaaaaaaaaaaaaaaaaaaa

SEQ ID NO: 13548 - RNA, 5785 nt, synthetic construct
  source 1..5785: mol_type = other RNA
aggaaataagagagaaaagaagagtaagaagaaatataagagccaccatggcccctaagaagaagcgtaaagtgagccggatggaacgcctcgtctacgaggtgcggcagaagtgcagaaacatcgaggacatctgcatctcctgcggatctctgaacgtgaccctggagcacccactgttcatcggcggcatgtgccagaactgtaaaaactgttttctggagtgtgcctatcaatacgacgatgacggctaccagagctactgcaccatctgttgcggcggaagagaggtgctgatgtgtggaaataacaactgctgccggtgcttctgcgtggaatgcgtggacctgctggtgggccccggcgccgcccaggccgctattaaggaagatccttggaactgctacatgtgcggccacaagggcacatacggcctgctgagacggagagaggactggcctagcagactgcagatgttcttcgccaataaccacgaccaggagttcgacccccctaaggtgtaccctcccgtccccgccgagaagagaaagcccatccgggtcctgagcctgttcgatggcatcgccaccggtctgctggtgctgaaggacctgggcatccaggtggataggtacattgcctccgaggtgtgcgaggactccatcaccgtgggaatggtgcgtcatcagggcaagatcatgtacgtgggcgacgtgcggagcgtgacacagaagcatatccaggagtggggccctttcgacctggtgatcggcggcagcccttgcaatgacctgagcatcgtgaacccagcccggaagggcctgtacgagggaaccggcagactgttcttcgagttttacagactgctgcacgacgcccggcctaaggaaggcgacgaccggcccttcttttggctgttcgagaatgtggtggccatgggagtcagcgacaagcgggatattagccggttcctggagagcaaccccgtgatgatcgatgccaaggaagtgagcgccgcccaccgggccagatacttctggggcaatctgcctggcatgaacagacccctggccagcaccgtgaacgacaagctggagctgcaggagtgcctggagcacggccggatcgccaagttcagcaaggtgagaaccatcaccacccgaagcaacagcatcaaacaaggcaaggaccagcactttcctgtgttcatgaacgagaaggaggacatcctgtggtgtaccgagatggagagagtgttcgggttcccagtccactacacagatgtcagcaacatgtctagactggccagacagagactgctgggaagaagctggtccgtccctgtgatcagacacctgttcgcccctctgaaggagtacttcgcctgcgtgagcagcggcaacagcaacgccaacagccggggccccagcttctctagcggcctggtgccactgtccctgagagggagccacatgggccccatggagatctacaaaaccgtgagcgcctggaagcggcagcctgtgcgcgtgctgagcctgtttcggaatatcgataaagtcctgaaaagcctgggattcctggagagcggctctggctccggcggtggcaccctgaagtacgtggaggatgtgacaaacgtggtcagacgggatgtggagaagtggggccccttcgatctggtgtacggcagcacccaacccctgggcagctcttgtgaccggtgccctggctggtacatgtttcagttccaccggatcctgcagtacgccctgccgagacaggagtcccagcggccattcttttggattttcatggacaacttgctgctgaccgaggatgaccaggaaactaccactcggttcctgcagaccgaagccgtgaccctgcaggacgtgagaggccgggactaccagaacgccatgcgggtgtggtccaacatccctggactgaaaagcaagcacgcacctctgacccctaaagaagaggagtacctgcaggcccaggtgcggagcagaagcaagctggacgcccctaaggtggatctgctggtgaagaattgcctcctgcccctgagagagtacttcaagtatttcagccagaatagtctgcccctgggaggcagcggcggcggcctggccagcatcagcttcgaggacctggccgtgaccttcaccgaggaggagtgggagcacctggacctgggccagaggaacctgtaccaggaggtgatgctggagacctaccagctgctggtgagcctgggcgaccaggtgaggctggccccccccacccccggcacccccctgcccgccctgcccgcccagcccaggctgctgggcctgcccagccagcccctggacaggaggggcacccccggcggcccaagcagcggcgcccctcctcccagcggcggcagcccagccggctccccaacctctaccgaggagggcacctctgagtccgccacccccgagagcggccctggcacctccaccgagcccagcgagggcagcgcacccggcagccctgccggcagccccacctccacagaggagggaaccagcaccgagcccagcgaaggcagcgccccaggcaccagcaccgagcctagtgagcaggagattaaacggatcaacaagatcagaagaagacttgtgaaagacagcaacaccaagaaggccggcaagacaggccccatgaaaaccctgctggttagagtgatgacacccgatctgagagagcggctggaaaacctgagaaagaagcctgaaaatatcccccagcccatcagcaatacatctagagccaacctgaataagctgctgaccgattacaccgaaatgaagaaggcgatcctgcatgtgtactgggaagagttccagaaggaccctgtgggcctgatgagccgggtggcccagcctgccagcaagaagatcgatcagaacaagctgaaacctgagatggacgagaagggcaacctgaccaccgccggctttgcctgctctcagtgtggccagcccctgttcgtgtacaagctggagcaggtgtctgagaagggcaaggcttacaccaactacttcggacggtgcaatgtggccgagcacgaaaagctgatcctgctggcccagctgaagcccgagaaggatagcgacgaagccgtgacatatagcctgggaaagtttgggcagagggccctggatttctacagcattcatgtgaccaaggagtccacccaccccgtgaagcccctggcccagatcgccggaaacagatacgcctccggacctgtgggaaaggccctgagcgacgcatgtatgggcacaatcgcctccttcctgtctaagtaccaggacatcatcatcgaacaccagaaggtggtgaagggcaaccagaagagactggagagcctgcgggagctggccggcaaggaaaacctggaataccctagcgtgaccctgccacctcagcctcacaccaaggagggcgttgatgcctacaacgaagtgatcgcccgggtgcgaatgtgggtgaacctgaacctgtggcagaagctgaagctaagcagagatgatgccaagcctctgctgagactgaagggattcccttcctttcctctggtcgagagacaggccaacgaagtggactggtgggacatggtgtgtaacgtgaagaagctgatcaacgagaaaaaggaggatggcaaggtgttttggcagaatctggctggctacaagagacaggaagccctgagaccatacctgagcagcgaggaagatcggaagaagggaaagaaattcgctcggtaccagctgggcgacctgctgctgcacctggaaaagaagcacggcgaggactggggaaaggtgtacgacgaggcctgggagcggattgacaagaaagtggaaggcctgagcaagcacatcaagctggaagaggaacggagaagcgaggacgcccagagcaaggccgccctgaccgactggctgcgggctaaggccagcttcgtgatcgagggcctgaaggaggccgacaaggacgagttctgcagatgcgagctgaagctgcagaagtggtacggggacctgcggggaaagcccttcgccatcgaagccgagaacagcatcctggacatcagcggcttcagcaagcagtacaactgtgccttcatctggcagaaggacggcgtgaagaagctgaacctgtacctgatcatcaactacttcaagggcggcaagctgcggttcaagaagatcaaacctgaagccttcgaagccaacagattctacaccgtgatcaacaaaaagagcggcgagatcgtgcccatggaggtgaacttcaacttcgacgaccccaacctgatcatcctgcctctggcctttggcaagagacagggcagagaattcatctggaacgacctgctgtccctggaaaccggcagcctgaagctggccaacggaagagtgatcgagaagacactgtacaacagaagaacccggcaggatgagcctgccctgttcgtggccctgaccttcgagcggcgggaggtcctggactcctccaatatcaaaccaatgaacctgatcggcgtggcaagaggcgaaaacatccccgccgtgatcgccctgaccgaccccgagggctgcccactgagccggtttaaggatagcctgggaaacccaacccacatcctgagaatcggcgagagctataaggagaagcagcggaccatccaggccaagaaggaggtggagcagcggagagccggcggctacagccggaagtacgccagcaaagccaagaatctggcagacgatatggtgagaaacaccgctagagatctgctgtactacgccgtgacccaggatgccatgctgatcttcgccaacctgagccggggcttcggccggcagggcaagcggaccttcatggccgagagacagtacacacggatggaggactggctgaccgccaagctggcctacgagggcctgagcaagacctacctgtccaagacactggcccagtacacctccaagacatgcagcaactgtgggtttaccatcaccagcgccgactacgacagggtgctggagaagctgaagaagacagcaacaggctggatgaccacaattaacggcaaggagctgaaggtggagggccagattacctactacaacagatacaagagacagaacgtagtcaaggacctgtccgtcgagctggatagactgagcgaagaatctgtgaacaacgacatctcctcctggacaaagggcagaagcggagaagctctgagcctcctgaagaaaagattctcccatagacccgtgcaggagaagttcgtgtgcctgaactgcggcttcgagacacacgcagccgagcaagccgccctgaacatcgccagatcctggctgttcctgcggagccaggagtacaagaaataccagacaaacaagacaaccggcaacaccgataagagagccttcgtcgagacctggcagtccttttaccggaagaagcttaaggaggtgtggaaacctgccgtgcggtctggcggatctggcggaggctccaccagccccaagaaaaagagaaaagtctaagctgccttctgcggggcttgccttctggccatgcccttcttctctcccttgcacctgtacctcttggtctttgaataaagcctgagtaggaaggctagcaaaaaaaaaaaaaaaaaaaaaaaaaaaaaaaaaaaaaaaaaaaaaaaaaaaaaaaaaaaaaaaaaaaaaaaaaaaaaaaa

SEQ ID NO: 13549 - RNA, 5785 nt, synthetic construct
  source 1..5785: mol_type = other RNA
aggaaataagagagaaaagaagagtaagaagaaatataagagccaccatggcccctaagaagaagcgtaaagtgagccggatggaacgcctcgtctacgaggtgcggcagaagtgcagaaacatcgaggacatctgcatctcctgcggatctctgaacgtgaccctggagcacccactgttcatcggcggcatgtgccagaactgtaaaaactgttttctggagtgtgcctatcaatacgacgatgacggctaccagagctactgcaccatctgttgcggcggaagagaggtgctgatgtgtggaaataacaactgctgccggtgcttctgcgtggaatgcgtggacctgctggtgggccccggcgccgcccaggccgctattaaggaagatccttggaactgctacatgtgcggccacaagggcacatacggcctgctgagacggagagaggactggcctagcagactgcagatgttcttcgccaataaccacgaccaggagttcgacccccctaaggtgtaccctcccgtccccgccgagaagagaaagcccatccgggtcctgagcctgttcgatggcatcgccaccggtctgctggtgctgaaggacctgggcatccaggtggataggtacattgcctccgaggtgtgcgaggactccatcaccgtgggaatggtgcgtcatcagggcaagatcatgtacgtgggcgacgtgcggagcgtgacacagaagcatatccaggagtggggccctttcgacctggtgatcggcggcagcccttgcaatgacctgagcatcgtgaacccagcccggaagggcctgtacgagggaaccggcagactgttcttcgagttttacagactgctgcacgacgcccggcctaaggaaggcgacgaccggcccttcttttggctgttcgagaatgtggtggccatgggagtcagcgacaagcgggatattagccggttcctggagagcaaccccgtgatgatcgatgccaaggaagtgagcgccgcccaccgggccagatacttctggggcaatctgcctggcatgaacagacccctggccagcaccgtgaacgacaagctggagctgcaggagtgcctggagcacggccggatcgccaagttcagcaaggtgagaaccatcaccacccgaagcaacagcatcaaacaaggcaaggaccagcactttcctgtgttcatgaacgagaaggaggacatcctgtggtgtaccgagatggagagagtgttcgggttcccagtccactacacagatgtcagcaacatgtctagactggccagacagagactgctgggaagaagctggtccgtccctgtgatcagacacctgttcgcccctctgaaggagtacttcgcctgcgtgagcagcggcaacagcaacgccaacagccggggccccagcttctctagcggcctggtgccactgtccctgagagggagccacatgggccccatggagatctacaaaaccgtgagcgcctggaagcggcagcctgtgcgcgtgctgagcctgtttcggaatatcgataaagtcctgaaaagcctgggattcctggagagcggctctggctccggcggtggcaccctgaagtacgtggaggatgtgacaaacgtggtcagacgggatgtggagaagtggggccccttcgatctggtgtacggcagcacccaacccctgggcagctcttgtgaccggtgccctggctggtacatgtttcagttccaccggatcctgcagtacgccctgccgagacaggagtcccagcggccattcttttggattttcatggacaacttgctgctgaccgaggatgaccaggaaactaccactcggttcctgcagaccgaagccgtgaccctgcaggacgtgagaggccgggactaccagaacgccatgcgggtgtggtccaacatccctggactgaaaagcaagcacgcacctctgacccctaaagaagaggagtacctgcaggcccaggtgcggagcagaagcaagctggacgcccctaaggtggatctgctggtgaagaattgcctcctgcccctgagagagtacttcaagtatttcagccagaatagtctgcccctgggaggcagcggcggcggccagatgcaggtgaccttcgaggaggtggccatcagcttcagccaggaggagtgggagtacctggacgaggagcagaaggagctgtacagggaggtgatgaaggagaactaccagaccctgatcagcctggccaccggcagccccaccgtgacccccaagatcatcgcccacatcgagaggggcgaggagccctacatcaggggcgagcccggcagcgaggagagggagaccggcaacagcagcggcggcccaagcagcggcgcccctcctcccagcggcggcagcccagccggctccccaacctctaccgaggagggcacctctgagtccgccacccccgagagcggccctggcacctccaccgagcccagcgagggcagcgcacccggcagccctgccggcagccccacctccacagaggagggaaccagcaccgagcccagcgaaggcagcgccccaggcaccagcaccgagcctagtgagcaggagattaaacggatcaacaagatcagaagaagacttgtgaaagacagcaacaccaagaaggccggcaagacaggccccatgaaaaccctgctggttagagtgatgacacccgatctgagagagcggctggaaaacctgagaaagaagcctgaaaatatcccccagcccatcagcaatacatctagagccaacctgaataagctgctgaccgattacaccgaaatgaagaaggcgatcctgcatgtgtactgggaagagttccagaaggaccctgtgggcctgatgagccgggtggcccagcctgccagcaagaagatcgatcagaacaagctgaaacctgagatggacgagaagggcaacctgaccaccgccggctttgcctgctctcagtgtggccagcccctgttcgtgtacaagctggagcaggtgtctgagaagggcaaggcttacaccaactacttcggacggtgcaatgtggccgagcacgaaaagctgatcctgctggcccagctgaagcccgagaaggatagcgacgaagccgtgacatatagcctgggaaagtttgggcagagggccctggatttctacagcattcatgtgaccaaggagtccacccaccccgtgaagcccctggcccagatcgccggaaacagatacgcctccggacctgtgggaaaggccctgagcgacgcatgtatgggcacaatcgcctccttcctgtctaagtaccaggacatcatcatcgaacaccagaaggtggtgaagggcaaccagaagagactggagagcctgcgggagctggccggcaaggaaaacctggaataccctagcgtgaccctgccacctcagcctcacaccaaggagggcgttgatgcctacaacgaagtgatcgcccgggtgcgaatgtgggtgaacctgaacctgtggcagaagctgaagctaagcagagatgatgccaagcctctgctgagactgaagggattcccttcctttcctctggtcgagagacaggccaacgaagtggactggtgggacatggtgtgtaacgtgaagaagctgatcaacgagaaaaaggaggatggcaaggtgttttggcagaatctggctggctacaagagacaggaagccctgagaccatacctgagcagcgaggaagatcggaagaagggaaagaaattcgctcggtaccagctgggcgacctgctgctgcacctggaaaagaagcacggcgaggactggggaaaggtgtacgacgaggcctgggagcggattgacaagaaagtggaaggcctgagcaagcacatcaagctggaagaggaacggagaagcgaggacgcccagagcaaggccgccctgaccgactggctgcgggctaaggccagcttcgtgatcgagggcctgaaggaggccgacaaggacgagttctgcagatgcgagctgaagctgcagaagtggtacggggacctgcggggaaagcccttcgccatcgaagccgagaacagcatcctggacatcagcggcttcagcaagcagtacaactgtgccttcatctggcagaaggacggcgtgaagaagctgaacctgtacctgatcatcaactacttcaagggcggcaagctgcggttcaagaagatcaaacctgaagccttcgaagccaacagattctacaccgtgatcaacaaaaagagcggcgagatcgtgcccatggaggtgaacttcaacttcgacgaccccaacctgatcatcctgcctctggcctttggcaagagacagggcagagaattcatctggaacgacctgctgtccctggaaaccggcagcctgaagctggccaacggaagagtgatcgagaagacactgtacaacagaagaacccggcaggatgagcctgccctgttcgtggccctgaccttcgagcggcgggaggtcctggactcctccaatatcaaaccaatgaacctgatcggcgtggcaagaggcgaaaacatccccgccgtgatcgccctgaccgaccccgagggctgcccactgagccggtttaaggatagcctgggaaacccaacccacatcctgagaatcggcgagagctataaggagaagcagcggaccatccaggccaagaaggaggtggagcagcggagagccggcggctacagccggaagtacgccagcaaagccaagaatctggcagacgatatggtgagaaacaccgctagagatctgctgtactacgccgtgacccaggatgccatgctgatcttcgccaacctgagccggggcttcggccggcagggcaagcggaccttcatggccgagagacagtacacacggatggaggactggctgaccgccaagctggcctacgagggcctgagcaagacctacctgtccaagacactggcccagtacacctccaagacatgcagcaactgtgggtttaccatcaccagcgccgactacgacagggtgctggagaagctgaagaagacagcaacaggctggatgaccacaattaacggcaaggagctgaaggtggagggccagattacctactacaacagatacaagagacagaacgtagtcaaggacctgtccgtcgagctggatagactgagcgaagaatctgtgaacaacgacatctcctcctggacaaagggcagaagcggagaagctctgagcctcctgaagaaaagattctcccatagacccgtgcaggagaagttcgtgtgcctgaactgcggcttcgagacacacgcagccgagcaagccgccctgaacatcgccagatcctggctgttcctgcggagccaggagtacaagaaataccagacaaacaagacaaccggcaacaccgataagagagccttcgtcgagacctggcagtccttttaccggaagaagcttaaggaggtgtggaaacctgccgtgcggtctggcggatctggcggaggctccaccagccccaagaaaaagagaaaagtctaagctgccttctgcggggcttgccttctggccatgcccttcttctctcccttgcacctgtacctcttggtctttgaataaagcctgagtaggaaggctagcaaaaaaaaaaaaaaaaaaaaaaaaaaaaaaaaaaaaaaaaaaaaaaaaaaaaaaaaaaaaaaaaaaaaaaaaaaaaaaaa

SEQ ID NO: 13550 - RNA, 5785 nt, synthetic construct
  source 1..5785: mol_type = other RNA
aggaaataagagagaaaagaagagtaagaagaaatataagagccaccatggcccctaagaagaagcgtaaagtgagccggatggaacgcctcgtctacgaggtgcggcagaagtgcagaaacatcgaggacatctgcatctcctgcggatctctgaacgtgaccctggagcacccactgttcatcggcggcatgtgccagaactgtaaaaactgttttctggagtgtgcctatcaatacgacgatgacggctaccagagctactgcaccatctgttgcggcggaagagaggtgctgatgtgtggaaataacaactgctgccggtgcttctgcgtggaatgcgtggacctgctggtgggccccggcgccgcccaggccgctattaaggaagatccttggaactgctacatgtgcggccacaagggcacatacggcctgctgagacggagagaggactggcctagcagactgcagatgttcttcgccaataaccacgaccaggagttcgacccccctaaggtgtaccctcccgtccccgccgagaagagaaagcccatccgggtcctgagcctgttcgatggcatcgccaccggtctgctggtgctgaaggacctgggcatccaggtggataggtacattgcctccgaggtgtgcgaggactccatcaccgtgggaatggtgcgtcatcagggcaagatcatgtacgtgggcgacgtgcggagcgtgacacagaagcatatccaggagtggggccctttcgacctggtgatcggcggcagcccttgcaatgacctgagcatcgtgaacccagcccggaagggcctgtacgagggaaccggcagactgttcttcgagttttacagactgctgcacgacgcccggcctaaggaaggcgacgaccggcccttcttttggctgttcgagaatgtggtggccatgggagtcagcgacaagcgggatattagccggttcctggagagcaaccccgtgatgatcgatgccaaggaagtgagcgccgcccaccgggccagatacttctggggcaatctgcctggcatgaacagacccctggccagcaccgtgaacgacaagctggagctgcaggagtgcctggagcacggccggatcgccaagttcagcaaggtgagaaccatcaccacccgaagcaacagcatcaaacaaggcaaggaccagcactttcctgtgttcatgaacgagaaggaggacatcctgtggtgtaccgagatggagagagtgttcgggttcccagtccactacacagatgtcagcaacatgtctagactggccagacagagactgctgggaagaagctggtccgtccctgtgatcagacacctgttcgcccctctgaaggagtacttcgcctgcgtgagcagcggcaacagcaacgccaacagccggggccccagcttctctagcggcctggtgccactgtccctgagagggagccacatgggccccatggagatctacaaaaccgtgagcgcctggaagcggcagcctgtgcgcgtgctgagcctgtttcggaatatcgataaagtcctgaaaagcctgggattcctggagagcggctctggctccggcggtggcaccctgaagtacgtggaggatgtgacaaacgtggtcagacgggatgtggagaagtggggccccttcgatctggtgtacggcagcacccaacccctgggcagctcttgtgaccggtgccctggctggtacatgtttcagttccaccggatcctgcagtacgccctgccgagacaggagtcccagcggccattcttttggattttcatggacaacttgctgctgaccgaggatgaccaggaaactaccactcggttcctgcagaccgaagccgtgaccctgcaggacgtgagaggccgggactaccagaacgccatgcgggtgtggtccaacatccctggactgaaaagcaagcacgcacctctgacccctaaagaagaggagtacctgcaggcccaggtgcggagcagaagcaagctggacgcccctaaggtggatctgctggtgaagaattgcctcctgcccctgagagagtacttcaagtatttcagccagaatagtctgcccctgggaggcagcggcggcggcgcccaggagagcgtgaccttcgaggacgtggccgtgaacttcaccaacagggagtggcagtgcctgacctacgcccagaggcacctgtacaaggacgtgatgctggagaactacggcaacatggtgagcctgggcttccccttccccaagccccccctgatcagccacctggagagggaggtggacccctgcgtgcaggacccccaggacagggagagcctgagctgcagctaccccgtgagcggcggcccaagcagcggcgcccctcctcccagcggcggcagcccagccggctccccaacctctaccgaggagggcacctctgagtccgccacccccgagagcggccctggcacctccaccgagcccagcgagggcagcgcacccggcagccctgccggcagccccacctccacagaggagggaaccagcaccgagcccagcgaaggcagcgccccaggcaccagcaccgagcctagtgagcaggagattaaacggatcaacaagatcagaagaagacttgtgaaagacagcaacaccaagaaggccggcaagacaggccccatgaaaaccctgctggttagagtgatgacacccgatctgagagagcggctggaaaacctgagaaagaagcctgaaaatatcccccagcccatcagcaatacatctagagccaacctgaataagctgctgaccgattacaccgaaatgaagaaggcgatcctgcatgtgtactgggaagagttccagaaggaccctgtgggcctgatgagccgggtggcccagcctgccagcaagaagatcgatcagaacaagctgaaacctgagatggacgagaagggcaacctgaccaccgccggctttgcctgctctcagtgtggccagcccctgttcgtgtacaagctggagcaggtgtctgagaagggcaaggcttacaccaactacttcggacggtgcaatgtggccgagcacgaaaagctgatcctgctggcccagctgaagcccgagaaggatagcgacgaagccgtgacatatagcctgggaaagtttgggcagagggccctggatttctacagcattcatgtgaccaaggagtccacccaccccgtgaagcccctggcccagatcgccggaaacagatacgcctccggacctgtgggaaaggccctgagcgacgcatgtatgggcacaatcgcctccttcctgtctaagtaccaggacatcatcatcgaacaccagaaggtggtgaagggcaaccagaagagactggagagcctgcgggagctggccggcaaggaaaacctggaataccctagcgtgaccctgccacctcagcctcacaccaaggagggcgttgatgcctacaacgaagtgatcgcccgggtgcgaatgtgggtgaacctgaacctgtggcagaagctgaagctaagcagagatgatgccaagcctctgctgagactgaagggattcccttcctttcctctggtcgagagacaggccaacgaagtggactggtgggacatggtgtgtaacgtgaagaagctgatcaacgagaaaaaggaggatggcaaggtgttttggcagaatctggctggctacaagagacaggaagccctgagaccatacctgagcagcgaggaagatcggaagaagggaaagaaattcgctcggtaccagctgggcgacctgctgctgcacctggaaaagaagcacggcgaggactggggaaaggtgtacgacgaggcctgggagcggattgacaagaaagtggaaggcctgagcaagcacatcaagctggaagaggaacggagaagcgaggacgcccagagcaaggccgccctgaccgactggctgcgggctaaggccagcttcgtgatcgagggcctgaaggaggccgacaaggacgagttctgcagatgcgagctgaagctgcagaagtggtacggggacctgcggggaaagcccttcgccatcgaagccgagaacagcatcctggacatcagcggcttcagcaagcagtacaactgtgccttcatctggcagaaggacggcgtgaagaagctgaacctgtacctgatcatcaactacttcaagggcggcaagctgcggttcaagaagatcaaacctgaagccttcgaagccaacagattctacaccgtgatcaacaaaaagagcggcgagatcgtgcccatggaggtgaacttcaacttcgacgaccccaacctgatcatcctgcctctggcctttggcaagagacagggcagagaattcatctggaacgacctgctgtccctggaaaccggcagcctgaagctggccaacggaagagtgatcgagaagacactgtacaacagaagaacccggcaggatgagcctgccctgttcgtggccctgaccttcgagcggcgggaggtcctggactcctccaatatcaaaccaatgaacctgatcggcgtggcaagaggcgaaaacatccccgccgtgatcgccctgaccgaccccgagggctgcccactgagccggtttaaggatagcctgggaaacccaacccacatcctgagaatcggcgagagctataaggagaagcagcggaccatccaggccaagaaggaggtggagcagcggagagccggcggctacagccggaagtacgccagcaaagccaagaatctggcagacgatatggtgagaaacaccgctagagatctgctgtactacgccgtgacccaggatgccatgctgatcttcgccaacctgagccggggcttcggccggcagggcaagcggaccttcatggccgagagacagtacacacggatggaggactggctgaccgccaagctggcctacgagggcctgagcaagacctacctgtccaagacactggcccagtacacctccaagacatgcagcaactgtgggtttaccatcaccagcgccgactacgacagggtgctggagaagctgaagaagacagcaacaggctggatgaccacaattaacggcaaggagctgaaggtggagggccagattacctactacaacagatacaagagacagaacgtagtcaaggacctgtccgtcgagctggatagactgagcgaagaatctgtgaacaacgacatctcctcctggacaaagggcagaagcggagaagctctgagcctcctgaagaaaagattctcccatagacccgtgcaggagaagttcgtgtgcctgaactgcggcttcgagacacacgcagccgagcaagccgccctgaacatcgccagatcctggctgttcctgcggagccaggagtacaagaaataccagacaaacaagacaaccggcaacaccgataagagagccttcgtcgagacctggcagtccttttaccggaagaagcttaaggaggtgtggaaacctgccgtgcggtctggcggatctggcggaggctccaccagccccaagaaaaagagaaaagtctaagctgccttctgcggggcttgccttctggccatgcccttcttctctcccttgcacctgtacctcttggtctttgaataaagcctgagtaggaaggctagcaaaaaaaaaaaaaaaaaaaaaaaaaaaaaaaaaaaaaaaaaaaaaaaaaaaaaaaaaaaaaaaaaaaaaaaaaaaaaaaa

SEQ ID NO: 13551 - RNA, 5785 nt, synthetic construct
  source 1..5785: mol_type = other RNA
aggaaataagagagaaaagaagagtaagaagaaatataagagccaccatggcccctaagaagaagcgtaaagtgagccggatggaacgcctcgtctacgaggtgcggcagaagtgcagaaacatcgaggacatctgcatctcctgcggatctctgaacgtgaccctggagcacccactgttcatcggcggcatgtgccagaactgtaaaaactgttttctggagtgtgcctatcaatacgacgatgacggctaccagagctactgcaccatctgttgcggcggaagagaggtgctgatgtgtggaaataacaactgctgccggtgcttctgcgtggaatgcgtggacctgctggtgggccccggcgccgcccaggccgctattaaggaagatccttggaactgctacatgtgcggccacaagggcacatacggcctgctgagacggagagaggactggcctagcagactgcagatgttcttcgccaataaccacgaccaggagttcgacccccctaaggtgtaccctcccgtccccgccgagaagagaaagcccatccgggtcctgagcctgttcgatggcatcgccaccggtctgctggtgctgaaggacctgggcatccaggtggataggtacattgcctccgaggtgtgcgaggactccatcaccgtgggaatggtgcgtcatcagggcaagatcatgtacgtgggcgacgtgcggagcgtgacacagaagcatatccaggagtggggccctttcgacctggtgatcggcggcagcccttgcaatgacctgagcatcgtgaacccagcccggaagggcctgtacgagggaaccggcagactgttcttcgagttttacagactgctgcacgacgcccggcctaaggaaggcgacgaccggcccttcttttggctgttcgagaatgtggtggccatgggagtcagcgacaagcgggatattagccggttcctggagagcaaccccgtgatgatcgatgccaaggaagtgagcgccgcccaccgggccagatacttctggggcaatctgcctggcatgaacagacccctggccagcaccgtgaacgacaagctggagctgcaggagtgcctggagcacggccggatcgccaagttcagcaaggtgagaaccatcaccacccgaagcaacagcatcaaacaaggcaaggaccagcactttcctgtgttcatgaacgagaaggaggacatcctgtggtgtaccgagatggagagagtgttcgggttcccagtccactacacagatgtcagcaacatgtctagactggccagacagagactgctgggaagaagctggtccgtccctgtgatcagacacctgttcgcccctctgaaggagtacttcgcctgcgtgagcagcggcaacagcaacgccaacagccggggccccagcttctctagcggcctggtgccactgtccctgagagggagccacatgggccccatggagatctacaaaaccgtgagcgcctggaagcggcagcctgtgcgcgtgctgagcctgtttcggaatatcgataaagtcctgaaaagcctgggattcctggagagcggctctggctccggcggtggcaccctgaagtacgtggaggatgtgacaaacgtggtcagacgggatgtggagaagtggggccccttcgatctggtgtacggcagcacccaacccctgggcagctcttgtgaccggtgccctggctggtacatgtttcagttccaccggatcctgcagtacgccctgccgagacaggagtcccagcggccattcttttggattttcatggacaacttgctgctgaccgaggatgaccaggaaactaccactcggttcctgcagaccgaagccgtgaccctgcaggacgtgagaggccgggactaccagaacgccatgcgggtgtggtccaacatccctggactgaaaagcaagcacgcacctctgacccctaaagaagaggagtacctgcaggcccaggtgcggagcagaagcaagctggacgcccctaaggtggatctgctggtgaagaattgcctcctgcccctgagagagtacttcaagtatttcagccagaatagtctgcccctgggaggcagcggcggcggcgcccagggcagcgtgatgttcaccgacgtgagcatcgacttcagccaggaggagtgggagttcctgaaccccgaccagagggacctgtacaaggacgtgatgctggagaactacagcaacctggtgagcatgggcctgtacatccccaagccccaggtgatcagcctgctggagcagggcaaggagccctggatgatcggcagggagctgaccaggggcctgtgcagcgccctggagagcatgggcggcccaagcagcggcgcccctcctcccagcggcggcagcccagccggctccccaacctctaccgaggagggcacctctgagtccgccacccccgagagcggccctggcacctccaccgagcccagcgagggcagcgcacccggcagccctgccggcagccccacctccacagaggagggaaccagcaccgagcccagcgaaggcagcgccccaggcaccagcaccgagcctagtgagcaggagattaaacggatcaacaagatcagaagaagacttgtgaaagacagcaacaccaagaaggccggcaagacaggccccatgaaaaccctgctggttagagtgatgacacccgatctgagagagcggctggaaaacctgagaaagaagcctgaaaatatcccccagcccatcagcaatacatctagagccaacctgaataagctgctgaccgattacaccgaaatgaagaaggcgatcctgcatgtgtactgggaagagttccagaaggaccctgtgggcctgatgagccgggtggcccagcctgccagcaagaagatcgatcagaacaagctgaaacctgagatggacgagaagggcaacctgaccaccgccggctttgcctgctctcagtgtggccagcccctgttcgtgtacaagctggagcaggtgtctgagaagggcaaggcttacaccaactacttcggacggtgcaatgtggccgagcacgaaaagctgatcctgctggcccagctgaagcccgagaaggatagcgacgaagccgtgacatatagcctgggaaagtttgggcagagggccctggatttctacagcattcatgtgaccaaggagtccacccaccccgtgaagcccctggcccagatcgccggaaacagatacgcctccggacctgtgggaaaggccctgagcgacgcatgtatgggcacaatcgcctccttcctgtctaagtaccaggacatcatcatcgaacaccagaaggtggtgaagggcaaccagaagagactggagagcctgcgggagctggccggcaaggaaaacctggaataccctagcgtgaccctgccacctcagcctcacaccaaggagggcgttgatgcctacaacgaagtgatcgcccgggtgcgaatgtgggtgaacctgaacctgtggcagaagctgaagctaagcagagatgatgccaagcctctgctgagactgaagggattcccttcctttcctctggtcgagagacaggccaacgaagtggactggtgggacatggtgtgtaacgtgaagaagctgatcaacgagaaaaaggaggatggcaaggtgttttggcagaatctggctggctacaagagacaggaagccctgagaccatacctgagcagcgaggaagatcggaagaagggaaagaaattcgctcggtaccagctgggcgacctgctgctgcacctggaaaagaagcacggcgaggactggggaaaggtgtacgacgaggcctgggagcggattgacaagaaagtggaaggcctgagcaagcacatcaagctggaagaggaacggagaagcgaggacgcccagagcaaggccgccctgaccgactggctgcgggctaaggccagcttcgtgatcgagggcctgaaggaggccgacaaggacgagttctgcagatgcgagctgaagctgcagaagtggtacggggacctgcggggaaagcccttcgccatcgaagccgagaacagcatcctggacatcagcggcttcagcaagcagtacaactgtgccttcatctggcagaaggacggcgtgaagaagctgaacctgtacctgatcatcaactacttcaagggcggcaagctgcggttcaagaagatcaaacctgaagccttcgaagccaacagattctacaccgtgatcaacaaaaagagcggcgagatcgtgcccatggaggtgaacttcaacttcgacgaccccaacctgatcatcctgcctctggcctttggcaagagacagggcagagaattcatctggaacgacctgctgtccctggaaaccggcagcctgaagctggccaacggaagagtgatcgagaagacactgtacaacagaagaacccggcaggatgagcctgccctgttcgtggccctgaccttcgagcggcgggaggtcctggactcctccaatatcaaaccaatgaacctgatcggcgtggcaagaggcgaaaacatccccgccgtgatcgccctgaccgaccccgagggctgcccactgagccggtttaaggatagcctgggaaacccaacccacatcctgagaatcggcgagagctataaggagaagcagcggaccatccaggccaagaaggaggtggagcagcggagagccggcggctacagccggaagtacgccagcaaagccaagaatctggcagacgatatggtgagaaacaccgctagagatctgctgtactacgccgtgacccaggatgccatgctgatcttcgccaacctgagccggggcttcggccggcagggcaagcggaccttcatggccgagagacagtacacacggatggaggactggctgaccgccaagctggcctacgagggcctgagcaagacctacctgtccaagacactggcccagtacacctccaagacatgcagcaactgtgggtttaccatcaccagcgccgactacgacagggtgctggagaagctgaagaagacagcaacaggctggatgaccacaattaacggcaaggagctgaaggtggagggccagattacctactacaacagatacaagagacagaacgtagtcaaggacctgtccgtcgagctggatagactgagcgaagaatctgtgaacaacgacatctcctcctggacaaagggcagaagcggagaagctctgagcctcctgaagaaaagattctcccatagacccgtgcaggagaagttcgtgtgcctgaactgcggcttcgagacacacgcagccgagcaagccgccctgaacatcgccagatcctggctgttcctgcggagccaggagtacaagaaataccagacaaacaagacaaccggcaacaccgataagagagccttcgtcgagacctggcagtccttttaccggaagaagcttaaggaggtgtggaaacctgccgtgcggtctggcggatctggcggaggctccaccagccccaagaaaaagagaaaagtctaagctgccttctgcggggcttgccttctggccatgcccttcttctctcccttgcacctgtacctcttggtctttgaataaagcctgagtaggaaggctagcaaaaaaaaaaaaaaaaaaaaaaaaaaaaaaaaaaaaaaaaaaaaaaaaaaaaaaaaaaaaaaaaaaaaaaaaaaaaaaaa

SEQ ID NO: 13552 - RNA, 5785 nt, synthetic construct
  source 1..5785: mol_type = other RNA
aggaaataagagagaaaagaagagtaagaagaaatataagagccaccatggcccctaagaagaagcgtaaagtgagccggatggaacgcctcgtctacgaggtgcggcagaagtgcagaaacatcgaggacatctgcatctcctgcggatctctgaacgtgaccctggagcacccactgttcatcggcggcatgtgccagaactgtaaaaactgttttctggagtgtgcctatcaatacgacgatgacggctaccagagctactgcaccatctgttgcggcggaagagaggtgctgatgtgtggaaataacaactgctgccggtgcttctgcgtggaatgcgtggacctgctggtgggccccggcgccgcccaggccgctattaaggaagatccttggaactgctacatgtgcggccacaagggcacatacggcctgctgagacggagagaggactggcctagcagactgcagatgttcttcgccaataaccacgaccaggagttcgacccccctaaggtgtaccctcccgtccccgccgagaagagaaagcccatccgggtcctgagcctgttcgatggcatcgccaccggtctgctggtgctgaaggacctgggcatccaggtggataggtacattgcctccgaggtgtgcgaggactccatcaccgtgggaatggtgcgtcatcagggcaagatcatgtacgtgggcgacgtgcggagcgtgacacagaagcatatccaggagtggggccctttcgacctggtgatcggcggcagcccttgcaatgacctgagcatcgtgaacccagcccggaagggcctgtacgagggaaccggcagactgttcttcgagttttacagactgctgcacgacgcccggcctaaggaaggcgacgaccggcccttcttttggctgttcgagaatgtggtggccatgggagtcagcgacaagcgggatattagccggttcctggagagcaaccccgtgatgatcgatgccaaggaagtgagcgccgcccaccgggccagatacttctggggcaatctgcctggcatgaacagacccctggccagcaccgtgaacgacaagctggagctgcaggagtgcctggagcacggccggatcgccaagttcagcaaggtgagaaccatcaccacccgaagcaacagcatcaaacaaggcaaggaccagcactttcctgtgttcatgaacgagaaggaggacatcctgtggtgtaccgagatggagagagtgttcgggttcccagtccactacacagatgtcagcaacatgtctagactggccagacagagactgctgggaagaagctggtccgtccctgtgatcagacacctgttcgcccctctgaaggagtacttcgcctgcgtgagcagcggcaacagcaacgccaacagccggggccccagcttctctagcggcctggtgccactgtccctgagagggagccacatgggccccatggagatctacaaaaccgtgagcgcctggaagcggcagcctgtgcgcgtgctgagcctgtttcggaatatcgataaagtcctgaaaagcctgggattcctggagagcggctctggctccggcggtggcaccctgaagtacgtggaggatgtgacaaacgtggtcagacgggatgtggagaagtggggccccttcgatctggtgtacggcagcacccaacccctgggcagctcttgtgaccggtgccctggctggtacatgtttcagttccaccggatcctgcagtacgccctgccgagacaggagtcccagcggccattcttttggattttcatggacaacttgctgctgaccgaggatgaccaggaaactaccactcggttcctgcagaccgaagccgtgaccctgcaggacgtgagaggccgggactaccagaacgccatgcgggtgtggtccaacatccctggactgaaaagcaagcacgcacctctgacccctaaagaagaggagtacctgcaggcccaggtgcggagcagaagcaagctggacgcccctaaggtggatctgctggtgaagaattgcctcctgcccctgagagagtacttcaagtatttcagccagaatagtctgcccctgggaggcagcggcggcggcccccaggacctgatgaccttcgacgacgtggccgtggagttcacccagtgggagtggggccagctgaaccccgcccagaaggacctgtacagggaggtgatgctggagaacttcaggaacctgaccctgctgggcctgctggtgagcaagccctacatgatctgccagctggaggagggcggcgagcccttcatggtgaacaccgagatcagcgtgggcgcccacagcgactgggagaggaggggcggcccaagcagcggcgcccctcctcccagcggcggcagcccagccggctccccaacctctaccgaggagggcacctctgagtccgccacccccgagagcggccctggcacctccaccgagcccagcgagggcagcgcacccggcagccctgccggcagccccacctccacagaggagggaaccagcaccgagcccagcgaaggcagcgccccaggcaccagcaccgagcctagtgagcaggagattaaacggatcaacaagatcagaagaagacttgtgaaagacagcaacaccaagaaggccggcaagacaggccccatgaaaaccctgctggttagagtgatgacacccgatctgagagagcggctggaaaacctgagaaagaagcctgaaaatatcccccagcccatcagcaatacatctagagccaacctgaataagctgctgaccgattacaccgaaatgaagaaggcgatcctgcatgtgtactgggaagagttccagaaggaccctgtgggcctgatgagccgggtggcccagcctgccagcaagaagatcgatcagaacaagctgaaacctgagatggacgagaagggcaacctgaccaccgccggctttgcctgctctcagtgtggccagcccctgttcgtgtacaagctggagcaggtgtctgagaagggcaaggcttacaccaactacttcggacggtgcaatgtggccgagcacgaaaagctgatcctgctggcccagctgaagcccgagaaggatagcgacgaagccgtgacatatagcctgggaaagtttgggcagagggccctggatttctacagcattcatgtgaccaaggagtccacccaccccgtgaagcccctggcccagatcgccggaaacagatacgcctccggacctgtgggaaaggccctgagcgacgcatgtatgggcacaatcgcctccttcctgtctaagtaccaggacatcatcatcgaacaccagaaggtggtgaagggcaaccagaagagactggagagcctgcgggagctggccggcaaggaaaacctggaataccctagcgtgaccctgccacctcagcctcacaccaaggagggcgttgatgcctacaacgaagtgatcgcccgggtgcgaatgtgggtgaacctgaacctgtggcagaagctgaagctaagcagagatgatgccaagcctctgctgagactgaagggattcccttcctttcctctggtcgagagacaggccaacgaagtggactggtgggacatggtgtgtaacgtgaagaagctgatcaacgagaaaaaggaggatggcaaggtgttttggcagaatctggctggctacaagagacaggaagccctgagaccatacctgagcagcgaggaagatcggaagaagggaaagaaattcgctcggtaccagctgggcgacctgctgctgcacctggaaaagaagcacggcgaggactggggaaaggtgtacgacgaggcctgggagcggattgacaagaaagtggaaggcctgagcaagcacatcaagctggaagaggaacggagaagcgaggacgcccagagcaaggccgccctgaccgactggctgcgggctaaggccagcttcgtgatcgagggcctgaaggaggccgacaaggacgagttctgcagatgcgagctgaagctgcagaagtggtacggggacctgcggggaaagcccttcgccatcgaagccgagaacagcatcctggacatcagcggcttcagcaagcagtacaactgtgccttcatctggcagaaggacggcgtgaagaagctgaacctgtacctgatcatcaactacttcaagggcggcaagctgcggttcaagaagatcaaacctgaagccttcgaagccaacagattctacaccgtgatcaacaaaaagagcggcgagatcgtgcccatggaggtgaacttcaacttcgacgaccccaacctgatcatcctgcctctggcctttggcaagagacagggcagagaattcatctggaacgacctgctgtccctggaaaccggcagcctgaagctggccaacggaagagtgatcgagaagacactgtacaacagaagaacccggcaggatgagcctgccctgttcgtggccctgaccttcgagcggcgggaggtcctggactcctccaatatcaaaccaatgaacctgatcggcgtggcaagaggcgaaaacatccccgccgtgatcgccctgaccgaccccgagggctgcccactgagccggtttaaggatagcctgggaaacccaacccacatcctgagaatcggcgagagctataaggagaagcagcggaccatccaggccaagaaggaggtggagcagcggagagccggcggctacagccggaagtacgccagcaaagccaagaatctggcagacgatatggtgagaaacaccgctagagatctgctgtactacgccgtgacccaggatgccatgctgatcttcgccaacctgagccggggcttcggccggcagggcaagcggaccttcatggccgagagacagtacacacggatggaggactggctgaccgccaagctggcctacgagggcctgagcaagacctacctgtccaagacactggcccagtacacctccaagacatgcagcaactgtgggtttaccatcaccagcgccgactacgacagggtgctggagaagctgaagaagacagcaacaggctggatgaccacaattaacggcaaggagctgaaggtggagggccagattacctactacaacagatacaagagacagaacgtagtcaaggacctgtccgtcgagctggatagactgagcgaagaatctgtgaacaacgacatctcctcctggacaaagggcagaagcggagaagctctgagcctcctgaagaaaagattctcccatagacccgtgcaggagaagttcgtgtgcctgaactgcggcttcgagacacacgcagccgagcaagccgccctgaacatcgccagatcctggctgttcctgcggagccaggagtacaagaaataccagacaaacaagacaaccggcaacaccgataagagagccttcgtcgagacctggcagtccttttaccggaagaagcttaaggaggtgtggaaacctgccgtgcggtctggcggatctggcggaggctccaccagccccaagaaaaagagaaaagtctaagctgccttctgcggggcttgccttctggccatgcccttcttctctcccttgcacctgtacctcttggtctttgaataaagcctgagtaggaaggctagcaaaaaaaaaaaaaaaaaaaaaaaaaaaaaaaaaaaaaaaaaaaaaaaaaaaaaaaaaaaaaaaaaaaaaaaaaaaaaaaa

SEQ ID NO: 13553 - RNA, 5785 nt, synthetic construct
  source 1..5785: mol_type = other RNA
aggaaataagagagaaaagaagagtaagaagaaatataagagccaccatggcccctaagaagaagcgtaaagtgagccggatggaacgcctcgtctacgaggtgcggcagaagtgcagaaacatcgaggacatctgcatctcctgcggatctctgaacgtgaccctggagcacccactgttcatcggcggcatgtgccagaactgtaaaaactgttttctggagtgtgcctatcaatacgacgatgacggctaccagagctactgcaccatctgttgcggcggaagagaggtgctgatgtgtggaaataacaactgctgccggtgcttctgcgtggaatgcgtggacctgctggtgggccccggcgccgcccaggccgctattaaggaagatccttggaactgctacatgtgcggccacaagggcacatacggcctgctgagacggagagaggactggcctagcagactgcagatgttcttcgccaataaccacgaccaggagttcgacccccctaaggtgtaccctcccgtccccgccgagaagagaaagcccatccgggtcctgagcctgttcgatggcatcgccaccggtctgctggtgctgaaggacctgggcatccaggtggataggtacattgcctccgaggtgtgcgaggactccatcaccgtgggaatggtgcgtcatcagggcaagatcatgtacgtgggcgacgtgcggagcgtgacacagaagcatatccaggagtggggccctttcgacctggtgatcggcggcagcccttgcaatgacctgagcatcgtgaacccagcccggaagggcctgtacgagggaaccggcagactgttcttcgagttttacagactgctgcacgacgcccggcctaaggaaggcgacgaccggcccttcttttggctgttcgagaatgtggtggccatgggagtcagcgacaagcgggatattagccggttcctggagagcaaccccgtgatgatcgatgccaaggaagtgagcgccgcccaccgggccagatacttctggggcaatctgcctggcatgaacagacccctggccagcaccgtgaacgacaagctggagctgcaggagtgcctggagcacggccggatcgccaagttcagcaaggtgagaaccatcaccacccgaagcaacagcatcaaacaaggcaaggaccagcactttcctgtgttcatgaacgagaaggaggacatcctgtggtgtaccgagatggagagagtgttcgggttcccagtccactacacagatgtcagcaacatgtctagactggccagacagagactgctgggaagaagctggtccgtccctgtgatcagacacctgttcgcccctctgaaggagtacttcgcctgcgtgagcagcggcaacagcaacgccaacagccggggccccagcttctctagcggcctggtgccactgtccctgagagggagccacatgggccccatggagatctacaaaaccgtgagcgcctggaagcggcagcctgtgcgcgtgctgagcctgtttcggaatatcgataaagtcctgaaaagcctgggattcctggagagcggctctggctccggcggtggcaccctgaagtacgtggaggatgtgacaaacgtggtcagacgggatgtggagaagtggggccccttcgatctggtgtacggcagcacccaacccctgggcagctcttgtgaccggtgccctggctggtacatgtttcagttccaccggatcctgcagtacgccctgccgagacaggagtcccagcggccattcttttggattttcatggacaacttgctgctgaccgaggatgaccaggaaactaccactcggttcctgcagaccgaagccgtgaccctgcaggacgtgagaggccgggactaccagaacgccatgcgggtgtggtccaacatccctggactgaaaagcaagcacgcacctctgacccctaaagaagaggagtacctgcaggcccaggtgcggagcagaagcaagctggacgcccctaaggtggatctgctggtgaagaattgcctcctgcccctgagagagtacttcaagtatttcagccagaatagtctgcccctgggaggcagcggcggcggcaggagggagagcgtgaccttcgaggacgtggccgtgtacttcagcgagaacgagtggatcggcctgggccccgcccagagggccctgtacagggacgtgatgctggagaactacggcgccgtggccagcctggccttccccttccccaagcccgccctgatcagccagctggagaggggcgagaccccctggtgcagcgtgccccagggcgccctggacggcgaggcccccaggggcatcagcggcggcccaagcagcggcgcccctcctcccagcggcggcagcccagccggctccccaacctctaccgaggagggcacctctgagtccgccacccccgagagcggccctggcacctccaccgagcccagcgagggcagcgcacccggcagccctgccggcagccccacctccacagaggagggaaccagcaccgagcccagcgaaggcagcgccccaggcaccagcaccgagcctagtgagcaggagattaaacggatcaacaagatcagaagaagacttgtgaaagacagcaacaccaagaaggccggcaagacaggccccatgaaaaccctgctggttagagtgatgacacccgatctgagagagcggctggaaaacctgagaaagaagcctgaaaatatcccccagcccatcagcaatacatctagagccaacctgaataagctgctgaccgattacaccgaaatgaagaaggcgatcctgcatgtgtactgggaagagttccagaaggaccctgtgggcctgatgagccgggtggcccagcctgccagcaagaagatcgatcagaacaagctgaaacctgagatggacgagaagggcaacctgaccaccgccggctttgcctgctctcagtgtggccagcccctgttcgtgtacaagctggagcaggtgtctgagaagggcaaggcttacaccaactacttcggacggtgcaatgtggccgagcacgaaaagctgatcctgctggcccagctgaagcccgagaaggatagcgacgaagccgtgacatatagcctgggaaagtttgggcagagggccctggatttctacagcattcatgtgaccaaggagtccacccaccccgtgaagcccctggcccagatcgccggaaacagatacgcctccggacctgtgggaaaggccctgagcgacgcatgtatgggcacaatcgcctccttcctgtctaagtaccaggacatcatcatcgaacaccagaaggtggtgaagggcaaccagaagagactggagagcctgcgggagctggccggcaaggaaaacctggaataccctagcgtgaccctgccacctcagcctcacaccaaggagggcgttgatgcctacaacgaagtgatcgcccgggtgcgaatgtgggtgaacctgaacctgtggcagaagctgaagctaagcagagatgatgccaagcctctgctgagactgaagggattcccttcctttcctctggtcgagagacaggccaacgaagtggactggtgggacatggtgtgtaacgtgaagaagctgatcaacgagaaaaaggaggatggcaaggtgttttggcagaatctggctggctacaagagacaggaagccctgagaccatacctgagcagcgaggaagatcggaagaagggaaagaaattcgctcggtaccagctgggcgacctgctgctgcacctggaaaagaagcacggcgaggactggggaaaggtgtacgacgaggcctgggagcggattgacaagaaagtggaaggcctgagcaagcacatcaagctggaagaggaacggagaagcgaggacgcccagagcaaggccgccctgaccgactggctgcgggctaaggccagcttcgtgatcgagggcctgaaggaggccgacaaggacgagttctgcagatgcgagctgaagctgcagaagtggtacggggacctgcggggaaagcccttcgccatcgaagccgagaacagcatcctggacatcagcggcttcagcaagcagtacaactgtgccttcatctggcagaaggacggcgtgaagaagctgaacctgtacctgatcatcaactacttcaagggcggcaagctgcggttcaagaagatcaaacctgaagccttcgaagccaacagattctacaccgtgatcaacaaaaagagcggcgagatcgtgcccatggaggtgaacttcaacttcgacgaccccaacctgatcatcctgcctctggcctttggcaagagacagggcagagaattcatctggaacgacctgctgtccctggaaaccggcagcctgaagctggccaacggaagagtgatcgagaagacactgtacaacagaagaacccggcaggatgagcctgccctgttcgtggccctgaccttcgagcggcgggaggtcctggactcctccaatatcaaaccaatgaacctgatcggcgtggcaagaggcgaaaacatccccgccgtgatcgccctgaccgaccccgagggctgcccactgagccggtttaaggatagcctgggaaacccaacccacatcctgagaatcggcgagagctataaggagaagcagcggaccatccaggccaagaaggaggtggagcagcggagagccggcggctacagccggaagtacgccagcaaagccaagaatctggcagacgatatggtgagaaacaccgctagagatctgctgtactacgccgtgacccaggatgccatgctgatcttcgccaacctgagccggggcttcggccggcagggcaagcggaccttcatggccgagagacagtacacacggatggaggactggctgaccgccaagctggcctacgagggcctgagcaagacctacctgtccaagacactggcccagtacacctccaagacatgcagcaactgtgggtttaccatcaccagcgccgactacgacagggtgctggagaagctgaagaagacagcaacaggctggatgaccacaattaacggcaaggagctgaaggtggagggccagattacctactacaacagatacaagagacagaacgtagtcaaggacctgtccgtcgagctggatagactgagcgaagaatctgtgaacaacgacatctcctcctggacaaagggcagaagcggagaagctctgagcctcctgaagaaaagattctcccatagacccgtgcaggagaagttcgtgtgcctgaactgcggcttcgagacacacgcagccgagcaagccgccctgaacatcgccagatcctggctgttcctgcggagccaggagtacaagaaataccagacaaacaagacaaccggcaacaccgataagagagccttcgtcgagacctggcagtccttttaccggaagaagcttaaggaggtgtggaaacctgccgtgcggtctggcggatctggcggaggctccaccagccccaagaaaaagagaaaagtctaagctgccttctgcggggcttgccttctggccatgcccttcttctctcccttgcacctgtacctcttggtctttgaataaagcctgagtaggaaggctagcaaaaaaaaaaaaaaaaaaaaaaaaaaaaaaaaaaaaaaaaaaaaaaaaaaaaaaaaaaaaaaaaaaaaaaaaaaaaaaaa

SEQ ID NO: 13554 - RNA, 5785 nt, synthetic construct
  source 1..5785: mol_type = other RNA
aggaaataagagagaaaagaagagtaagaagaaatataagagccaccatggcccctaagaagaagcgtaaagtgagccggatggaacgcctcgtctacgaggtgcggcagaagtgcagaaacatcgaggacatctgcatctcctgcggatctctgaacgtgaccctggagcacccactgttcatcggcggcatgtgccagaactgtaaaaactgttttctggagtgtgcctatcaatacgacgatgacggctaccagagctactgcaccatctgttgcggcggaagagaggtgctgatgtgtggaaataacaactgctgccggtgcttctgcgtggaatgcgtggacctgctggtgggccccggcgccgcccaggccgctattaaggaagatccttggaactgctacatgtgcggccacaagggcacatacggcctgctgagacggagagaggactggcctagcagactgcagatgttcttcgccaataaccacgaccaggagttcgacccccctaaggtgtaccctcccgtccccgccgagaagagaaagcccatccgggtcctgagcctgttcgatggcatcgccaccggtctgctggtgctgaaggacctgggcatccaggtggataggtacattgcctccgaggtgtgcgaggactccatcaccgtgggaatggtgcgtcatcagggcaagatcatgtacgtgggcgacgtgcggagcgtgacacagaagcatatccaggagtggggccctttcgacctggtgatcggcggcagcccttgcaatgacctgagcatcgtgaacccagcccggaagggcctgtacgagggaaccggcagactgttcttcgagttttacagactgctgcacgacgcccggcctaaggaaggcgacgaccggcccttcttttggctgttcgagaatgtggtggccatgggagtcagcgacaagcgggatattagccggttcctggagagcaaccccgtgatgatcgatgccaaggaagtgagcgccgcccaccgggccagatacttctggggcaatctgcctggcatgaacagacccctggccagcaccgtgaacgacaagctggagctgcaggagtgcctggagcacggccggatcgccaagttcagcaaggtgagaaccatcaccacccgaagcaacagcatcaaacaaggcaaggaccagcactttcctgtgttcatgaacgagaaggaggacatcctgtggtgtaccgagatggagagagtgttcgggttcccagtccactacacagatgtcagcaacatgtctagactggccagacagagactgctgggaagaagctggtccgtccctgtgatcagacacctgttcgcccctctgaaggagtacttcgcctgcgtgagcagcggcaacagcaacgccaacagccggggccccagcttctctagcggcctggtgccactgtccctgagagggagccacatgggccccatggagatctacaaaaccgtgagcgcctggaagcggcagcctgtgcgcgtgctgagcctgtttcggaatatcgataaagtcctgaaaagcctgggattcctggagagcggctctggctccggcggtggcaccctgaagtacgtggaggatgtgacaaacgtggtcagacgggatgtggagaagtggggccccttcgatctggtgtacggcagcacccaacccctgggcagctcttgtgaccggtgccctggctggtacatgtttcagttccaccggatcctgcagtacgccctgccgagacaggagtcccagcggccattcttttggattttcatggacaacttgctgctgaccgaggatgaccaggaaactaccactcggttcctgcagaccgaagccgtgaccctgcaggacgtgagaggccgggactaccagaacgccatgcgggtgtggtccaacatccctggactgaaaagcaagcacgcacctctgacccctaaagaagaggagtacctgcaggcccaggtgcggagcagaagcaagctggacgcccctaaggtggatctgctggtgaagaattgcctcctgcccctgagagagtacttcaagtatttcagccagaatagtctgcccctgggaggcagcggcggcggccaggccgaggtgaccttcgaggacgtggccgtgtacctgagcagggaggagtggggcaggctgggccccgcccagaggggcctgtacagggacgtgatgctggagacctacggcaacctggtgagcctgggcgtgggccccgccggccccaagcccggcgtgatcagccagctggagaggggcgacgagccctgggtgctggacgtgcagggcaccagcggcaaggagcacctgagggtgaacggcggcccaagcagcggcgcccctcctcccagcggcggcagcccagccggctccccaacctctaccgaggagggcacctctgagtccgccacccccgagagcggccctggcacctccaccgagcccagcgagggcagcgcacccggcagccctgccggcagccccacctccacagaggagggaaccagcaccgagcccagcgaaggcagcgccccaggcaccagcaccgagcctagtgagcaggagattaaacggatcaacaagatcagaagaagacttgtgaaagacagcaacaccaagaaggccggcaagacaggccccatgaaaaccctgctggttagagtgatgacacccgatctgagagagcggctggaaaacctgagaaagaagcctgaaaatatcccccagcccatcagcaatacatctagagccaacctgaataagctgctgaccgattacaccgaaatgaagaaggcgatcctgcatgtgtactgggaagagttccagaaggaccctgtgggcctgatgagccgggtggcccagcctgccagcaagaagatcgatcagaacaagctgaaacctgagatggacgagaagggcaacctgaccaccgccggctttgcctgctctcagtgtggccagcccctgttcgtgtacaagctggagcaggtgtctgagaagggcaaggcttacaccaactacttcggacggtgcaatgtggccgagcacgaaaagctgatcctgctggcccagctgaagcccgagaaggatagcgacgaagccgtgacatatagcctgggaaagtttgggcagagggccctggatttctacagcattcatgtgaccaaggagtccacccaccccgtgaagcccctggcccagatcgccggaaacagatacgcctccggacctgtgggaaaggccctgagcgacgcatgtatgggcacaatcgcctccttcctgtctaagtaccaggacatcatcatcgaacaccagaaggtggtgaagggcaaccagaagagactggagagcctgcgggagctggccggcaaggaaaacctggaataccctagcgtgaccctgccacctcagcctcacaccaaggagggcgttgatgcctacaacgaagtgatcgcccgggtgcgaatgtgggtgaacctgaacctgtggcagaagctgaagctaagcagagatgatgccaagcctctgctgagactgaagggattcccttcctttcctctggtcgagagacaggccaacgaagtggactggtgggacatggtgtgtaacgtgaagaagctgatcaacgagaaaaaggaggatggcaaggtgttttggcagaatctggctggctacaagagacaggaagccctgagaccatacctgagcagcgaggaagatcggaagaagggaaagaaattcgctcggtaccagctgggcgacctgctgctgcacctggaaaagaagcacggcgaggactggggaaaggtgtacgacgaggcctgggagcggattgacaagaaagtggaaggcctgagcaagcacatcaagctggaagaggaacggagaagcgaggacgcccagagcaaggccgccctgaccgactggctgcgggctaaggccagcttcgtgatcgagggcctgaaggaggccgacaaggacgagttctgcagatgcgagctgaagctgcagaagtggtacggggacctgcggggaaagcccttcgccatcgaagccgagaacagcatcctggacatcagcggcttcagcaagcagtacaactgtgccttcatctggcagaaggacggcgtgaagaagctgaacctgtacctgatcatcaactacttcaagggcggcaagctgcggttcaagaagatcaaacctgaagccttcgaagccaacagattctacaccgtgatcaacaaaaagagcggcgagatcgtgcccatggaggtgaacttcaacttcgacgaccccaacctgatcatcctgcctctggcctttggcaagagacagggcagagaattcatctggaacgacctgctgtccctggaaaccggcagcctgaagctggccaacggaagagtgatcgagaagacactgtacaacagaagaacccggcaggatgagcctgccctgttcgtggccctgaccttcgagcggcgggaggtcctggactcctccaatatcaaaccaatgaacctgatcggcgtggcaagaggcgaaaacatccccgccgtgatcgccctgaccgaccccgagggctgcccactgagccggtttaaggatagcctgggaaacccaacccacatcctgagaatcggcgagagctataaggagaagcagcggaccatccaggccaagaaggaggtggagcagcggagagccggcggctacagccggaagtacgccagcaaagccaagaatctggcagacgatatggtgagaaacaccgctagagatctgctgtactacgccgtgacccaggatgccatgctgatcttcgccaacctgagccggggcttcggccggcagggcaagcggaccttcatggccgagagacagtacacacggatggaggactggctgaccgccaagctggcctacgagggcctgagcaagacctacctgtccaagacactggcccagtacacctccaagacatgcagcaactgtgggtttaccatcaccagcgccgactacgacagggtgctggagaagctgaagaagacagcaacaggctggatgaccacaattaacggcaaggagctgaaggtggagggccagattacctactacaacagatacaagagacagaacgtagtcaaggacctgtccgtcgagctggatagactgagcgaagaatctgtgaacaacgacatctcctcctggacaaagggcagaagcggagaagctctgagcctcctgaagaaaagattctcccatagacccgtgcaggagaagttcgtgtgcctgaactgcggcttcgagacacacgcagccgagcaagccgccctgaacatcgccagatcctggctgttcctgcggagccaggagtacaagaaataccagacaaacaagacaaccggcaacaccgataagagagccttcgtcgagacctggcagtccttttaccggaagaagcttaaggaggtgtggaaacctgccgtgcggtctggcggatctggcggaggctccaccagccccaagaaaaagagaaaagtctaagctgccttctgcggggcttgccttctggccatgcccttcttctctcccttgcacctgtacctcttggtctttgaataaagcctgagtaggaaggctagcaaaaaaaaaaaaaaaaaaaaaaaaaaaaaaaaaaaaaaaaaaaaaaaaaaaaaaaaaaaaaaaaaaaaaaaaaaaaaaaa

SEQ ID NO: 13555 - RNA, 5785 nt, synthetic construct
  source 1..5785: mol_type = other RNA
aggaaataagagagaaaagaagagtaagaagaaatataagagccaccatggcccctaagaagaagcgtaaagtgagccggatggaacgcctcgtctacgaggtgcggcagaagtgcagaaacatcgaggacatctgcatctcctgcggatctctgaacgtgaccctggagcacccactgttcatcggcggcatgtgccagaactgtaaaaactgttttctggagtgtgcctatcaatacgacgatgacggctaccagagctactgcaccatctgttgcggcggaagagaggtgctgatgtgtggaaataacaactgctgccggtgcttctgcgtggaatgcgtggacctgctggtgggccccggcgccgcccaggccgctattaaggaagatccttggaactgctacatgtgcggccacaagggcacatacggcctgctgagacggagagaggactggcctagcagactgcagatgttcttcgccaataaccacgaccaggagttcgacccccctaaggtgtaccctcccgtccccgccgagaagagaaagcccatccgggtcctgagcctgttcgatggcatcgccaccggtctgctggtgctgaaggacctgggcatccaggtggataggtacattgcctccgaggtgtgcgaggactccatcaccgtgggaatggtgcgtcatcagggcaagatcatgtacgtgggcgacgtgcggagcgtgacacagaagcatatccaggagtggggccctttcgacctggtgatcggcggcagcccttgcaatgacctgagcatcgtgaacccagcccggaagggcctgtacgagggaaccggcagactgttcttcgagttttacagactgctgcacgacgcccggcctaaggaaggcgacgaccggcccttcttttggctgttcgagaatgtggtggccatgggagtcagcgacaagcgggatattagccggttcctggagagcaaccccgtgatgatcgatgccaaggaagtgagcgccgcccaccgggccagatacttctggggcaatctgcctggcatgaacagacccctggccagcaccgtgaacgacaagctggagctgcaggagtgcctggagcacggccggatcgccaagttcagcaaggtgagaaccatcaccacccgaagcaacagcatcaaacaaggcaaggaccagcactttcctgtgttcatgaacgagaaggaggacatcctgtggtgtaccgagatggagagagtgttcgggttcccagtccactacacagatgtcagcaacatgtctagactggccagacagagactgctgggaagaagctggtccgtccctgtgatcagacacctgttcgcccctctgaaggagtacttcgcctgcgtgagcagcggcaacagcaacgccaacagccggggccccagcttctctagcggcctggtgccactgtccctgagagggagccacatgggccccatggagatctacaaaaccgtgagcgcctggaagcggcagcctgtgcgcgtgctgagcctgtttcggaatatcgataaagtcctgaaaagcctgggattcctggagagcggctctggctccggcggtggcaccctgaagtacgtggaggatgtgacaaacgtggtcagacgggatgtggagaagtggggccccttcgatctggtgtacggcagcacccaacccctgggcagctcttgtgaccggtgccctggctggtacatgtttcagttccaccggatcctgcagtacgccctgccgagacaggagtcccagcggccattcttttggattttcatggacaacttgctgctgaccgaggatgaccaggaaactaccactcggttcctgcagaccgaagccgtgaccctgcaggacgtgagaggccgggactaccagaacgccatgcgggtgtggtccaacatccctggactgaaaagcaagcacgcacctctgacccctaaagaagaggagtacctgcaggcccaggtgcggagcagaagcaagctggacgcccctaaggtggatctgctggtgaagaattgcctcctgcccctgagagagtacttcaagtatttcagccagaatagtctgcccctgggaggcagcggcggcggcgcccagggccaggtgaacttcgaggacgtggccgtgtacttcagccccgaggagtggggcctgctggacgaggcccagaggctgctgtacagggacgtgatgctggagaacctggccctgatggccagcctgggctacgagagcagcatgagccacggcttcgccagcctggagctgggcagcaagccctggggcagcgactgggccgacgtgacccccgccaggaccagggacacccagggcggcggcccaagcagcggcgcccctcctcccagcggcggcagcccagccggctccccaacctctaccgaggagggcacctctgagtccgccacccccgagagcggccctggcacctccaccgagcccagcgagggcagcgcacccggcagccctgccggcagccccacctccacagaggagggaaccagcaccgagcccagcgaaggcagcgccccaggcaccagcaccgagcctagtgagcaggagattaaacggatcaacaagatcagaagaagacttgtgaaagacagcaacaccaagaaggccggcaagacaggccccatgaaaaccctgctggttagagtgatgacacccgatctgagagagcggctggaaaacctgagaaagaagcctgaaaatatcccccagcccatcagcaatacatctagagccaacctgaataagctgctgaccgattacaccgaaatgaagaaggcgatcctgcatgtgtactgggaagagttccagaaggaccctgtgggcctgatgagccgggtggcccagcctgccagcaagaagatcgatcagaacaagctgaaacctgagatggacgagaagggcaacctgaccaccgccggctttgcctgctctcagtgtggccagcccctgttcgtgtacaagctggagcaggtgtctgagaagggcaaggcttacaccaactacttcggacggtgcaatgtggccgagcacgaaaagctgatcctgctggcccagctgaagcccgagaaggatagcgacgaagccgtgacatatagcctgggaaagtttgggcagagggccctggatttctacagcattcatgtgaccaaggagtccacccaccccgtgaagcccctggcccagatcgccggaaacagatacgcctccggacctgtgggaaaggccctgagcgacgcatgtatgggcacaatcgcctccttcctgtctaagtaccaggacatcatcatcgaacaccagaaggtggtgaagggcaaccagaagagactggagagcctgcgggagctggccggcaaggaaaacctggaataccctagcgtgaccctgccacctcagcctcacaccaaggagggcgttgatgcctacaacgaagtgatcgcccgggtgcgaatgtgggtgaacctgaacctgtggcagaagctgaagctaagcagagatgatgccaagcctctgctgagactgaagggattcccttcctttcctctggtcgagagacaggccaacgaagtggactggtgggacatggtgtgtaacgtgaagaagctgatcaacgagaaaaaggaggatggcaaggtgttttggcagaatctggctggctacaagagacaggaagccctgagaccatacctgagcagcgaggaagatcggaagaagggaaagaaattcgctcggtaccagctgggcgacctgctgctgcacctggaaaagaagcacggcgaggactggggaaaggtgtacgacgaggcctgggagcggattgacaagaaagtggaaggcctgagcaagcacatcaagctggaagaggaacggagaagcgaggacgcccagagcaaggccgccctgaccgactggctgcgggctaaggccagcttcgtgatcgagggcctgaaggaggccgacaaggacgagttctgcagatgcgagctgaagctgcagaagtggtacggggacctgcggggaaagcccttcgccatcgaagccgagaacagcatcctggacatcagcggcttcagcaagcagtacaactgtgccttcatctggcagaaggacggcgtgaagaagctgaacctgtacctgatcatcaactacttcaagggcggcaagctgcggttcaagaagatcaaacctgaagccttcgaagccaacagattctacaccgtgatcaacaaaaagagcggcgagatcgtgcccatggaggtgaacttcaacttcgacgaccccaacctgatcatcctgcctctggcctttggcaagagacagggcagagaattcatctggaacgacctgctgtccctggaaaccggcagcctgaagctggccaacggaagagtgatcgagaagacactgtacaacagaagaacccggcaggatgagcctgccctgttcgtggccctgaccttcgagcggcgggaggtcctggactcctccaatatcaaaccaatgaacctgatcggcgtggcaagaggcgaaaacatccccgccgtgatcgccctgaccgaccccgagggctgcccactgagccggtttaaggatagcctgggaaacccaacccacatcctgagaatcggcgagagctataaggagaagcagcggaccatccaggccaagaaggaggtggagcagcggagagccggcggctacagccggaagtacgccagcaaagccaagaatctggcagacgatatggtgagaaacaccgctagagatctgctgtactacgccgtgacccaggatgccatgctgatcttcgccaacctgagccggggcttcggccggcagggcaagcggaccttcatggccgagagacagtacacacggatggaggactggctgaccgccaagctggcctacgagggcctgagcaagacctacctgtccaagacactggcccagtacacctccaagacatgcagcaactgtgggtttaccatcaccagcgccgactacgacagggtgctggagaagctgaagaagacagcaacaggctggatgaccacaattaacggcaaggagctgaaggtggagggccagattacctactacaacagatacaagagacagaacgtagtcaaggacctgtccgtcgagctggatagactgagcgaagaatctgtgaacaacgacatctcctcctggacaaagggcagaagcggagaagctctgagcctcctgaagaaaagattctcccatagacccgtgcaggagaagttcgtgtgcctgaactgcggcttcgagacacacgcagccgagcaagccgccctgaacatcgccagatcctggctgttcctgcggagccaggagtacaagaaataccagacaaacaagacaaccggcaacaccgataagagagccttcgtcgagacctggcagtccttttaccggaagaagcttaaggaggtgtggaaacctgccgtgcggtctggcggatctggcggaggctccaccagccccaagaaaaagagaaaagtctaagctgccttctgcggggcttgccttctggccatgcccttcttctctcccttgcacctgtacctcttggtctttgaataaagcctgagtaggaaggctagcaaaaaaaaaaaaaaaaaaaaaaaaaaaaaaaaaaaaaaaaaaaaaaaaaaaaaaaaaaaaaaaaaaaaaaaaaaaaaaaa

SEQ ID NO: 13556 - RNA, 5785 nt, synthetic construct
  source 1..5785: mol_type = other RNA
aggaaataagagagaaaagaagagtaagaagaaatataagagccaccatggcccctaagaagaagcgtaaagtgagccggatggaacgcctcgtctacgaggtgcggcagaagtgcagaaacatcgaggacatctgcatctcctgcggatctctgaacgtgaccctggagcacccactgttcatcggcggcatgtgccagaactgtaaaaactgttttctggagtgtgcctatcaatacgacgatgacggctaccagagctactgcaccatctgttgcggcggaagagaggtgctgatgtgtggaaataacaactgctgccggtgcttctgcgtggaatgcgtggacctgctggtgggccccggcgccgcccaggccgctattaaggaagatccttggaactgctacatgtgcggccacaagggcacatacggcctgctgagacggagagaggactggcctagcagactgcagatgttcttcgccaataaccacgaccaggagttcgacccccctaaggtgtaccctcccgtccccgccgagaagagaaagcccatccgggtcctgagcctgttcgatggcatcgccaccggtctgctggtgctgaaggacctgggcatccaggtggataggtacattgcctccgaggtgtgcgaggactccatcaccgtgggaatggtgcgtcatcagggcaagatcatgtacgtgggcgacgtgcggagcgtgacacagaagcatatccaggagtggggccctttcgacctggtgatcggcggcagcccttgcaatgacctgagcatcgtgaacccagcccggaagggcctgtacgagggaaccggcagactgttcttcgagttttacagactgctgcacgacgcccggcctaaggaaggcgacgaccggcccttcttttggctgttcgagaatgtggtggccatgggagtcagcgacaagcgggatattagccggttcctggagagcaaccccgtgatgatcgatgccaaggaagtgagcgccgcccaccgggccagatacttctggggcaatctgcctggcatgaacagacccctggccagcaccgtgaacgacaagctggagctgcaggagtgcctggagcacggccggatcgccaagttcagcaaggtgagaaccatcaccacccgaagcaacagcatcaaacaaggcaaggaccagcactttcctgtgttcatgaacgagaaggaggacatcctgtggtgtaccgagatggagagagtgttcgggttcccagtccactacacagatgtcagcaacatgtctagactggccagacagagactgctgggaagaagctggtccgtccctgtgatcagacacctgttcgcccctctgaaggagtacttcgcctgcgtgagcagcggcaacagcaacgccaacagccggggccccagcttctctagcggcctggtgccactgtccctgagagggagccacatgggccccatggagatctacaaaaccgtgagcgcctggaagcggcagcctgtgcgcgtgctgagcctgtttcggaatatcgataaagtcctgaaaagcctgggattcctggagagcggctctggctccggcggtggcaccctgaagtacgtggaggatgtgacaaacgtggtcagacgggatgtggagaagtggggccccttcgatctggtgtacggcagcacccaacccctgggcagctcttgtgaccggtgccctggctggtacatgtttcagttccaccggatcctgcagtacgccctgccgagacaggagtcccagcggccattcttttggattttcatggacaacttgctgctgaccgaggatgaccaggaaactaccactcggttcctgcagaccgaagccgtgaccctgcaggacgtgagaggccgggactaccagaacgccatgcgggtgtggtccaacatccctggactgaaaagcaagcacgcacctctgacccctaaagaagaggagtacctgcaggcccaggtgcggagcagaagcaagctggacgcccctaaggtggatctgctggtgaagaattgcctcctgcccctgagagagtacttcaagtatttcagccagaatagtctgcccctgggaggcagcggcggcggccaggccgaggtgaccttcgaggacgtggccgtgctgctgagccaggaggagtggggcctgctgggccccagccagaagggcctgtacagggaggtgatgctggagacctacaggaacctgctgagcctgggcgccggcctggccgaccccaagcccgaggtgatcgtgcagctggagaggggcgacgagctgtgggtgctggacatgcacggcgccgagcagcccagcgtggacggcagcgccggcggcccaagcagcggcgcccctcctcccagcggcggcagcccagccggctccccaacctctaccgaggagggcacctctgagtccgccacccccgagagcggccctggcacctccaccgagcccagcgagggcagcgcacccggcagccctgccggcagccccacctccacagaggagggaaccagcaccgagcccagcgaaggcagcgccccaggcaccagcaccgagcctagtgagcaggagattaaacggatcaacaagatcagaagaagacttgtgaaagacagcaacaccaagaaggccggcaagacaggccccatgaaaaccctgctggttagagtgatgacacccgatctgagagagcggctggaaaacctgagaaagaagcctgaaaatatcccccagcccatcagcaatacatctagagccaacctgaataagctgctgaccgattacaccgaaatgaagaaggcgatcctgcatgtgtactgggaagagttccagaaggaccctgtgggcctgatgagccgggtggcccagcctgccagcaagaagatcgatcagaacaagctgaaacctgagatggacgagaagggcaacctgaccaccgccggctttgcctgctctcagtgtggccagcccctgttcgtgtacaagctggagcaggtgtctgagaagggcaaggcttacaccaactacttcggacggtgcaatgtggccgagcacgaaaagctgatcctgctggcccagctgaagcccgagaaggatagcgacgaagccgtgacatatagcctgggaaagtttgggcagagggccctggatttctacagcattcatgtgaccaaggagtccacccaccccgtgaagcccctggcccagatcgccggaaacagatacgcctccggacctgtgggaaaggccctgagcgacgcatgtatgggcacaatcgcctccttcctgtctaagtaccaggacatcatcatcgaacaccagaaggtggtgaagggcaaccagaagagactggagagcctgcgggagctggccggcaaggaaaacctggaataccctagcgtgaccctgccacctcagcctcacaccaaggagggcgttgatgcctacaacgaagtgatcgcccgggtgcgaatgtgggtgaacctgaacctgtggcagaagctgaagctaagcagagatgatgccaagcctctgctgagactgaagggattcccttcctttcctctggtcgagagacaggccaacgaagtggactggtgggacatggtgtgtaacgtgaagaagctgatcaacgagaaaaaggaggatggcaaggtgttttggcagaatctggctggctacaagagacaggaagccctgagaccatacctgagcagcgaggaagatcggaagaagggaaagaaattcgctcggtaccagctgggcgacctgctgctgcacctggaaaagaagcacggcgaggactggggaaaggtgtacgacgaggcctgggagcggattgacaagaaagtggaaggcctgagcaagcacatcaagctggaagaggaacggagaagcgaggacgcccagagcaaggccgccctgaccgactggctgcgggctaaggccagcttcgtgatcgagggcctgaaggaggccgacaaggacgagttctgcagatgcgagctgaagctgcagaagtggtacggggacctgcggggaaagcccttcgccatcgaagccgagaacagcatcctggacatcagcggcttcagcaagcagtacaactgtgccttcatctggcagaaggacggcgtgaagaagctgaacctgtacctgatcatcaactacttcaagggcggcaagctgcggttcaagaagatcaaacctgaagccttcgaagccaacagattctacaccgtgatcaacaaaaagagcggcgagatcgtgcccatggaggtgaacttcaacttcgacgaccccaacctgatcatcctgcctctggcctttggcaagagacagggcagagaattcatctggaacgacctgctgtccctggaaaccggcagcctgaagctggccaacggaagagtgatcgagaagacactgtacaacagaagaacccggcaggatgagcctgccctgttcgtggccctgaccttcgagcggcgggaggtcctggactcctccaatatcaaaccaatgaacctgatcggcgtggcaagaggcgaaaacatccccgccgtgatcgccctgaccgaccccgagggctgcccactgagccggtttaaggatagcctgggaaacccaacccacatcctgagaatcggcgagagctataaggagaagcagcggaccatccaggccaagaaggaggtggagcagcggagagccggcggctacagccggaagtacgccagcaaagccaagaatctggcagacgatatggtgagaaacaccgctagagatctgctgtactacgccgtgacccaggatgccatgctgatcttcgccaacctgagccggggcttcggccggcagggcaagcggaccttcatggccgagagacagtacacacggatggaggactggctgaccgccaagctggcctacgagggcctgagcaagacctacctgtccaagacactggcccagtacacctccaagacatgcagcaactgtgggtttaccatcaccagcgccgactacgacagggtgctggagaagctgaagaagacagcaacaggctggatgaccacaattaacggcaaggagctgaaggtggagggccagattacctactacaacagatacaagagacagaacgtagtcaaggacctgtccgtcgagctggatagactgagcgaagaatctgtgaacaacgacatctcctcctggacaaagggcagaagcggagaagctctgagcctcctgaagaaaagattctcccatagacccgtgcaggagaagttcgtgtgcctgaactgcggcttcgagacacacgcagccgagcaagccgccctgaacatcgccagatcctggctgttcctgcggagccaggagtacaagaaataccagacaaacaagacaaccggcaacaccgataagagagccttcgtcgagacctggcagtccttttaccggaagaagcttaaggaggtgtggaaacctgccgtgcggtctggcggatctggcggaggctccaccagccccaagaaaaagagaaaagtctaagctgccttctgcggggcttgccttctggccatgcccttcttctctcccttgcacctgtacctcttggtctttgaataaagcctgagtaggaaggctagcaaaaaaaaaaaaaaaaaaaaaaaaaaaaaaaaaaaaaaaaaaaaaaaaaaaaaaaaaaaaaaaaaaaaaaaaaaaaaaaa

SEQ ID NO: 13557 - RNA, 5785 nt, synthetic construct
  source 1..5785: mol_type = other RNA
aggaaataagagagaaaagaagagtaagaagaaatataagagccaccatggcccctaagaagaagcgtaaagtgagccggatggaacgcctcgtctacgaggtgcggcagaagtgcagaaacatcgaggacatctgcatctcctgcggatctctgaacgtgaccctggagcacccactgttcatcggcggcatgtgccagaactgtaaaaactgttttctggagtgtgcctatcaatacgacgatgacggctaccagagctactgcaccatctgttgcggcggaagagaggtgctgatgtgtggaaataacaactgctgccggtgcttctgcgtggaatgcgtggacctgctggtgggccccggcgccgcccaggccgctattaaggaagatccttggaactgctacatgtgcggccacaagggcacatacggcctgctgagacggagagaggactggcctagcagactgcagatgttcttcgccaataaccacgaccaggagttcgacccccctaaggtgtaccctcccgtccccgccgagaagagaaagcccatccgggtcctgagcctgttcgatggcatcgccaccggtctgctggtgctgaaggacctgggcatccaggtggataggtacattgcctccgaggtgtgcgaggactccatcaccgtgggaatggtgcgtcatcagggcaagatcatgtacgtgggcgacgtgcggagcgtgacacagaagcatatccaggagtggggccctttcgacctggtgatcggcggcagcccttgcaatgacctgagcatcgtgaacccagcccggaagggcctgtacgagggaaccggcagactgttcttcgagttttacagactgctgcacgacgcccggcctaaggaaggcgacgaccggcccttcttttggctgttcgagaatgtggtggccatgggagtcagcgacaagcgggatattagccggttcctggagagcaaccccgtgatgatcgatgccaaggaagtgagcgccgcccaccgggccagatacttctggggcaatctgcctggcatgaacagacccctggccagcaccgtgaacgacaagctggagctgcaggagtgcctggagcacggccggatcgccaagttcagcaaggtgagaaccatcaccacccgaagcaacagcatcaaacaaggcaaggaccagcactttcctgtgttcatgaacgagaaggaggacatcctgtggtgtaccgagatggagagagtgttcgggttcccagtccactacacagatgtcagcaacatgtctagactggccagacagagactgctgggaagaagctggtccgtccctgtgatcagacacctgttcgcccctctgaaggagtacttcgcctgcgtgagcagcggcaacagcaacgccaacagccggggccccagcttctctagcggcctggtgccactgtccctgagagggagccacatgggccccatggagatctacaaaaccgtgagcgcctggaagcggcagcctgtgcgcgtgctgagcctgtttcggaatatcgataaagtcctgaaaagcctgggattcctggagagcggctctggctccggcggtggcaccctgaagtacgtggaggatgtgacaaacgtggtcagacgggatgtggagaagtggggccccttcgatctggtgtacggcagcacccaacccctgggcagctcttgtgaccggtgccctggctggtacatgtttcagttccaccggatcctgcagtacgccctgccgagacaggagtcccagcggccattcttttggattttcatggacaacttgctgctgaccgaggatgaccaggaaactaccactcggttcctgcagaccgaagccgtgaccctgcaggacgtgagaggccgggactaccagaacgccatgcgggtgtggtccaacatccctggactgaaaagcaagcacgcacctctgacccctaaagaagaggagtacctgcaggcccaggtgcggagcagaagcaagctggacgcccctaaggtggatctgctggtgaagaattgcctcctgcccctgagagagtacttcaagtatttcagccagaatagtctgcccctgggaggcagcggcggcggcttcgaggagctggtgaccttcgaggacgtggccgtgtacttcagcgagaacgagtggaccagcctggcccccacccagagggtgctgtacagggacgtgatgctggagaactacggcgccgtggccagcctggccgccttccccttccccaagcccgccctgatcagccagctggagaggggcgaggccccctggtgcaaggccccccagggcgccctggacggcgagggccccaggggcatcggcggcccaagcagcggcgcccctcctcccagcggcggcagcccagccggctccccaacctctaccgaggagggcacctctgagtccgccacccccgagagcggccctggcacctccaccgagcccagcgagggcagcgcacccggcagccctgccggcagccccacctccacagaggagggaaccagcaccgagcccagcgaaggcagcgccccaggcaccagcaccgagcctagtgagcaggagattaaacggatcaacaagatcagaagaagacttgtgaaagacagcaacaccaagaaggccggcaagacaggccccatgaaaaccctgctggttagagtgatgacacccgatctgagagagcggctggaaaacctgagaaagaagcctgaaaatatcccccagcccatcagcaatacatctagagccaacctgaataagctgctgaccgattacaccgaaatgaagaaggcgatcctgcatgtgtactgggaagagttccagaaggaccctgtgggcctgatgagccgggtggcccagcctgccagcaagaagatcgatcagaacaagctgaaacctgagatggacgagaagggcaacctgaccaccgccggctttgcctgctctcagtgtggccagcccctgttcgtgtacaagctggagcaggtgtctgagaagggcaaggcttacaccaactacttcggacggtgcaatgtggccgagcacgaaaagctgatcctgctggcccagctgaagcccgagaaggatagcgacgaagccgtgacatatagcctgggaaagtttgggcagagggccctggatttctacagcattcatgtgaccaaggagtccacccaccccgtgaagcccctggcccagatcgccggaaacagatacgcctccggacctgtgggaaaggccctgagcgacgcatgtatgggcacaatcgcctccttcctgtctaagtaccaggacatcatcatcgaacaccagaaggtggtgaagggcaaccagaagagactggagagcctgcgggagctggccggcaaggaaaacctggaataccctagcgtgaccctgccacctcagcctcacaccaaggagggcgttgatgcctacaacgaagtgatcgcccgggtgcgaatgtgggtgaacctgaacctgtggcagaagctgaagctaagcagagatgatgccaagcctctgctgagactgaagggattcccttcctttcctctggtcgagagacaggccaacgaagtggactggtgggacatggtgtgtaacgtgaagaagctgatcaacgagaaaaaggaggatggcaaggtgttttggcagaatctggctggctacaagagacaggaagccctgagaccatacctgagcagcgaggaagatcggaagaagggaaagaaattcgctcggtaccagctgggcgacctgctgctgcacctggaaaagaagcacggcgaggactggggaaaggtgtacgacgaggcctgggagcggattgacaagaaagtggaaggcctgagcaagcacatcaagctggaagaggaacggagaagcgaggacgcccagagcaaggccgccctgaccgactggctgcgggctaaggccagcttcgtgatcgagggcctgaaggaggccgacaaggacgagttctgcagatgcgagctgaagctgcagaagtggtacggggacctgcggggaaagcccttcgccatcgaagccgagaacagcatcctggacatcagcggcttcagcaagcagtacaactgtgccttcatctggcagaaggacggcgtgaagaagctgaacctgtacctgatcatcaactacttcaagggcggcaagctgcggttcaagaagatcaaacctgaagccttcgaagccaacagattctacaccgtgatcaacaaaaagagcggcgagatcgtgcccatggaggtgaacttcaacttcgacgaccccaacctgatcatcctgcctctggcctttggcaagagacagggcagagaattcatctggaacgacctgctgtccctggaaaccggcagcctgaagctggccaacggaagagtgatcgagaagacactgtacaacagaagaacccggcaggatgagcctgccctgttcgtggccctgaccttcgagcggcgggaggtcctggactcctccaatatcaaaccaatgaacctgatcggcgtggcaagaggcgaaaacatccccgccgtgatcgccctgaccgaccccgagggctgcccactgagccggtttaaggatagcctgggaaacccaacccacatcctgagaatcggcgagagctataaggagaagcagcggaccatccaggccaagaaggaggtggagcagcggagagccggcggctacagccggaagtacgccagcaaagccaagaatctggcagacgatatggtgagaaacaccgctagagatctgctgtactacgccgtgacccaggatgccatgctgatcttcgccaacctgagccggggcttcggccggcagggcaagcggaccttcatggccgagagacagtacacacggatggaggactggctgaccgccaagctggcctacgagggcctgagcaagacctacctgtccaagacactggcccagtacacctccaagacatgcagcaactgtgggtttaccatcaccagcgccgactacgacagggtgctggagaagctgaagaagacagcaacaggctggatgaccacaattaacggcaaggagctgaaggtggagggccagattacctactacaacagatacaagagacagaacgtagtcaaggacctgtccgtcgagctggatagactgagcgaagaatctgtgaacaacgacatctcctcctggacaaagggcagaagcggagaagctctgagcctcctgaagaaaagattctcccatagacccgtgcaggagaagttcgtgtgcctgaactgcggcttcgagacacacgcagccgagcaagccgccctgaacatcgccagatcctggctgttcctgcggagccaggagtacaagaaataccagacaaacaagacaaccggcaacaccgataagagagccttcgtcgagacctggcagtccttttaccggaagaagcttaaggaggtgtggaaacctgccgtgcggtctggcggatctggcggaggctccaccagccccaagaaaaagagaaaagtctaagctgccttctgcggggcttgccttctggccatgcccttcttctctcccttgcacctgtacctcttggtctttgaataaagcctgagtaggaaggctagcaaaaaaaaaaaaaaaaaaaaaaaaaaaaaaaaaaaaaaaaaaaaaaaaaaaaaaaaaaaaaaaaaaaaaaaaaaaaaaaa

SEQ ID NO: 13558 - RNA, 5785 nt, synthetic construct
  source 1..5785: mol_type = other RNA
aggaaataagagagaaaagaagagtaagaagaaatataagagccaccatggcccctaagaagaagcgtaaagtgagccggatggaacgcctcgtctacgaggtgcggcagaagtgcagaaacatcgaggacatctgcatctcctgcggatctctgaacgtgaccctggagcacccactgttcatcggcggcatgtgccagaactgtaaaaactgttttctggagtgtgcctatcaatacgacgatgacggctaccagagctactgcaccatctgttgcggcggaagagaggtgctgatgtgtggaaataacaactgctgccggtgcttctgcgtggaatgcgtggacctgctggtgggccccggcgccgcccaggccgctattaaggaagatccttggaactgctacatgtgcggccacaagggcacatacggcctgctgagacggagagaggactggcctagcagactgcagatgttcttcgccaataaccacgaccaggagttcgacccccctaaggtgtaccctcccgtccccgccgagaagagaaagcccatccgggtcctgagcctgttcgatggcatcgccaccggtctgctggtgctgaaggacctgggcatccaggtggataggtacattgcctccgaggtgtgcgaggactccatcaccgtgggaatggtgcgtcatcagggcaagatcatgtacgtgggcgacgtgcggagcgtgacacagaagcatatccaggagtggggccctttcgacctggtgatcggcggcagcccttgcaatgacctgagcatcgtgaacccagcccggaagggcctgtacgagggaaccggcagactgttcttcgagttttacagactgctgcacgacgcccggcctaaggaaggcgacgaccggcccttcttttggctgttcgagaatgtggtggccatgggagtcagcgacaagcgggatattagccggttcctggagagcaaccccgtgatgatcgatgccaaggaagtgagcgccgcccaccgggccagatacttctggggcaatctgcctggcatgaacagacccctggccagcaccgtgaacgacaagctggagctgcaggagtgcctggagcacggccggatcgccaagttcagcaaggtgagaaccatcaccacccgaagcaacagcatcaaacaaggcaaggaccagcactttcctgtgttcatgaacgagaaggaggacatcctgtggtgtaccgagatggagagagtgttcgggttcccagtccactacacagatgtcagcaacatgtctagactggccagacagagactgctgggaagaagctggtccgtccctgtgatcagacacctgttcgcccctctgaaggagtacttcgcctgcgtgagcagcggcaacagcaacgccaacagccggggccccagcttctctagcggcctggtgccactgtccctgagagggagccacatgggccccatggagatctacaaaaccgtgagcgcctggaagcggcagcctgtgcgcgtgctgagcctgtttcggaatatcgataaagtcctgaaaagcctgggattcctggagagcggctctggctccggcggtggcaccctgaagtacgtggaggatgtgacaaacgtggtcagacgggatgtggagaagtggggccccttcgatctggtgtacggcagcacccaacccctgggcagctcttgtgaccggtgccctggctggtacatgtttcagttccaccggatcctgcagtacgccctgccgagacaggagtcccagcggccattcttttggattttcatggacaacttgctgctgaccgaggatgaccaggaaactaccactcggttcctgcagaccgaagccgtgaccctgcaggacgtgagaggccgggactaccagaacgccatgcgggtgtggtccaacatccctggactgaaaagcaagcacgcacctctgacccctaaagaagaggagtacctgcaggcccaggtgcggagcagaagcaagctggacgcccctaaggtggatctgctggtgaagaattgcctcctgcccctgagagagtacttcaagtatttcagccagaatagtctgcccctgggaggcagcggcggcggcccccaggagagcgtggccttcgacgacgtggccgtgtacttcaccaagaaggagtgggccatcatggtgcccgaccagagggccctgtacagggacgtgatgctggagaactacgaggccgtggccttcgtggccgtgccccccaccagcaagcccgccctggtgagccacctggagcagggcaaggagccctgcttcacccagccccagggcgtgctgagcaggagggactggagggccggcggcggcccaagcagcggcgcccctcctcccagcggcggcagcccagccggctccccaacctctaccgaggagggcacctctgagtccgccacccccgagagcggccctggcacctccaccgagcccagcgagggcagcgcacccggcagccctgccggcagccccacctccacagaggagggaaccagcaccgagcccagcgaaggcagcgccccaggcaccagcaccgagcctagtgagcaggagattaaacggatcaacaagatcagaagaagacttgtgaaagacagcaacaccaagaaggccggcaagacaggccccatgaaaaccctgctggttagagtgatgacacccgatctgagagagcggctggaaaacctgagaaagaagcctgaaaatatcccccagcccatcagcaatacatctagagccaacctgaataagctgctgaccgattacaccgaaatgaagaaggcgatcctgcatgtgtactgggaagagttccagaaggaccctgtgggcctgatgagccgggtggcccagcctgccagcaagaagatcgatcagaacaagctgaaacctgagatggacgagaagggcaacctgaccaccgccggctttgcctgctctcagtgtggccagcccctgttcgtgtacaagctggagcaggtgtctgagaagggcaaggcttacaccaactacttcggacggtgcaatgtggccgagcacgaaaagctgatcctgctggcccagctgaagcccgagaaggatagcgacgaagccgtgacatatagcctgggaaagtttgggcagagggccctggatttctacagcattcatgtgaccaaggagtccacccaccccgtgaagcccctggcccagatcgccggaaacagatacgcctccggacctgtgggaaaggccctgagcgacgcatgtatgggcacaatcgcctccttcctgtctaagtaccaggacatcatcatcgaacaccagaaggtggtgaagggcaaccagaagagactggagagcctgcgggagctggccggcaaggaaaacctggaataccctagcgtgaccctgccacctcagcctcacaccaaggagggcgttgatgcctacaacgaagtgatcgcccgggtgcgaatgtgggtgaacctgaacctgtggcagaagctgaagctaagcagagatgatgccaagcctctgctgagactgaagggattcccttcctttcctctggtcgagagacaggccaacgaagtggactggtgggacatggtgtgtaacgtgaagaagctgatcaacgagaaaaaggaggatggcaaggtgttttggcagaatctggctggctacaagagacaggaagccctgagaccatacctgagcagcgaggaagatcggaagaagggaaagaaattcgctcggtaccagctgggcgacctgctgctgcacctggaaaagaagcacggcgaggactggggaaaggtgtacgacgaggcctgggagcggattgacaagaaagtggaaggcctgagcaagcacatcaagctggaagaggaacggagaagcgaggacgcccagagcaaggccgccctgaccgactggctgcgggctaaggccagcttcgtgatcgagggcctgaaggaggccgacaaggacgagttctgcagatgcgagctgaagctgcagaagtggtacggggacctgcggggaaagcccttcgccatcgaagccgagaacagcatcctggacatcagcggcttcagcaagcagtacaactgtgccttcatctggcagaaggacggcgtgaagaagctgaacctgtacctgatcatcaactacttcaagggcggcaagctgcggttcaagaagatcaaacctgaagccttcgaagccaacagattctacaccgtgatcaacaaaaagagcggcgagatcgtgcccatggaggtgaacttcaacttcgacgaccccaacctgatcatcctgcctctggcctttggcaagagacagggcagagaattcatctggaacgacctgctgtccctggaaaccggcagcctgaagctggccaacggaagagtgatcgagaagacactgtacaacagaagaacccggcaggatgagcctgccctgttcgtggccctgaccttcgagcggcgggaggtcctggactcctccaatatcaaaccaatgaacctgatcggcgtggcaagaggcgaaaacatccccgccgtgatcgccctgaccgaccccgagggctgcccactgagccggtttaaggatagcctgggaaacccaacccacatcctgagaatcggcgagagctataaggagaagcagcggaccatccaggccaagaaggaggtggagcagcggagagccggcggctacagccggaagtacgccagcaaagccaagaatctggcagacgatatggtgagaaacaccgctagagatctgctgtactacgccgtgacccaggatgccatgctgatcttcgccaacctgagccggggcttcggccggcagggcaagcggaccttcatggccgagagacagtacacacggatggaggactggctgaccgccaagctggcctacgagggcctgagcaagacctacctgtccaagacactggcccagtacacctccaagacatgcagcaactgtgggtttaccatcaccagcgccgactacgacagggtgctggagaagctgaagaagacagcaacaggctggatgaccacaattaacggcaaggagctgaaggtggagggccagattacctactacaacagatacaagagacagaacgtagtcaaggacctgtccgtcgagctggatagactgagcgaagaatctgtgaacaacgacatctcctcctggacaaagggcagaagcggagaagctctgagcctcctgaagaaaagattctcccatagacccgtgcaggagaagttcgtgtgcctgaactgcggcttcgagacacacgcagccgagcaagccgccctgaacatcgccagatcctggctgttcctgcggagccaggagtacaagaaataccagacaaacaagacaaccggcaacaccgataagagagccttcgtcgagacctggcagtccttttaccggaagaagcttaaggaggtgtggaaacctgccgtgcggtctggcggatctggcggaggctccaccagccccaagaaaaagagaaaagtctaagctgccttctgcggggcttgccttctggccatgcccttcttctctcccttgcacctgtacctcttggtctttgaataaagcctgagtaggaaggctagcaaaaaaaaaaaaaaaaaaaaaaaaaaaaaaaaaaaaaaaaaaaaaaaaaaaaaaaaaaaaaaaaaaaaaaaaaaaaaaaa

SEQ ID NO: 13559 - RNA, 5785 nt, synthetic construct
  source 1..5785: mol_type = other RNA
aggaaataagagagaaaagaagagtaagaagaaatataagagccaccatggcccctaagaagaagcgtaaagtgagccggatggaacgcctcgtctacgaggtgcggcagaagtgcagaaacatcgaggacatctgcatctcctgcggatctctgaacgtgaccctggagcacccactgttcatcggcggcatgtgccagaactgtaaaaactgttttctggagtgtgcctatcaatacgacgatgacggctaccagagctactgcaccatctgttgcggcggaagagaggtgctgatgtgtggaaataacaactgctgccggtgcttctgcgtggaatgcgtggacctgctggtgggccccggcgccgcccaggccgctattaaggaagatccttggaactgctacatgtgcggccacaagggcacatacggcctgctgagacggagagaggactggcctagcagactgcagatgttcttcgccaataaccacgaccaggagttcgacccccctaaggtgtaccctcccgtccccgccgagaagagaaagcccatccgggtcctgagcctgttcgatggcatcgccaccggtctgctggtgctgaaggacctgggcatccaggtggataggtacattgcctccgaggtgtgcgaggactccatcaccgtgggaatggtgcgtcatcagggcaagatcatgtacgtgggcgacgtgcggagcgtgacacagaagcatatccaggagtggggccctttcgacctggtgatcggcggcagcccttgcaatgacctgagcatcgtgaacccagcccggaagggcctgtacgagggaaccggcagactgttcttcgagttttacagactgctgcacgacgcccggcctaaggaaggcgacgaccggcccttcttttggctgttcgagaatgtggtggccatgggagtcagcgacaagcgggatattagccggttcctggagagcaaccccgtgatgatcgatgccaaggaagtgagcgccgcccaccgggccagatacttctggggcaatctgcctggcatgaacagacccctggccagcaccgtgaacgacaagctggagctgcaggagtgcctggagcacggccggatcgccaagttcagcaaggtgagaaccatcaccacccgaagcaacagcatcaaacaaggcaaggaccagcactttcctgtgttcatgaacgagaaggaggacatcctgtggtgtaccgagatggagagagtgttcgggttcccagtccactacacagatgtcagcaacatgtctagactggccagacagagactgctgggaagaagctggtccgtccctgtgatcagacacctgttcgcccctctgaaggagtacttcgcctgcgtgagcagcggcaacagcaacgccaacagccggggccccagcttctctagcggcctggtgccactgtccctgagagggagccacatgggccccatggagatctacaaaaccgtgagcgcctggaagcggcagcctgtgcgcgtgctgagcctgtttcggaatatcgataaagtcctgaaaagcctgggattcctggagagcggctctggctccggcggtggcaccctgaagtacgtggaggatgtgacaaacgtggtcagacgggatgtggagaagtggggccccttcgatctggtgtacggcagcacccaacccctgggcagctcttgtgaccggtgccctggctggtacatgtttcagttccaccggatcctgcagtacgccctgccgagacaggagtcccagcggccattcttttggattttcatggacaacttgctgctgaccgaggatgaccaggaaactaccactcggttcctgcagaccgaagccgtgaccctgcaggacgtgagaggccgggactaccagaacgccatgcgggtgtggtccaacatccctggactgaaaagcaagcacgcacctctgacccctaaagaagaggagtacctgcaggcccaggtgcggagcagaagcaagctggacgcccctaaggtggatctgctggtgaagaattgcctcctgcccctgagagagtacttcaagtatttcagccagaatagtctgcccctgggaggcagcggcggcggcagccaggagctggtggccttcgaggacgtgctggtggacttcacccccgaggagtggcagtacctgaacagcagccagaagaccctgtacagggaggtgatgctggagacctacagcaacctggtgagcgtggccggccagcaggacaccaagcccgacctgatcctgaagctggagctggagggcccctgcctggccgagaggaagatcagcgtgtggagcttccccgaggaggcctgccagggcggcccaagcagcggcgcccctcctcccagcggcggcagcccagccggctccccaacctctaccgaggagggcacctctgagtccgccacccccgagagcggccctggcacctccaccgagcccagcgagggcagcgcacccggcagccctgccggcagccccacctccacagaggagggaaccagcaccgagcccagcgaaggcagcgccccaggcaccagcaccgagcctagtgagcaggagattaaacggatcaacaagatcagaagaagacttgtgaaagacagcaacaccaagaaggccggcaagacaggccccatgaaaaccctgctggttagagtgatgacacccgatctgagagagcggctggaaaacctgagaaagaagcctgaaaatatcccccagcccatcagcaatacatctagagccaacctgaataagctgctgaccgattacaccgaaatgaagaaggcgatcctgcatgtgtactgggaagagttccagaaggaccctgtgggcctgatgagccgggtggcccagcctgccagcaagaagatcgatcagaacaagctgaaacctgagatggacgagaagggcaacctgaccaccgccggctttgcctgctctcagtgtggccagcccctgttcgtgtacaagctggagcaggtgtctgagaagggcaaggcttacaccaactacttcggacggtgcaatgtggccgagcacgaaaagctgatcctgctggcccagctgaagcccgagaaggatagcgacgaagccgtgacatatagcctgggaaagtttgggcagagggccctggatttctacagcattcatgtgaccaaggagtccacccaccccgtgaagcccctggcccagatcgccggaaacagatacgcctccggacctgtgggaaaggccctgagcgacgcatgtatgggcacaatcgcctccttcctgtctaagtaccaggacatcatcatcgaacaccagaaggtggtgaagggcaaccagaagagactggagagcctgcgggagctggccggcaaggaaaacctggaataccctagcgtgaccctgccacctcagcctcacaccaaggagggcgttgatgcctacaacgaagtgatcgcccgggtgcgaatgtgggtgaacctgaacctgtggcagaagctgaagctaagcagagatgatgccaagcctctgctgagactgaagggattcccttcctttcctctggtcgagagacaggccaacgaagtggactggtgggacatggtgtgtaacgtgaagaagctgatcaacgagaaaaaggaggatggcaaggtgttttggcagaatctggctggctacaagagacaggaagccctgagaccatacctgagcagcgaggaagatcggaagaagggaaagaaattcgctcggtaccagctgggcgacctgctgctgcacctggaaaagaagcacggcgaggactggggaaaggtgtacgacgaggcctgggagcggattgacaagaaagtggaaggcctgagcaagcacatcaagctggaagaggaacggagaagcgaggacgcccagagcaaggccgccctgaccgactggctgcgggctaaggccagcttcgtgatcgagggcctgaaggaggccgacaaggacgagttctgcagatgcgagctgaagctgcagaagtggtacggggacctgcggggaaagcccttcgccatcgaagccgagaacagcatcctggacatcagcggcttcagcaagcagtacaactgtgccttcatctggcagaaggacggcgtgaagaagctgaacctgtacctgatcatcaactacttcaagggcggcaagctgcggttcaagaagatcaaacctgaagccttcgaagccaacagattctacaccgtgatcaacaaaaagagcggcgagatcgtgcccatggaggtgaacttcaacttcgacgaccccaacctgatcatcctgcctctggcctttggcaagagacagggcagagaattcatctggaacgacctgctgtccctggaaaccggcagcctgaagctggccaacggaagagtgatcgagaagacactgtacaacagaagaacccggcaggatgagcctgccctgttcgtggccctgaccttcgagcggcgggaggtcctggactcctccaatatcaaaccaatgaacctgatcggcgtggcaagaggcgaaaacatccccgccgtgatcgccctgaccgaccccgagggctgcccactgagccggtttaaggatagcctgggaaacccaacccacatcctgagaatcggcgagagctataaggagaagcagcggaccatccaggccaagaaggaggtggagcagcggagagccggcggctacagccggaagtacgccagcaaagccaagaatctggcagacgatatggtgagaaacaccgctagagatctgctgtactacgccgtgacccaggatgccatgctgatcttcgccaacctgagccggggcttcggccggcagggcaagcggaccttcatggccgagagacagtacacacggatggaggactggctgaccgccaagctggcctacgagggcctgagcaagacctacctgtccaagacactggcccagtacacctccaagacatgcagcaactgtgggtttaccatcaccagcgccgactacgacagggtgctggagaagctgaagaagacagcaacaggctggatgaccacaattaacggcaaggagctgaaggtggagggccagattacctactacaacagatacaagagacagaacgtagtcaaggacctgtccgtcgagctggatagactgagcgaagaatctgtgaacaacgacatctcctcctggacaaagggcagaagcggagaagctctgagcctcctgaagaaaagattctcccatagacccgtgcaggagaagttcgtgtgcctgaactgcggcttcgagacacacgcagccgagcaagccgccctgaacatcgccagatcctggctgttcctgcggagccaggagtacaagaaataccagacaaacaagacaaccggcaacaccgataagagagccttcgtcgagacctggcagtccttttaccggaagaagcttaaggaggtgtggaaacctgccgtgcggtctggcggatctggcggaggctccaccagccccaagaaaaagagaaaagtctaagctgccttctgcggggcttgccttctggccatgcccttcttctctcccttgcacctgtacctcttggtctttgaataaagcctgagtaggaaggctagcaaaaaaaaaaaaaaaaaaaaaaaaaaaaaaaaaaaaaaaaaaaaaaaaaaaaaaaaaaaaaaaaaaaaaaaaaaaaaaaa

SEQ ID NO: 13560 - RNA, 5785 nt, synthetic construct
  source 1..5785: mol_type = other RNA
aggaaataagagagaaaagaagagtaagaagaaatataagagccaccatggcccctaagaagaagcgtaaagtgagccggatggaacgcctcgtctacgaggtgcggcagaagtgcagaaacatcgaggacatctgcatctcctgcggatctctgaacgtgaccctggagcacccactgttcatcggcggcatgtgccagaactgtaaaaactgttttctggagtgtgcctatcaatacgacgatgacggctaccagagctactgcaccatctgttgcggcggaagagaggtgctgatgtgtggaaataacaactgctgccggtgcttctgcgtggaatgcgtggacctgctggtgggccccggcgccgcccaggccgctattaaggaagatccttggaactgctacatgtgcggccacaagggcacatacggcctgctgagacggagagaggactggcctagcagactgcagatgttcttcgccaataaccacgaccaggagttcgacccccctaaggtgtaccctcccgtccccgccgagaagagaaagcccatccgggtcctgagcctgttcgatggcatcgccaccggtctgctggtgctgaaggacctgggcatccaggtggataggtacattgcctccgaggtgtgcgaggactccatcaccgtgggaatggtgcgtcatcagggcaagatcatgtacgtgggcgacgtgcggagcgtgacacagaagcatatccaggagtggggccctttcgacctggtgatcggcggcagcccttgcaatgacctgagcatcgtgaacccagcccggaagggcctgtacgagggaaccggcagactgttcttcgagttttacagactgctgcacgacgcccggcctaaggaaggcgacgaccggcccttcttttggctgttcgagaatgtggtggccatgggagtcagcgacaagcgggatattagccggttcctggagagcaaccccgtgatgatcgatgccaaggaagtgagcgccgcccaccgggccagatacttctggggcaatctgcctggcatgaacagacccctggccagcaccgtgaacgacaagctggagctgcaggagtgcctggagcacggccggatcgccaagttcagcaaggtgagaaccatcaccacccgaagcaacagcatcaaacaaggcaaggaccagcactttcctgtgttcatgaacgagaaggaggacatcctgtggtgtaccgagatggagagagtgttcgggttcccagtccactacacagatgtcagcaacatgtctagactggccagacagagactgctgggaagaagctggtccgtccctgtgatcagacacctgttcgcccctctgaaggagtacttcgcctgcgtgagcagcggcaacagcaacgccaacagccggggccccagcttctctagcggcctggtgccactgtccctgagagggagccacatgggccccatggagatctacaaaaccgtgagcgcctggaagcggcagcctgtgcgcgtgctgagcctgtttcggaatatcgataaagtcctgaaaagcctgggattcctggagagcggctctggctccggcggtggcaccctgaagtacgtggaggatgtgacaaacgtggtcagacgggatgtggagaagtggggccccttcgatctggtgtacggcagcacccaacccctgggcagctcttgtgaccggtgccctggctggtacatgtttcagttccaccggatcctgcagtacgccctgccgagacaggagtcccagcggccattcttttggattttcatggacaacttgctgctgaccgaggatgaccaggaaactaccactcggttcctgcagaccgaagccgtgaccctgcaggacgtgagaggccgggactaccagaacgccatgcgggtgtggtccaacatccctggactgaaaagcaagcacgcacctctgacccctaaagaagaggagtacctgcaggcccaggtgcggagcagaagcaagctggacgcccctaaggtggatctgctggtgaagaattgcctcctgcccctgagagagtacttcaagtatttcagccagaatagtctgcccctgggaggcagcggcggcggcagcagcgtgaccttcgaggacgtggccgtgtacttcagccaggaggagtggaggttcctgaacaaggcccagaagcacctgtaccacgacgtgatgctggaggtgttcgccctgatcgccagcctgggcggcggccagggcgccctggaggccgccgcccccagcgagcagaacgtgagcggcggcggcagccagaaggcctacgcccaggactgcagcctggacaccaaccccggccagaccggcggcccaagcagcggcgcccctcctcccagcggcggcagcccagccggctccccaacctctaccgaggagggcacctctgagtccgccacccccgagagcggccctggcacctccaccgagcccagcgagggcagcgcacccggcagccctgccggcagccccacctccacagaggagggaaccagcaccgagcccagcgaaggcagcgccccaggcaccagcaccgagcctagtgagcaggagattaaacggatcaacaagatcagaagaagacttgtgaaagacagcaacaccaagaaggccggcaagacaggccccatgaaaaccctgctggttagagtgatgacacccgatctgagagagcggctggaaaacctgagaaagaagcctgaaaatatcccccagcccatcagcaatacatctagagccaacctgaataagctgctgaccgattacaccgaaatgaagaaggcgatcctgcatgtgtactgggaagagttccagaaggaccctgtgggcctgatgagccgggtggcccagcctgccagcaagaagatcgatcagaacaagctgaaacctgagatggacgagaagggcaacctgaccaccgccggctttgcctgctctcagtgtggccagcccctgttcgtgtacaagctggagcaggtgtctgagaagggcaaggcttacaccaactacttcggacggtgcaatgtggccgagcacgaaaagctgatcctgctggcccagctgaagcccgagaaggatagcgacgaagccgtgacatatagcctgggaaagtttgggcagagggccctggatttctacagcattcatgtgaccaaggagtccacccaccccgtgaagcccctggcccagatcgccggaaacagatacgcctccggacctgtgggaaaggccctgagcgacgcatgtatgggcacaatcgcctccttcctgtctaagtaccaggacatcatcatcgaacaccagaaggtggtgaagggcaaccagaagagactggagagcctgcgggagctggccggcaaggaaaacctggaataccctagcgtgaccctgccacctcagcctcacaccaaggagggcgttgatgcctacaacgaagtgatcgcccgggtgcgaatgtgggtgaacctgaacctgtggcagaagctgaagctaagcagagatgatgccaagcctctgctgagactgaagggattcccttcctttcctctggtcgagagacaggccaacgaagtggactggtgggacatggtgtgtaacgtgaagaagctgatcaacgagaaaaaggaggatggcaaggtgttttggcagaatctggctggctacaagagacaggaagccctgagaccatacctgagcagcgaggaagatcggaagaagggaaagaaattcgctcggtaccagctgggcgacctgctgctgcacctggaaaagaagcacggcgaggactggggaaaggtgtacgacgaggcctgggagcggattgacaagaaagtggaaggcctgagcaagcacatcaagctggaagaggaacggagaagcgaggacgcccagagcaaggccgccctgaccgactggctgcgggctaaggccagcttcgtgatcgagggcctgaaggaggccgacaaggacgagttctgcagatgcgagctgaagctgcagaagtggtacggggacctgcggggaaagcccttcgccatcgaagccgagaacagcatcctggacatcagcggcttcagcaagcagtacaactgtgccttcatctggcagaaggacggcgtgaagaagctgaacctgtacctgatcatcaactacttcaagggcggcaagctgcggttcaagaagatcaaacctgaagccttcgaagccaacagattctacaccgtgatcaacaaaaagagcggcgagatcgtgcccatggaggtgaacttcaacttcgacgaccccaacctgatcatcctgcctctggcctttggcaagagacagggcagagaattcatctggaacgacctgctgtccctggaaaccggcagcctgaagctggccaacggaagagtgatcgagaagacactgtacaacagaagaacccggcaggatgagcctgccctgttcgtggccctgaccttcgagcggcgggaggtcctggactcctccaatatcaaaccaatgaacctgatcggcgtggcaagaggcgaaaacatccccgccgtgatcgccctgaccgaccccgagggctgcccactgagccggtttaaggatagcctgggaaacccaacccacatcctgagaatcggcgagagctataaggagaagcagcggaccatccaggccaagaaggaggtggagcagcggagagccggcggctacagccggaagtacgccagcaaagccaagaatctggcagacgatatggtgagaaacaccgctagagatctgctgtactacgccgtgacccaggatgccatgctgatcttcgccaacctgagccggggcttcggccggcagggcaagcggaccttcatggccgagagacagtacacacggatggaggactggctgaccgccaagctggcctacgagggcctgagcaagacctacctgtccaagacactggcccagtacacctccaagacatgcagcaactgtgggtttaccatcaccagcgccgactacgacagggtgctggagaagctgaagaagacagcaacaggctggatgaccacaattaacggcaaggagctgaaggtggagggccagattacctactacaacagatacaagagacagaacgtagtcaaggacctgtccgtcgagctggatagactgagcgaagaatctgtgaacaacgacatctcctcctggacaaagggcagaagcggagaagctctgagcctcctgaagaaaagattctcccatagacccgtgcaggagaagttcgtgtgcctgaactgcggcttcgagacacacgcagccgagcaagccgccctgaacatcgccagatcctggctgttcctgcggagccaggagtacaagaaataccagacaaacaagacaaccggcaacaccgataagagagccttcgtcgagacctggcagtccttttaccggaagaagcttaaggaggtgtggaaacctgccgtgcggtctggcggatctggcggaggctccaccagccccaagaaaaagagaaaagtctaagctgccttctgcggggcttgccttctggccatgcccttcttctctcccttgcacctgtacctcttggtctttgaataaagcctgagtaggaaggctagcaaaaaaaaaaaaaaaaaaaaaaaaaaaaaaaaaaaaaaaaaaaaaaaaaaaaaaaaaaaaaaaaaaaaaaaaaaaaaaaa

SEQ ID NO: 13561 - RNA, 5785 nt, synthetic construct
  source 1..5785: mol_type = other RNA
aggaaataagagagaaaagaagagtaagaagaaatataagagccaccatggcccctaagaagaagcgtaaagtgagccggatggaacgcctcgtctacgaggtgcggcagaagtgcagaaacatcgaggacatctgcatctcctgcggatctctgaacgtgaccctggagcacccactgttcatcggcggcatgtgccagaactgtaaaaactgttttctggagtgtgcctatcaatacgacgatgacggctaccagagctactgcaccatctgttgcggcggaagagaggtgctgatgtgtggaaataacaactgctgccggtgcttctgcgtggaatgcgtggacctgctggtgggccccggcgccgcccaggccgctattaaggaagatccttggaactgctacatgtgcggccacaagggcacatacggcctgctgagacggagagaggactggcctagcagactgcagatgttcttcgccaataaccacgaccaggagttcgacccccctaaggtgtaccctcccgtccccgccgagaagagaaagcccatccgggtcctgagcctgttcgatggcatcgccaccggtctgctggtgctgaaggacctgggcatccaggtggataggtacattgcctccgaggtgtgcgaggactccatcaccgtgggaatggtgcgtcatcagggcaagatcatgtacgtgggcgacgtgcggagcgtgacacagaagcatatccaggagtggggccctttcgacctggtgatcggcggcagcccttgcaatgacctgagcatcgtgaacccagcccggaagggcctgtacgagggaaccggcagactgttcttcgagttttacagactgctgcacgacgcccggcctaaggaaggcgacgaccggcccttcttttggctgttcgagaatgtggtggccatgggagtcagcgacaagcgggatattagccggttcctggagagcaaccccgtgatgatcgatgccaaggaagtgagcgccgcccaccgggccagatacttctggggcaatctgcctggcatgaacagacccctggccagcaccgtgaacgacaagctggagctgcaggagtgcctggagcacggccggatcgccaagttcagcaaggtgagaaccatcaccacccgaagcaacagcatcaaacaaggcaaggaccagcactttcctgtgttcatgaacgagaaggaggacatcctgtggtgtaccgagatggagagagtgttcgggttcccagtccactacacagatgtcagcaacatgtctagactggccagacagagactgctgggaagaagctggtccgtccctgtgatcagacacctgttcgcccctctgaaggagtacttcgcctgcgtgagcagcggcaacagcaacgccaacagccggggccccagcttctctagcggcctggtgccactgtccctgagagggagccacatgggccccatggagatctacaaaaccgtgagcgcctggaagcggcagcctgtgcgcgtgctgagcctgtttcggaatatcgataaagtcctgaaaagcctgggattcctggagagcggctctggctccggcggtggcaccctgaagtacgtggaggatgtgacaaacgtggtcagacgggatgtggagaagtggggccccttcgatctggtgtacggcagcacccaacccctgggcagctcttgtgaccggtgccctggctggtacatgtttcagttccaccggatcctgcagtacgccctgccgagacaggagtcccagcggccattcttttggattttcatggacaacttgctgctgaccgaggatgaccaggaaactaccactcggttcctgcagaccgaagccgtgaccctgcaggacgtgagaggccgggactaccagaacgccatgcgggtgtggtccaacatccctggactgaaaagcaagcacgcacctctgacccctaaagaagaggagtacctgcaggcccaggtgcggagcagaagcaagctggacgcccctaaggtggatctgctggtgaagaattgcctcctgcccctgagagagtacttcaagtatttcagccagaatagtctgcccctgggaggcagcggcggcggcgtgaaggaggtggtgaccctgcaggacgtggccgtggacttcacctgggaggagtggaggctgctgagccccccccagaaggagctgtacagggaggtgatgctggagaacgcccagaacctgctgagcgtgggcctgcccgcccccctggaggacgtgctgagctacctggagcagaggaagggcccctggatgctggagcagaagaggctgaggagctgctgccccggcgagatcaggctgggcggcccaagcagcggcgcccctcctcccagcggcggcagcccagccggctccccaacctctaccgaggagggcacctctgagtccgccacccccgagagcggccctggcacctccaccgagcccagcgagggcagcgcacccggcagccctgccggcagccccacctccacagaggagggaaccagcaccgagcccagcgaaggcagcgccccaggcaccagcaccgagcctagtgagcaggagattaaacggatcaacaagatcagaagaagacttgtgaaagacagcaacaccaagaaggccggcaagacaggccccatgaaaaccctgctggttagagtgatgacacccgatctgagagagcggctggaaaacctgagaaagaagcctgaaaatatcccccagcccatcagcaatacatctagagccaacctgaataagctgctgaccgattacaccgaaatgaagaaggcgatcctgcatgtgtactgggaagagttccagaaggaccctgtgggcctgatgagccgggtggcccagcctgccagcaagaagatcgatcagaacaagctgaaacctgagatggacgagaagggcaacctgaccaccgccggctttgcctgctctcagtgtggccagcccctgttcgtgtacaagctggagcaggtgtctgagaagggcaaggcttacaccaactacttcggacggtgcaatgtggccgagcacgaaaagctgatcctgctggcccagctgaagcccgagaaggatagcgacgaagccgtgacatatagcctgggaaagtttgggcagagggccctggatttctacagcattcatgtgaccaaggagtccacccaccccgtgaagcccctggcccagatcgccggaaacagatacgcctccggacctgtgggaaaggccctgagcgacgcatgtatgggcacaatcgcctccttcctgtctaagtaccaggacatcatcatcgaacaccagaaggtggtgaagggcaaccagaagagactggagagcctgcgggagctggccggcaaggaaaacctggaataccctagcgtgaccctgccacctcagcctcacaccaaggagggcgttgatgcctacaacgaagtgatcgcccgggtgcgaatgtgggtgaacctgaacctgtggcagaagctgaagctaagcagagatgatgccaagcctctgctgagactgaagggattcccttcctttcctctggtcgagagacaggccaacgaagtggactggtgggacatggtgtgtaacgtgaagaagctgatcaacgagaaaaaggaggatggcaaggtgttttggcagaatctggctggctacaagagacaggaagccctgagaccatacctgagcagcgaggaagatcggaagaagggaaagaaattcgctcggtaccagctgggcgacctgctgctgcacctggaaaagaagcacggcgaggactggggaaaggtgtacgacgaggcctgggagcggattgacaagaaagtggaaggcctgagcaagcacatcaagctggaagaggaacggagaagcgaggacgcccagagcaaggccgccctgaccgactggctgcgggctaaggccagcttcgtgatcgagggcctgaaggaggccgacaaggacgagttctgcagatgcgagctgaagctgcagaagtggtacggggacctgcggggaaagcccttcgccatcgaagccgagaacagcatcctggacatcagcggcttcagcaagcagtacaactgtgccttcatctggcagaaggacggcgtgaagaagctgaacctgtacctgatcatcaactacttcaagggcggcaagctgcggttcaagaagatcaaacctgaagccttcgaagccaacagattctacaccgtgatcaacaaaaagagcggcgagatcgtgcccatggaggtgaacttcaacttcgacgaccccaacctgatcatcctgcctctggcctttggcaagagacagggcagagaattcatctggaacgacctgctgtccctggaaaccggcagcctgaagctggccaacggaagagtgatcgagaagacactgtacaacagaagaacccggcaggatgagcctgccctgttcgtggccctgaccttcgagcggcgggaggtcctggactcctccaatatcaaaccaatgaacctgatcggcgtggcaagaggcgaaaacatccccgccgtgatcgccctgaccgaccccgagggctgcccactgagccggtttaaggatagcctgggaaacccaacccacatcctgagaatcggcgagagctataaggagaagcagcggaccatccaggccaagaaggaggtggagcagcggagagccggcggctacagccggaagtacgccagcaaagccaagaatctggcagacgatatggtgagaaacaccgctagagatctgctgtactacgccgtgacccaggatgccatgctgatcttcgccaacctgagccggggcttcggccggcagggcaagcggaccttcatggccgagagacagtacacacggatggaggactggctgaccgccaagctggcctacgagggcctgagcaagacctacctgtccaagacactggcccagtacacctccaagacatgcagcaactgtgggtttaccatcaccagcgccgactacgacagggtgctggagaagctgaagaagacagcaacaggctggatgaccacaattaacggcaaggagctgaaggtggagggccagattacctactacaacagatacaagagacagaacgtagtcaaggacctgtccgtcgagctggatagactgagcgaagaatctgtgaacaacgacatctcctcctggacaaagggcagaagcggagaagctctgagcctcctgaagaaaagattctcccatagacccgtgcaggagaagttcgtgtgcctgaactgcggcttcgagacacacgcagccgagcaagccgccctgaacatcgccagatcctggctgttcctgcggagccaggagtacaagaaataccagacaaacaagacaaccggcaacaccgataagagagccttcgtcgagacctggcagtccttttaccggaagaagcttaaggaggtgtggaaacctgccgtgcggtctggcggatctggcggaggctccaccagccccaagaaaaagagaaaagtctaagctgccttctgcggggcttgccttctggccatgcccttcttctctcccttgcacctgtacctcttggtctttgaataaagcctgagtaggaaggctagcaaaaaaaaaaaaaaaaaaaaaaaaaaaaaaaaaaaaaaaaaaaaaaaaaaaaaaaaaaaaaaaaaaaaaaaaaaaaaaaa

SEQ ID NO: 13562 - RNA, 5785 nt, synthetic construct
  source 1..5785: mol_type = other RNA
aggaaataagagagaaaagaagagtaagaagaaatataagagccaccatggcccctaagaagaagcgtaaagtgagccggatggaacgcctcgtctacgaggtgcggcagaagtgcagaaacatcgaggacatctgcatctcctgcggatctctgaacgtgaccctggagcacccactgttcatcggcggcatgtgccagaactgtaaaaactgttttctggagtgtgcctatcaatacgacgatgacggctaccagagctactgcaccatctgttgcggcggaagagaggtgctgatgtgtggaaataacaactgctgccggtgcttctgcgtggaatgcgtggacctgctggtgggccccggcgccgcccaggccgctattaaggaagatccttggaactgctacatgtgcggccacaagggcacatacggcctgctgagacggagagaggactggcctagcagactgcagatgttcttcgccaataaccacgaccaggagttcgacccccctaaggtgtaccctcccgtccccgccgagaagagaaagcccatccgggtcctgagcctgttcgatggcatcgccaccggtctgctggtgctgaaggacctgggcatccaggtggataggtacattgcctccgaggtgtgcgaggactccatcaccgtgggaatggtgcgtcatcagggcaagatcatgtacgtgggcgacgtgcggagcgtgacacagaagcatatccaggagtggggccctttcgacctggtgatcggcggcagcccttgcaatgacctgagcatcgtgaacccagcccggaagggcctgtacgagggaaccggcagactgttcttcgagttttacagactgctgcacgacgcccggcctaaggaaggcgacgaccggcccttcttttggctgttcgagaatgtggtggccatgggagtcagcgacaagcgggatattagccggttcctggagagcaaccccgtgatgatcgatgccaaggaagtgagcgccgcccaccgggccagatacttctggggcaatctgcctggcatgaacagacccctggccagcaccgtgaacgacaagctggagctgcaggagtgcctggagcacggccggatcgccaagttcagcaaggtgagaaccatcaccacccgaagcaacagcatcaaacaaggcaaggaccagcactttcctgtgttcatgaacgagaaggaggacatcctgtggtgtaccgagatggagagagtgttcgggttcccagtccactacacagatgtcagcaacatgtctagactggccagacagagactgctgggaagaagctggtccgtccctgtgatcagacacctgttcgcccctctgaaggagtacttcgcctgcgtgagcagcggcaacagcaacgccaacagccggggccccagcttctctagcggcctggtgccactgtccctgagagggagccacatgggccccatggagatctacaaaaccgtgagcgcctggaagcggcagcctgtgcgcgtgctgagcctgtttcggaatatcgataaagtcctgaaaagcctgggattcctggagagcggctctggctccggcggtggcaccctgaagtacgtggaggatgtgacaaacgtggtcagacgggatgtggagaagtggggccccttcgatctggtgtacggcagcacccaacccctgggcagctcttgtgaccggtgccctggctggtacatgtttcagttccaccggatcctgcagtacgccctgccgagacaggagtcccagcggccattcttttggattttcatggacaacttgctgctgaccgaggatgaccaggaaactaccactcggttcctgcagaccgaagccgtgaccctgcaggacgtgagaggccgggactaccagaacgccatgcgggtgtggtccaacatccctggactgaaaagcaagcacgcacctctgacccctaaagaagaggagtacctgcaggcccaggtgcggagcagaagcaagctggacgcccctaaggtggatctgctggtgaagaattgcctcctgcccctgagagagtacttcaagtatttcagccagaatagtctgcccctgggaggcagcggcggcggcatgctgcagaccgcctggaggcaggagcccgtgaccttcgaggacgtggccgtgtacttcacccagaacgagtggaccagcctggaccccgtgcagagggccctgtacagggaggtgatgctggagaactacgccaacgtggccagcctggccttccccttcaccacccccgtgctggtgagccagctggagcagggcgagaggccctggggcctggacccctgggagcccgtgggcagggagggcggcccaagcagcggcgcccctcctcccagcggcggcagcccagccggctccccaacctctaccgaggagggcacctctgagtccgccacccccgagagcggccctggcacctccaccgagcccagcgagggcagcgcacccggcagccctgccggcagccccacctccacagaggagggaaccagcaccgagcccagcgaaggcagcgccccaggcaccagcaccgagcctagtgagcaggagattaaacggatcaacaagatcagaagaagacttgtgaaagacagcaacaccaagaaggccggcaagacaggccccatgaaaaccctgctggttagagtgatgacacccgatctgagagagcggctggaaaacctgagaaagaagcctgaaaatatcccccagcccatcagcaatacatctagagccaacctgaataagctgctgaccgattacaccgaaatgaagaaggcgatcctgcatgtgtactgggaagagttccagaaggaccctgtgggcctgatgagccgggtggcccagcctgccagcaagaagatcgatcagaacaagctgaaacctgagatggacgagaagggcaacctgaccaccgccggctttgcctgctctcagtgtggccagcccctgttcgtgtacaagctggagcaggtgtctgagaagggcaaggcttacaccaactacttcggacggtgcaatgtggccgagcacgaaaagctgatcctgctggcccagctgaagcccgagaaggatagcgacgaagccgtgacatatagcctgggaaagtttgggcagagggccctggatttctacagcattcatgtgaccaaggagtccacccaccccgtgaagcccctggcccagatcgccggaaacagatacgcctccggacctgtgggaaaggccctgagcgacgcatgtatgggcacaatcgcctccttcctgtctaagtaccaggacatcatcatcgaacaccagaaggtggtgaagggcaaccagaagagactggagagcctgcgggagctggccggcaaggaaaacctggaataccctagcgtgaccctgccacctcagcctcacaccaaggagggcgttgatgcctacaacgaagtgatcgcccgggtgcgaatgtgggtgaacctgaacctgtggcagaagctgaagctaagcagagatgatgccaagcctctgctgagactgaagggattcccttcctttcctctggtcgagagacaggccaacgaagtggactggtgggacatggtgtgtaacgtgaagaagctgatcaacgagaaaaaggaggatggcaaggtgttttggcagaatctggctggctacaagagacaggaagccctgagaccatacctgagcagcgaggaagatcggaagaagggaaagaaattcgctcggtaccagctgggcgacctgctgctgcacctggaaaagaagcacggcgaggactggggaaaggtgtacgacgaggcctgggagcggattgacaagaaagtggaaggcctgagcaagcacatcaagctggaagaggaacggagaagcgaggacgcccagagcaaggccgccctgaccgactggctgcgggctaaggccagcttcgtgatcgagggcctgaaggaggccgacaaggacgagttctgcagatgcgagctgaagctgcagaagtggtacggggacctgcggggaaagcccttcgccatcgaagccgagaacagcatcctggacatcagcggcttcagcaagcagtacaactgtgccttcatctggcagaaggacggcgtgaagaagctgaacctgtacctgatcatcaactacttcaagggcggcaagctgcggttcaagaagatcaaacctgaagccttcgaagccaacagattctacaccgtgatcaacaaaaagagcggcgagatcgtgcccatggaggtgaacttcaacttcgacgaccccaacctgatcatcctgcctctggcctttggcaagagacagggcagagaattcatctggaacgacctgctgtccctggaaaccggcagcctgaagctggccaacggaagagtgatcgagaagacactgtacaacagaagaacccggcaggatgagcctgccctgttcgtggccctgaccttcgagcggcgggaggtcctggactcctccaatatcaaaccaatgaacctgatcggcgtggcaagaggcgaaaacatccccgccgtgatcgccctgaccgaccccgagggctgcccactgagccggtttaaggatagcctgggaaacccaacccacatcctgagaatcggcgagagctataaggagaagcagcggaccatccaggccaagaaggaggtggagcagcggagagccggcggctacagccggaagtacgccagcaaagccaagaatctggcagacgatatggtgagaaacaccgctagagatctgctgtactacgccgtgacccaggatgccatgctgatcttcgccaacctgagccggggcttcggccggcagggcaagcggaccttcatggccgagagacagtacacacggatggaggactggctgaccgccaagctggcctacgagggcctgagcaagacctacctgtccaagacactggcccagtacacctccaagacatgcagcaactgtgggtttaccatcaccagcgccgactacgacagggtgctggagaagctgaagaagacagcaacaggctggatgaccacaattaacggcaaggagctgaaggtggagggccagattacctactacaacagatacaagagacagaacgtagtcaaggacctgtccgtcgagctggatagactgagcgaagaatctgtgaacaacgacatctcctcctggacaaagggcagaagcggagaagctctgagcctcctgaagaaaagattctcccatagacccgtgcaggagaagttcgtgtgcctgaactgcggcttcgagacacacgcagccgagcaagccgccctgaacatcgccagatcctggctgttcctgcggagccaggagtacaagaaataccagacaaacaagacaaccggcaacaccgataagagagccttcgtcgagacctggcagtccttttaccggaagaagcttaaggaggtgtggaaacctgccgtgcggtctggcggatctggcggaggctccaccagccccaagaaaaagagaaaagtctaagctgccttctgcggggcttgccttctggccatgcccttcttctctcccttgcacctgtacctcttggtctttgaataaagcctgagtaggaaggctagcaaaaaaaaaaaaaaaaaaaaaaaaaaaaaaaaaaaaaaaaaaaaaaaaaaaaaaaaaaaaaaaaaaaaaaaaaaaaaaaa

SEQ ID NO: 13563 - RNA, 5785 nt, synthetic construct
  source 1..5785: mol_type = other RNA
aggaaataagagagaaaagaagagtaagaagaaatataagagccaccatggcccctaagaagaagcgtaaagtgagccggatggaacgcctcgtctacgaggtgcggcagaagtgcagaaacatcgaggacatctgcatctcctgcggatctctgaacgtgaccctggagcacccactgttcatcggcggcatgtgccagaactgtaaaaactgttttctggagtgtgcctatcaatacgacgatgacggctaccagagctactgcaccatctgttgcggcggaagagaggtgctgatgtgtggaaataacaactgctgccggtgcttctgcgtggaatgcgtggacctgctggtgggccccggcgccgcccaggccgctattaaggaagatccttggaactgctacatgtgcggccacaagggcacatacggcctgctgagacggagagaggactggcctagcagactgcagatgttcttcgccaataaccacgaccaggagttcgacccccctaaggtgtaccctcccgtccccgccgagaagagaaagcccatccgggtcctgagcctgttcgatggcatcgccaccggtctgctggtgctgaaggacctgggcatccaggtggataggtacattgcctccgaggtgtgcgaggactccatcaccgtgggaatggtgcgtcatcagggcaagatcatgtacgtgggcgacgtgcggagcgtgacacagaagcatatccaggagtggggccctttcgacctggtgatcggcggcagcccttgcaatgacctgagcatcgtgaacccagcccggaagggcctgtacgagggaaccggcagactgttcttcgagttttacagactgctgcacgacgcccggcctaaggaaggcgacgaccggcccttcttttggctgttcgagaatgtggtggccatgggagtcagcgacaagcgggatattagccggttcctggagagcaaccccgtgatgatcgatgccaaggaagtgagcgccgcccaccgggccagatacttctggggcaatctgcctggcatgaacagacccctggccagcaccgtgaacgacaagctggagctgcaggagtgcctggagcacggccggatcgccaagttcagcaaggtgagaaccatcaccacccgaagcaacagcatcaaacaaggcaaggaccagcactttcctgtgttcatgaacgagaaggaggacatcctgtggtgtaccgagatggagagagtgttcgggttcccagtccactacacagatgtcagcaacatgtctagactggccagacagagactgctgggaagaagctggtccgtccctgtgatcagacacctgttcgcccctctgaaggagtacttcgcctgcgtgagcagcggcaacagcaacgccaacagccggggccccagcttctctagcggcctggtgccactgtccctgagagggagccacatgggccccatggagatctacaaaaccgtgagcgcctggaagcggcagcctgtgcgcgtgctgagcctgtttcggaatatcgataaagtcctgaaaagcctgggattcctggagagcggctctggctccggcggtggcaccctgaagtacgtggaggatgtgacaaacgtggtcagacgggatgtggagaagtggggccccttcgatctggtgtacggcagcacccaacccctgggcagctcttgtgaccggtgccctggctggtacatgtttcagttccaccggatcctgcagtacgccctgccgagacaggagtcccagcggccattcttttggattttcatggacaacttgctgctgaccgaggatgaccaggaaactaccactcggttcctgcagaccgaagccgtgaccctgcaggacgtgagaggccgggactaccagaacgccatgcgggtgtggtccaacatccctggactgaaaagcaagcacgcacctctgacccctaaagaagaggagtacctgcaggcccaggtgcggagcagaagcaagctggacgcccctaaggtggatctgctggtgaagaattgcctcctgcccctgagagagtacttcaagtatttcagccagaatagtctgcccctgggaggcagcggcggcggcagccagggcaccgtgagcttcaaggacgtggccgtgaacttcacccaggaggagtggcagtacctggacctgccccagagggacctgtacaaggacgtgatgctggagaactacaccaacctgatcagcgtgggctaccagaccaccaagcccagcgtgatccacaagctggagcagggcgaggagccctggatggtggagagggagatccccaactggagctacgccgaggagacctggcagggcggcccaagcagcggcgcccctcctcccagcggcggcagcccagccggctccccaacctctaccgaggagggcacctctgagtccgccacccccgagagcggccctggcacctccaccgagcccagcgagggcagcgcacccggcagccctgccggcagccccacctccacagaggagggaaccagcaccgagcccagcgaaggcagcgccccaggcaccagcaccgagcctagtgagcaggagattaaacggatcaacaagatcagaagaagacttgtgaaagacagcaacaccaagaaggccggcaagacaggccccatgaaaaccctgctggttagagtgatgacacccgatctgagagagcggctggaaaacctgagaaagaagcctgaaaatatcccccagcccatcagcaatacatctagagccaacctgaataagctgctgaccgattacaccgaaatgaagaaggcgatcctgcatgtgtactgggaagagttccagaaggaccctgtgggcctgatgagccgggtggcccagcctgccagcaagaagatcgatcagaacaagctgaaacctgagatggacgagaagggcaacctgaccaccgccggctttgcctgctctcagtgtggccagcccctgttcgtgtacaagctggagcaggtgtctgagaagggcaaggcttacaccaactacttcggacggtgcaatgtggccgagcacgaaaagctgatcctgctggcccagctgaagcccgagaaggatagcgacgaagccgtgacatatagcctgggaaagtttgggcagagggccctggatttctacagcattcatgtgaccaaggagtccacccaccccgtgaagcccctggcccagatcgccggaaacagatacgcctccggacctgtgggaaaggccctgagcgacgcatgtatgggcacaatcgcctccttcctgtctaagtaccaggacatcatcatcgaacaccagaaggtggtgaagggcaaccagaagagactggagagcctgcgggagctggccggcaaggaaaacctggaataccctagcgtgaccctgccacctcagcctcacaccaaggagggcgttgatgcctacaacgaagtgatcgcccgggtgcgaatgtgggtgaacctgaacctgtggcagaagctgaagctaagcagagatgatgccaagcctctgctgagactgaagggattcccttcctttcctctggtcgagagacaggccaacgaagtggactggtgggacatggtgtgtaacgtgaagaagctgatcaacgagaaaaaggaggatggcaaggtgttttggcagaatctggctggctacaagagacaggaagccctgagaccatacctgagcagcgaggaagatcggaagaagggaaagaaattcgctcggtaccagctgggcgacctgctgctgcacctggaaaagaagcacggcgaggactggggaaaggtgtacgacgaggcctgggagcggattgacaagaaagtggaaggcctgagcaagcacatcaagctggaagaggaacggagaagcgaggacgcccagagcaaggccgccctgaccgactggctgcgggctaaggccagcttcgtgatcgagggcctgaaggaggccgacaaggacgagttctgcagatgcgagctgaagctgcagaagtggtacggggacctgcggggaaagcccttcgccatcgaagccgagaacagcatcctggacatcagcggcttcagcaagcagtacaactgtgccttcatctggcagaaggacggcgtgaagaagctgaacctgtacctgatcatcaactacttcaagggcggcaagctgcggttcaagaagatcaaacctgaagccttcgaagccaacagattctacaccgtgatcaacaaaaagagcggcgagatcgtgcccatggaggtgaacttcaacttcgacgaccccaacctgatcatcctgcctctggcctttggcaagagacagggcagagaattcatctggaacgacctgctgtccctggaaaccggcagcctgaagctggccaacggaagagtgatcgagaagacactgtacaacagaagaacccggcaggatgagcctgccctgttcgtggccctgaccttcgagcggcgggaggtcctggactcctccaatatcaaaccaatgaacctgatcggcgtggcaagaggcgaaaacatccccgccgtgatcgccctgaccgaccccgagggctgcccactgagccggtttaaggatagcctgggaaacccaacccacatcctgagaatcggcgagagctataaggagaagcagcggaccatccaggccaagaaggaggtggagcagcggagagccggcggctacagccggaagtacgccagcaaagccaagaatctggcagacgatatggtgagaaacaccgctagagatctgctgtactacgccgtgacccaggatgccatgctgatcttcgccaacctgagccggggcttcggccggcagggcaagcggaccttcatggccgagagacagtacacacggatggaggactggctgaccgccaagctggcctacgagggcctgagcaagacctacctgtccaagacactggcccagtacacctccaagacatgcagcaactgtgggtttaccatcaccagcgccgactacgacagggtgctggagaagctgaagaagacagcaacaggctggatgaccacaattaacggcaaggagctgaaggtggagggccagattacctactacaacagatacaagagacagaacgtagtcaaggacctgtccgtcgagctggatagactgagcgaagaatctgtgaacaacgacatctcctcctggacaaagggcagaagcggagaagctctgagcctcctgaagaaaagattctcccatagacccgtgcaggagaagttcgtgtgcctgaactgcggcttcgagacacacgcagccgagcaagccgccctgaacatcgccagatcctggctgttcctgcggagccaggagtacaagaaataccagacaaacaagacaaccggcaacaccgataagagagccttcgtcgagacctggcagtccttttaccggaagaagcttaaggaggtgtggaaacctgccgtgcggtctggcggatctggcggaggctccaccagccccaagaaaaagagaaaagtctaagctgccttctgcggggcttgccttctggccatgcccttcttctctcccttgcacctgtacctcttggtctttgaataaagcctgagtaggaaggctagcaaaaaaaaaaaaaaaaaaaaaaaaaaaaaaaaaaaaaaaaaaaaaaaaaaaaaaaaaaaaaaaaaaaaaaaaaaaaaaaa

SEQ ID NO: 13564 - RNA, 5785 nt, synthetic construct
  source 1..5785: mol_type = other RNA
aggaaataagagagaaaagaagagtaagaagaaatataagagccaccatggcccctaagaagaagcgtaaagtgagccggatggaacgcctcgtctacgaggtgcggcagaagtgcagaaacatcgaggacatctgcatctcctgcggatctctgaacgtgaccctggagcacccactgttcatcggcggcatgtgccagaactgtaaaaactgttttctggagtgtgcctatcaatacgacgatgacggctaccagagctactgcaccatctgttgcggcggaagagaggtgctgatgtgtggaaataacaactgctgccggtgcttctgcgtggaatgcgtggacctgctggtgggccccggcgccgcccaggccgctattaaggaagatccttggaactgctacatgtgcggccacaagggcacatacggcctgctgagacggagagaggactggcctagcagactgcagatgttcttcgccaataaccacgaccaggagttcgacccccctaaggtgtaccctcccgtccccgccgagaagagaaagcccatccgggtcctgagcctgttcgatggcatcgccaccggtctgctggtgctgaaggacctgggcatccaggtggataggtacattgcctccgaggtgtgcgaggactccatcaccgtgggaatggtgcgtcatcagggcaagatcatgtacgtgggcgacgtgcggagcgtgacacagaagcatatccaggagtggggccctttcgacctggtgatcggcggcagcccttgcaatgacctgagcatcgtgaacccagcccggaagggcctgtacgagggaaccggcagactgttcttcgagttttacagactgctgcacgacgcccggcctaaggaaggcgacgaccggcccttcttttggctgttcgagaatgtggtggccatgggagtcagcgacaagcgggatattagccggttcctggagagcaaccccgtgatgatcgatgccaaggaagtgagcgccgcccaccgggccagatacttctggggcaatctgcctggcatgaacagacccctggccagcaccgtgaacgacaagctggagctgcaggagtgcctggagcacggccggatcgccaagttcagcaaggtgagaaccatcaccacccgaagcaacagcatcaaacaaggcaaggaccagcactttcctgtgttcatgaacgagaaggaggacatcctgtggtgtaccgagatggagagagtgttcgggttcccagtccactacacagatgtcagcaacatgtctagactggccagacagagactgctgggaagaagctggtccgtccctgtgatcagacacctgttcgcccctctgaaggagtacttcgcctgcgtgagcagcggcaacagcaacgccaacagccggggccccagcttctctagcggcctggtgccactgtccctgagagggagccacatgggccccatggagatctacaaaaccgtgagcgcctggaagcggcagcctgtgcgcgtgctgagcctgtttcggaatatcgataaagtcctgaaaagcctgggattcctggagagcggctctggctccggcggtggcaccctgaagtacgtggaggatgtgacaaacgtggtcagacgggatgtggagaagtggggccccttcgatctggtgtacggcagcacccaacccctgggcagctcttgtgaccggtgccctggctggtacatgtttcagttccaccggatcctgcagtacgccctgccgagacaggagtcccagcggccattcttttggattttcatggacaacttgctgctgaccgaggatgaccaggaaactaccactcggttcctgcagaccgaagccgtgaccctgcaggacgtgagaggccgggactaccagaacgccatgcgggtgtggtccaacatccctggactgaaaagcaagcacgcacctctgacccctaaagaagaggagtacctgcaggcccaggtgcggagcagaagcaagctggacgcccctaaggtggatctgctggtgaagaattgcctcctgcccctgagagagtacttcaagtatttcagccagaatagtctgcccctgggaggcagcggcggcggcccccccagcctggtgaccttcggcgacgtggccatcgacttcagccaggaggagtgggagtggctgaacagcgcccagaggaccctgtacaggaacgtgatgctggagaactacaggaacctggccagcctgggcctgtgcggcagcaagcccgacatgatcagcagcctggagcagaggagggagccctggatcaccaagaggaagctgaccaggggcaggtgccccgacctgaaggccgtgggcggcccaagcagcggcgcccctcctcccagcggcggcagcccagccggctccccaacctctaccgaggagggcacctctgagtccgccacccccgagagcggccctggcacctccaccgagcccagcgagggcagcgcacccggcagccctgccggcagccccacctccacagaggagggaaccagcaccgagcccagcgaaggcagcgccccaggcaccagcaccgagcctagtgagcaggagattaaacggatcaacaagatcagaagaagacttgtgaaagacagcaacaccaagaaggccggcaagacaggccccatgaaaaccctgctggttagagtgatgacacccgatctgagagagcggctggaaaacctgagaaagaagcctgaaaatatcccccagcccatcagcaatacatctagagccaacctgaataagctgctgaccgattacaccgaaatgaagaaggcgatcctgcatgtgtactgggaagagttccagaaggaccctgtgggcctgatgagccgggtggcccagcctgccagcaagaagatcgatcagaacaagctgaaacctgagatggacgagaagggcaacctgaccaccgccggctttgcctgctctcagtgtggccagcccctgttcgtgtacaagctggagcaggtgtctgagaagggcaaggcttacaccaactacttcggacggtgcaatgtggccgagcacgaaaagctgatcctgctggcccagctgaagcccgagaaggatagcgacgaagccgtgacatatagcctgggaaagtttgggcagagggccctggatttctacagcattcatgtgaccaaggagtccacccaccccgtgaagcccctggcccagatcgccggaaacagatacgcctccggacctgtgggaaaggccctgagcgacgcatgtatgggcacaatcgcctccttcctgtctaagtaccaggacatcatcatcgaacaccagaaggtggtgaagggcaaccagaagagactggagagcctgcgggagctggccggcaaggaaaacctggaataccctagcgtgaccctgccacctcagcctcacaccaaggagggcgttgatgcctacaacgaagtgatcgcccgggtgcgaatgtgggtgaacctgaacctgtggcagaagctgaagctaagcagagatgatgccaagcctctgctgagactgaagggattcccttcctttcctctggtcgagagacaggccaacgaagtggactggtgggacatggtgtgtaacgtgaagaagctgatcaacgagaaaaaggaggatggcaaggtgttttggcagaatctggctggctacaagagacaggaagccctgagaccatacctgagcagcgaggaagatcggaagaagggaaagaaattcgctcggtaccagctgggcgacctgctgctgcacctggaaaagaagcacggcgaggactggggaaaggtgtacgacgaggcctgggagcggattgacaagaaagtggaaggcctgagcaagcacatcaagctggaagaggaacggagaagcgaggacgcccagagcaaggccgccctgaccgactggctgcgggctaaggccagcttcgtgatcgagggcctgaaggaggccgacaaggacgagttctgcagatgcgagctgaagctgcagaagtggtacggggacctgcggggaaagcccttcgccatcgaagccgagaacagcatcctggacatcagcggcttcagcaagcagtacaactgtgccttcatctggcagaaggacggcgtgaagaagctgaacctgtacctgatcatcaactacttcaagggcggcaagctgcggttcaagaagatcaaacctgaagccttcgaagccaacagattctacaccgtgatcaacaaaaagagcggcgagatcgtgcccatggaggtgaacttcaacttcgacgaccccaacctgatcatcctgcctctggcctttggcaagagacagggcagagaattcatctggaacgacctgctgtccctggaaaccggcagcctgaagctggccaacggaagagtgatcgagaagacactgtacaacagaagaacccggcaggatgagcctgccctgttcgtggccctgaccttcgagcggcgggaggtcctggactcctccaatatcaaaccaatgaacctgatcggcgtggcaagaggcgaaaacatccccgccgtgatcgccctgaccgaccccgagggctgcccactgagccggtttaaggatagcctgggaaacccaacccacatcctgagaatcggcgagagctataaggagaagcagcggaccatccaggccaagaaggaggtggagcagcggagagccggcggctacagccggaagtacgccagcaaagccaagaatctggcagacgatatggtgagaaacaccgctagagatctgctgtactacgccgtgacccaggatgccatgctgatcttcgccaacctgagccggggcttcggccggcagggcaagcggaccttcatggccgagagacagtacacacggatggaggactggctgaccgccaagctggcctacgagggcctgagcaagacctacctgtccaagacactggcccagtacacctccaagacatgcagcaactgtgggtttaccatcaccagcgccgactacgacagggtgctggagaagctgaagaagacagcaacaggctggatgaccacaattaacggcaaggagctgaaggtggagggccagattacctactacaacagatacaagagacagaacgtagtcaaggacctgtccgtcgagctggatagactgagcgaagaatctgtgaacaacgacatctcctcctggacaaagggcagaagcggagaagctctgagcctcctgaagaaaagattctcccatagacccgtgcaggagaagttcgtgtgcctgaactgcggcttcgagacacacgcagccgagcaagccgccctgaacatcgccagatcctggctgttcctgcggagccaggagtacaagaaataccagacaaacaagacaaccggcaacaccgataagagagccttcgtcgagacctggcagtccttttaccggaagaagcttaaggaggtgtggaaacctgccgtgcggtctggcggatctggcggaggctccaccagccccaagaaaaagagaaaagtctaagctgccttctgcggggcttgccttctggccatgcccttcttctctcccttgcacctgtacctcttggtctttgaataaagcctgagtaggaaggctagcaaaaaaaaaaaaaaaaaaaaaaaaaaaaaaaaaaaaaaaaaaaaaaaaaaaaaaaaaaaaaaaaaaaaaaaaaaaaaaaa

SEQ ID NO: 13565 - RNA, 5785 nt, synthetic construct
  source 1..5785: mol_type = other RNA
aggaaataagagagaaaagaagagtaagaagaaatataagagccaccatggcccctaagaagaagcgtaaagtgagccggatggaacgcctcgtctacgaggtgcggcagaagtgcagaaacatcgaggacatctgcatctcctgcggatctctgaacgtgaccctggagcacccactgttcatcggcggcatgtgccagaactgtaaaaactgttttctggagtgtgcctatcaatacgacgatgacggctaccagagctactgcaccatctgttgcggcggaagagaggtgctgatgtgtggaaataacaactgctgccggtgcttctgcgtggaatgcgtggacctgctggtgggccccggcgccgcccaggccgctattaaggaagatccttggaactgctacatgtgcggccacaagggcacatacggcctgctgagacggagagaggactggcctagcagactgcagatgttcttcgccaataaccacgaccaggagttcgacccccctaaggtgtaccctcccgtccccgccgagaagagaaagcccatccgggtcctgagcctgttcgatggcatcgccaccggtctgctggtgctgaaggacctgggcatccaggtggataggtacattgcctccgaggtgtgcgaggactccatcaccgtgggaatggtgcgtcatcagggcaagatcatgtacgtgggcgacgtgcggagcgtgacacagaagcatatccaggagtggggccctttcgacctggtgatcggcggcagcccttgcaatgacctgagcatcgtgaacccagcccggaagggcctgtacgagggaaccggcagactgttcttcgagttttacagactgctgcacgacgcccggcctaaggaaggcgacgaccggcccttcttttggctgttcgagaatgtggtggccatgggagtcagcgacaagcgggatattagccggttcctggagagcaaccccgtgatgatcgatgccaaggaagtgagcgccgcccaccgggccagatacttctggggcaatctgcctggcatgaacagacccctggccagcaccgtgaacgacaagctggagctgcaggagtgcctggagcacggccggatcgccaagttcagcaaggtgagaaccatcaccacccgaagcaacagcatcaaacaaggcaaggaccagcactttcctgtgttcatgaacgagaaggaggacatcctgtggtgtaccgagatggagagagtgttcgggttcccagtccactacacagatgtcagcaacatgtctagactggccagacagagactgctgggaagaagctggtccgtccctgtgatcagacacctgttcgcccctctgaaggagtacttcgcctgcgtgagcagcggcaacagcaacgccaacagccggggccccagcttctctagcggcctggtgccactgtccctgagagggagccacatgggccccatggagatctacaaaaccgtgagcgcctggaagcggcagcctgtgcgcgtgctgagcctgtttcggaatatcgataaagtcctgaaaagcctgggattcctggagagcggctctggctccggcggtggcaccctgaagtacgtggaggatgtgacaaacgtggtcagacgggatgtggagaagtggggccccttcgatctggtgtacggcagcacccaacccctgggcagctcttgtgaccggtgccctggctggtacatgtttcagttccaccggatcctgcagtacgccctgccgagacaggagtcccagcggccattcttttggattttcatggacaacttgctgctgaccgaggatgaccaggaaactaccactcggttcctgcagaccgaagccgtgaccctgcaggacgtgagaggccgggactaccagaacgccatgcgggtgtggtccaacatccctggactgaaaagcaagcacgcacctctgacccctaaagaagaggagtacctgcaggcccaggtgcggagcagaagcaagctggacgcccctaaggtggatctgctggtgaagaattgcctcctgcccctgagagagtacttcaagtatttcagccagaatagtctgcccctgggaggcagcggcggcggcatgagggtgaccttcgaggacatcgccgtgagcttcagccaggaggagtgggagtacctggacgaggagcagaaggagctgtacagggaggtgatgaaggagaactaccagaccctgatcagcctgggcgccggcagcctgaccttcacccccgagatcatcagccacatcgagaggggcgaggagccctacagcagggacgagcccggcagcggcgagagggagcccggcaagagcaggtgcggcggcccaagcagcggcgcccctcctcccagcggcggcagcccagccggctccccaacctctaccgaggagggcacctctgagtccgccacccccgagagcggccctggcacctccaccgagcccagcgagggcagcgcacccggcagccctgccggcagccccacctccacagaggagggaaccagcaccgagcccagcgaaggcagcgccccaggcaccagcaccgagcctagtgagcaggagattaaacggatcaacaagatcagaagaagacttgtgaaagacagcaacaccaagaaggccggcaagacaggccccatgaaaaccctgctggttagagtgatgacacccgatctgagagagcggctggaaaacctgagaaagaagcctgaaaatatcccccagcccatcagcaatacatctagagccaacctgaataagctgctgaccgattacaccgaaatgaagaaggcgatcctgcatgtgtactgggaagagttccagaaggaccctgtgggcctgatgagccgggtggcccagcctgccagcaagaagatcgatcagaacaagctgaaacctgagatggacgagaagggcaacctgaccaccgccggctttgcctgctctcagtgtggccagcccctgttcgtgtacaagctggagcaggtgtctgagaagggcaaggcttacaccaactacttcggacggtgcaatgtggccgagcacgaaaagctgatcctgctggcccagctgaagcccgagaaggatagcgacgaagccgtgacatatagcctgggaaagtttgggcagagggccctggatttctacagcattcatgtgaccaaggagtccacccaccccgtgaagcccctggcccagatcgccggaaacagatacgcctccggacctgtgggaaaggccctgagcgacgcatgtatgggcacaatcgcctccttcctgtctaagtaccaggacatcatcatcgaacaccagaaggtggtgaagggcaaccagaagagactggagagcctgcgggagctggccggcaaggaaaacctggaataccctagcgtgaccctgccacctcagcctcacaccaaggagggcgttgatgcctacaacgaagtgatcgcccgggtgcgaatgtgggtgaacctgaacctgtggcagaagctgaagctaagcagagatgatgccaagcctctgctgagactgaagggattcccttcctttcctctggtcgagagacaggccaacgaagtggactggtgggacatggtgtgtaacgtgaagaagctgatcaacgagaaaaaggaggatggcaaggtgttttggcagaatctggctggctacaagagacaggaagccctgagaccatacctgagcagcgaggaagatcggaagaagggaaagaaattcgctcggtaccagctgggcgacctgctgctgcacctggaaaagaagcacggcgaggactggggaaaggtgtacgacgaggcctgggagcggattgacaagaaagtggaaggcctgagcaagcacatcaagctggaagaggaacggagaagcgaggacgcccagagcaaggccgccctgaccgactggctgcgggctaaggccagcttcgtgatcgagggcctgaaggaggccgacaaggacgagttctgcagatgcgagctgaagctgcagaagtggtacggggacctgcggggaaagcccttcgccatcgaagccgagaacagcatcctggacatcagcggcttcagcaagcagtacaactgtgccttcatctggcagaaggacggcgtgaagaagctgaacctgtacctgatcatcaactacttcaagggcggcaagctgcggttcaagaagatcaaacctgaagccttcgaagccaacagattctacaccgtgatcaacaaaaagagcggcgagatcgtgcccatggaggtgaacttcaacttcgacgaccccaacctgatcatcctgcctctggcctttggcaagagacagggcagagaattcatctggaacgacctgctgtccctggaaaccggcagcctgaagctggccaacggaagagtgatcgagaagacactgtacaacagaagaacccggcaggatgagcctgccctgttcgtggccctgaccttcgagcggcgggaggtcctggactcctccaatatcaaaccaatgaacctgatcggcgtggcaagaggcgaaaacatccccgccgtgatcgccctgaccgaccccgagggctgcccactgagccggtttaaggatagcctgggaaacccaacccacatcctgagaatcggcgagagctataaggagaagcagcggaccatccaggccaagaaggaggtggagcagcggagagccggcggctacagccggaagtacgccagcaaagccaagaatctggcagacgatatggtgagaaacaccgctagagatctgctgtactacgccgtgacccaggatgccatgctgatcttcgccaacctgagccggggcttcggccggcagggcaagcggaccttcatggccgagagacagtacacacggatggaggactggctgaccgccaagctggcctacgagggcctgagcaagacctacctgtccaagacactggcccagtacacctccaagacatgcagcaactgtgggtttaccatcaccagcgccgactacgacagggtgctggagaagctgaagaagacagcaacaggctggatgaccacaattaacggcaaggagctgaaggtggagggccagattacctactacaacagatacaagagacagaacgtagtcaaggacctgtccgtcgagctggatagactgagcgaagaatctgtgaacaacgacatctcctcctggacaaagggcagaagcggagaagctctgagcctcctgaagaaaagattctcccatagacccgtgcaggagaagttcgtgtgcctgaactgcggcttcgagacacacgcagccgagcaagccgccctgaacatcgccagatcctggctgttcctgcggagccaggagtacaagaaataccagacaaacaagacaaccggcaacaccgataagagagccttcgtcgagacctggcagtccttttaccggaagaagcttaaggaggtgtggaaacctgccgtgcggtctggcggatctggcggaggctccaccagccccaagaaaaagagaaaagtctaagctgccttctgcggggcttgccttctggccatgcccttcttctctcccttgcacctgtacctcttggtctttgaataaagcctgagtaggaaggctagcaaaaaaaaaaaaaaaaaaaaaaaaaaaaaaaaaaaaaaaaaaaaaaaaaaaaaaaaaaaaaaaaaaaaaaaaaaaaaaaa

SEQ ID NO: 13566 - RNA, 5785 nt, synthetic construct
  source 1..5785: mol_type = other RNA
aggaaataagagagaaaagaagagtaagaagaaatataagagccaccatggcccctaagaagaagcgtaaagtgagccggatggaacgcctcgtctacgaggtgcggcagaagtgcagaaacatcgaggacatctgcatctcctgcggatctctgaacgtgaccctggagcacccactgttcatcggcggcatgtgccagaactgtaaaaactgttttctggagtgtgcctatcaatacgacgatgacggctaccagagctactgcaccatctgttgcggcggaagagaggtgctgatgtgtggaaataacaactgctgccggtgcttctgcgtggaatgcgtggacctgctggtgggccccggcgccgcccaggccgctattaaggaagatccttggaactgctacatgtgcggccacaagggcacatacggcctgctgagacggagagaggactggcctagcagactgcagatgttcttcgccaataaccacgaccaggagttcgacccccctaaggtgtaccctcccgtccccgccgagaagagaaagcccatccgggtcctgagcctgttcgatggcatcgccaccggtctgctggtgctgaaggacctgggcatccaggtggataggtacattgcctccgaggtgtgcgaggactccatcaccgtgggaatggtgcgtcatcagggcaagatcatgtacgtgggcgacgtgcggagcgtgacacagaagcatatccaggagtggggccctttcgacctggtgatcggcggcagcccttgcaatgacctgagcatcgtgaacccagcccggaagggcctgtacgagggaaccggcagactgttcttcgagttttacagactgctgcacgacgcccggcctaaggaaggcgacgaccggcccttcttttggctgttcgagaatgtggtggccatgggagtcagcgacaagcgggatattagccggttcctggagagcaaccccgtgatgatcgatgccaaggaagtgagcgccgcccaccgggccagatacttctggggcaatctgcctggcatgaacagacccctggccagcaccgtgaacgacaagctggagctgcaggagtgcctggagcacggccggatcgccaagttcagcaaggtgagaaccatcaccacccgaagcaacagcatcaaacaaggcaaggaccagcactttcctgtgttcatgaacgagaaggaggacatcctgtggtgtaccgagatggagagagtgttcgggttcccagtccactacacagatgtcagcaacatgtctagactggccagacagagactgctgggaagaagctggtccgtccctgtgatcagacacctgttcgcccctctgaaggagtacttcgcctgcgtgagcagcggcaacagcaacgccaacagccggggccccagcttctctagcggcctggtgccactgtccctgagagggagccacatgggccccatggagatctacaaaaccgtgagcgcctggaagcggcagcctgtgcgcgtgctgagcctgtttcggaatatcgataaagtcctgaaaagcctgggattcctggagagcggctctggctccggcggtggcaccctgaagtacgtggaggatgtgacaaacgtggtcagacgggatgtggagaagtggggccccttcgatctggtgtacggcagcacccaacccctgggcagctcttgtgaccggtgccctggctggtacatgtttcagttccaccggatcctgcagtacgccctgccgagacaggagtcccagcggccattcttttggattttcatggacaacttgctgctgaccgaggatgaccaggaaactaccactcggttcctgcagaccgaagccgtgaccctgcaggacgtgagaggccgggactaccagaacgccatgcgggtgtggtccaacatccctggactgaaaagcaagcacgcacctctgacccctaaagaagaggagtacctgcaggcccaggtgcggagcagaagcaagctggacgcccctaaggtggatctgctggtgaagaattgcctcctgcccctgagagagtacttcaagtatttcagccagaatagtctgcccctgggaggcagcggcggcggccaggacctggtgaccttcaaggacgtgagcgtggacttcaccagggaggagtggatgaggctggaccacccccagagggccctgtacagggacgtgatgctggagaactacaggaacctggtgctggtgagcctgggccaccccatcagcaagcccgacgtgatcagcaggctggagcagggcggcgtgccctgggtgctgaagaagggcgccaccggcagggccttcagcgacagggagaccggcggcccaagcagcggcgcccctcctcccagcggcggcagcccagccggctccccaacctctaccgaggagggcacctctgagtccgccacccccgagagcggccctggcacctccaccgagcccagcgagggcagcgcacccggcagccctgccggcagccccacctccacagaggagggaaccagcaccgagcccagcgaaggcagcgccccaggcaccagcaccgagcctagtgagcaggagattaaacggatcaacaagatcagaagaagacttgtgaaagacagcaacaccaagaaggccggcaagacaggccccatgaaaaccctgctggttagagtgatgacacccgatctgagagagcggctggaaaacctgagaaagaagcctgaaaatatcccccagcccatcagcaatacatctagagccaacctgaataagctgctgaccgattacaccgaaatgaagaaggcgatcctgcatgtgtactgggaagagttccagaaggaccctgtgggcctgatgagccgggtggcccagcctgccagcaagaagatcgatcagaacaagctgaaacctgagatggacgagaagggcaacctgaccaccgccggctttgcctgctctcagtgtggccagcccctgttcgtgtacaagctggagcaggtgtctgagaagggcaaggcttacaccaactacttcggacggtgcaatgtggccgagcacgaaaagctgatcctgctggcccagctgaagcccgagaaggatagcgacgaagccgtgacatatagcctgggaaagtttgggcagagggccctggatttctacagcattcatgtgaccaaggagtccacccaccccgtgaagcccctggcccagatcgccggaaacagatacgcctccggacctgtgggaaaggccctgagcgacgcatgtatgggcacaatcgcctccttcctgtctaagtaccaggacatcatcatcgaacaccagaaggtggtgaagggcaaccagaagagactggagagcctgcgggagctggccggcaaggaaaacctggaataccctagcgtgaccctgccacctcagcctcacaccaaggagggcgttgatgcctacaacgaagtgatcgcccgggtgcgaatgtgggtgaacctgaacctgtggcagaagctgaagctaagcagagatgatgccaagcctctgctgagactgaagggattcccttcctttcctctggtcgagagacaggccaacgaagtggactggtgggacatggtgtgtaacgtgaagaagctgatcaacgagaaaaaggaggatggcaaggtgttttggcagaatctggctggctacaagagacaggaagccctgagaccatacctgagcagcgaggaagatcggaagaagggaaagaaattcgctcggtaccagctgggcgacctgctgctgcacctggaaaagaagcacggcgaggactggggaaaggtgtacgacgaggcctgggagcggattgacaagaaagtggaaggcctgagcaagcacatcaagctggaagaggaacggagaagcgaggacgcccagagcaaggccgccctgaccgactggctgcgggctaaggccagcttcgtgatcgagggcctgaaggaggccgacaaggacgagttctgcagatgcgagctgaagctgcagaagtggtacggggacctgcggggaaagcccttcgccatcgaagccgagaacagcatcctggacatcagcggcttcagcaagcagtacaactgtgccttcatctggcagaaggacggcgtgaagaagctgaacctgtacctgatcatcaactacttcaagggcggcaagctgcggttcaagaagatcaaacctgaagccttcgaagccaacagattctacaccgtgatcaacaaaaagagcggcgagatcgtgcccatggaggtgaacttcaacttcgacgaccccaacctgatcatcctgcctctggcctttggcaagagacagggcagagaattcatctggaacgacctgctgtccctggaaaccggcagcctgaagctggccaacggaagagtgatcgagaagacactgtacaacagaagaacccggcaggatgagcctgccctgttcgtggccctgaccttcgagcggcgggaggtcctggactcctccaatatcaaaccaatgaacctgatcggcgtggcaagaggcgaaaacatccccgccgtgatcgccctgaccgaccccgagggctgcccactgagccggtttaaggatagcctgggaaacccaacccacatcctgagaatcggcgagagctataaggagaagcagcggaccatccaggccaagaaggaggtggagcagcggagagccggcggctacagccggaagtacgccagcaaagccaagaatctggcagacgatatggtgagaaacaccgctagagatctgctgtactacgccgtgacccaggatgccatgctgatcttcgccaacctgagccggggcttcggccggcagggcaagcggaccttcatggccgagagacagtacacacggatggaggactggctgaccgccaagctggcctacgagggcctgagcaagacctacctgtccaagacactggcccagtacacctccaagacatgcagcaactgtgggtttaccatcaccagcgccgactacgacagggtgctggagaagctgaagaagacagcaacaggctggatgaccacaattaacggcaaggagctgaaggtggagggccagattacctactacaacagatacaagagacagaacgtagtcaaggacctgtccgtcgagctggatagactgagcgaagaatctgtgaacaacgacatctcctcctggacaaagggcagaagcggagaagctctgagcctcctgaagaaaagattctcccatagacccgtgcaggagaagttcgtgtgcctgaactgcggcttcgagacacacgcagccgagcaagccgccctgaacatcgccagatcctggctgttcctgcggagccaggagtacaagaaataccagacaaacaagacaaccggcaacaccgataagagagccttcgtcgagacctggcagtccttttaccggaagaagcttaaggaggtgtggaaacctgccgtgcggtctggcggatctggcggaggctccaccagccccaagaaaaagagaaaagtctaagctgccttctgcggggcttgccttctggccatgcccttcttctctcccttgcacctgtacctcttggtctttgaataaagcctgagtaggaaggctagcaaaaaaaaaaaaaaaaaaaaaaaaaaaaaaaaaaaaaaaaaaaaaaaaaaaaaaaaaaaaaaaaaaaaaaaaaaaaaaaa

SEQ ID NO: 13567 - RNA, 5785 nt, synthetic construct
  source 1..5785: mol_type = other RNA
aggaaataagagagaaaagaagagtaagaagaaatataagagccaccatggcccctaagaagaagcgtaaagtgagccggatggaacgcctcgtctacgaggtgcggcagaagtgcagaaacatcgaggacatctgcatctcctgcggatctctgaacgtgaccctggagcacccactgttcatcggcggcatgtgccagaactgtaaaaactgttttctggagtgtgcctatcaatacgacgatgacggctaccagagctactgcaccatctgttgcggcggaagagaggtgctgatgtgtggaaataacaactgctgccggtgcttctgcgtggaatgcgtggacctgctggtgggccccggcgccgcccaggccgctattaaggaagatccttggaactgctacatgtgcggccacaagggcacatacggcctgctgagacggagagaggactggcctagcagactgcagatgttcttcgccaataaccacgaccaggagttcgacccccctaaggtgtaccctcccgtccccgccgagaagagaaagcccatccgggtcctgagcctgttcgatggcatcgccaccggtctgctggtgctgaaggacctgggcatccaggtggataggtacattgcctccgaggtgtgcgaggactccatcaccgtgggaatggtgcgtcatcagggcaagatcatgtacgtgggcgacgtgcggagcgtgacacagaagcatatccaggagtggggccctttcgacctggtgatcggcggcagcccttgcaatgacctgagcatcgtgaacccagcccggaagggcctgtacgagggaaccggcagactgttcttcgagttttacagactgctgcacgacgcccggcctaaggaaggcgacgaccggcccttcttttggctgttcgagaatgtggtggccatgggagtcagcgacaagcgggatattagccggttcctggagagcaaccccgtgatgatcgatgccaaggaagtgagcgccgcccaccgggccagatacttctggggcaatctgcctggcatgaacagacccctggccagcaccgtgaacgacaagctggagctgcaggagtgcctggagcacggccggatcgccaagttcagcaaggtgagaaccatcaccacccgaagcaacagcatcaaacaaggcaaggaccagcactttcctgtgttcatgaacgagaaggaggacatcctgtggtgtaccgagatggagagagtgttcgggttcccagtccactacacagatgtcagcaacatgtctagactggccagacagagactgctgggaagaagctggtccgtccctgtgatcagacacctgttcgcccctctgaaggagtacttcgcctgcgtgagcagcggcaacagcaacgccaacagccggggccccagcttctctagcggcctggtgccactgtccctgagagggagccacatgggccccatggagatctacaaaaccgtgagcgcctggaagcggcagcctgtgcgcgtgctgagcctgtttcggaatatcgataaagtcctgaaaagcctgggattcctggagagcggctctggctccggcggtggcaccctgaagtacgtggaggatgtgacaaacgtggtcagacgggatgtggagaagtggggccccttcgatctggtgtacggcagcacccaacccctgggcagctcttgtgaccggtgccctggctggtacatgtttcagttccaccggatcctgcagtacgccctgccgagacaggagtcccagcggccattcttttggattttcatggacaacttgctgctgaccgaggatgaccaggaaactaccactcggttcctgcagaccgaagccgtgaccctgcaggacgtgagaggccgggactaccagaacgccatgcgggtgtggtccaacatccctggactgaaaagcaagcacgcacctctgacccctaaagaagaggagtacctgcaggcccaggtgcggagcagaagcaagctggacgcccctaaggtggatctgctggtgaagaattgcctcctgcccctgagagagtacttcaagtatttcagccagaatagtctgcccctgggaggcagcggcggcggcgaccaggagagcctgaccctggaggacgtggccgtggacttcagcagggaggagtggcagctgctggcccccgcccagaaggacctgtacagggacgtgatgctggagaactacaggaacctggtgagcctgggctaccaggccagcacccccgacgccctgtgcatgctggagaggggcgagggcccctgggccaccggcgaggccgtgaggggcggcgccaggcccgagaccaggaaggtgggcggcccaagcagcggcgcccctcctcccagcggcggcagcccagccggctccccaacctctaccgaggagggcacctctgagtccgccacccccgagagcggccctggcacctccaccgagcccagcgagggcagcgcacccggcagccctgccggcagccccacctccacagaggagggaaccagcaccgagcccagcgaaggcagcgccccaggcaccagcaccgagcctagtgagcaggagattaaacggatcaacaagatcagaagaagacttgtgaaagacagcaacaccaagaaggccggcaagacaggccccatgaaaaccctgctggttagagtgatgacacccgatctgagagagcggctggaaaacctgagaaagaagcctgaaaatatcccccagcccatcagcaatacatctagagccaacctgaataagctgctgaccgattacaccgaaatgaagaaggcgatcctgcatgtgtactgggaagagttccagaaggaccctgtgggcctgatgagccgggtggcccagcctgccagcaagaagatcgatcagaacaagctgaaacctgagatggacgagaagggcaacctgaccaccgccggctttgcctgctctcagtgtggccagcccctgttcgtgtacaagctggagcaggtgtctgagaagggcaaggcttacaccaactacttcggacggtgcaatgtggccgagcacgaaaagctgatcctgctggcccagctgaagcccgagaaggatagcgacgaagccgtgacatatagcctgggaaagtttgggcagagggccctggatttctacagcattcatgtgaccaaggagtccacccaccccgtgaagcccctggcccagatcgccggaaacagatacgcctccggacctgtgggaaaggccctgagcgacgcatgtatgggcacaatcgcctccttcctgtctaagtaccaggacatcatcatcgaacaccagaaggtggtgaagggcaaccagaagagactggagagcctgcgggagctggccggcaaggaaaacctggaataccctagcgtgaccctgccacctcagcctcacaccaaggagggcgttgatgcctacaacgaagtgatcgcccgggtgcgaatgtgggtgaacctgaacctgtggcagaagctgaagctaagcagagatgatgccaagcctctgctgagactgaagggattcccttcctttcctctggtcgagagacaggccaacgaagtggactggtgggacatggtgtgtaacgtgaagaagctgatcaacgagaaaaaggaggatggcaaggtgttttggcagaatctggctggctacaagagacaggaagccctgagaccatacctgagcagcgaggaagatcggaagaagggaaagaaattcgctcggtaccagctgggcgacctgctgctgcacctggaaaagaagcacggcgaggactggggaaaggtgtacgacgaggcctgggagcggattgacaagaaagtggaaggcctgagcaagcacatcaagctggaagaggaacggagaagcgaggacgcccagagcaaggccgccctgaccgactggctgcgggctaaggccagcttcgtgatcgagggcctgaaggaggccgacaaggacgagttctgcagatgcgagctgaagctgcagaagtggtacggggacctgcggggaaagcccttcgccatcgaagccgagaacagcatcctggacatcagcggcttcagcaagcagtacaactgtgccttcatctggcagaaggacggcgtgaagaagctgaacctgtacctgatcatcaactacttcaagggcggcaagctgcggttcaagaagatcaaacctgaagccttcgaagccaacagattctacaccgtgatcaacaaaaagagcggcgagatcgtgcccatggaggtgaacttcaacttcgacgaccccaacctgatcatcctgcctctggcctttggcaagagacagggcagagaattcatctggaacgacctgctgtccctggaaaccggcagcctgaagctggccaacggaagagtgatcgagaagacactgtacaacagaagaacccggcaggatgagcctgccctgttcgtggccctgaccttcgagcggcgggaggtcctggactcctccaatatcaaaccaatgaacctgatcggcgtggcaagaggcgaaaacatccccgccgtgatcgccctgaccgaccccgagggctgcccactgagccggtttaaggatagcctgggaaacccaacccacatcctgagaatcggcgagagctataaggagaagcagcggaccatccaggccaagaaggaggtggagcagcggagagccggcggctacagccggaagtacgccagcaaagccaagaatctggcagacgatatggtgagaaacaccgctagagatctgctgtactacgccgtgacccaggatgccatgctgatcttcgccaacctgagccggggcttcggccggcagggcaagcggaccttcatggccgagagacagtacacacggatggaggactggctgaccgccaagctggcctacgagggcctgagcaagacctacctgtccaagacactggcccagtacacctccaagacatgcagcaactgtgggtttaccatcaccagcgccgactacgacagggtgctggagaagctgaagaagacagcaacaggctggatgaccacaattaacggcaaggagctgaaggtggagggccagattacctactacaacagatacaagagacagaacgtagtcaaggacctgtccgtcgagctggatagactgagcgaagaatctgtgaacaacgacatctcctcctggacaaagggcagaagcggagaagctctgagcctcctgaagaaaagattctcccatagacccgtgcaggagaagttcgtgtgcctgaactgcggcttcgagacacacgcagccgagcaagccgccctgaacatcgccagatcctggctgttcctgcggagccaggagtacaagaaataccagacaaacaagacaaccggcaacaccgataagagagccttcgtcgagacctggcagtccttttaccggaagaagcttaaggaggtgtggaaacctgccgtgcggtctggcggatctggcggaggctccaccagccccaagaaaaagagaaaagtctaagctgccttctgcggggcttgccttctggccatgcccttcttctctcccttgcacctgtacctcttggtctttgaataaagcctgagtaggaaggctagcaaaaaaaaaaaaaaaaaaaaaaaaaaaaaaaaaaaaaaaaaaaaaaaaaaaaaaaaaaaaaaaaaaaaaaaaaaaaaaaa

SEQ ID NO: 13568 - RNA, 5785 nt, synthetic construct
  source 1..5785: mol_type = other RNA
aggaaataagagagaaaagaagagtaagaagaaatataagagccaccatggcccctaagaagaagcgtaaagtgagccggatggaacgcctcgtctacgaggtgcggcagaagtgcagaaacatcgaggacatctgcatctcctgcggatctctgaacgtgaccctggagcacccactgttcatcggcggcatgtgccagaactgtaaaaactgttttctggagtgtgcctatcaatacgacgatgacggctaccagagctactgcaccatctgttgcggcggaagagaggtgctgatgtgtggaaataacaactgctgccggtgcttctgcgtggaatgcgtggacctgctggtgggccccggcgccgcccaggccgctattaaggaagatccttggaactgctacatgtgcggccacaagggcacatacggcctgctgagacggagagaggactggcctagcagactgcagatgttcttcgccaataaccacgaccaggagttcgacccccctaaggtgtaccctcccgtccccgccgagaagagaaagcccatccgggtcctgagcctgttcgatggcatcgccaccggtctgctggtgctgaaggacctgggcatccaggtggataggtacattgcctccgaggtgtgcgaggactccatcaccgtgggaatggtgcgtcatcagggcaagatcatgtacgtgggcgacgtgcggagcgtgacacagaagcatatccaggagtggggccctttcgacctggtgatcggcggcagcccttgcaatgacctgagcatcgtgaacccagcccggaagggcctgtacgagggaaccggcagactgttcttcgagttttacagactgctgcacgacgcccggcctaaggaaggcgacgaccggcccttcttttggctgttcgagaatgtggtggccatgggagtcagcgacaagcgggatattagccggttcctggagagcaaccccgtgatgatcgatgccaaggaagtgagcgccgcccaccgggccagatacttctggggcaatctgcctggcatgaacagacccctggccagcaccgtgaacgacaagctggagctgcaggagtgcctggagcacggccggatcgccaagttcagcaaggtgagaaccatcaccacccgaagcaacagcatcaaacaaggcaaggaccagcactttcctgtgttcatgaacgagaaggaggacatcctgtggtgtaccgagatggagagagtgttcgggttcccagtccactacacagatgtcagcaacatgtctagactggccagacagagactgctgggaagaagctggtccgtccctgtgatcagacacctgttcgcccctctgaaggagtacttcgcctgcgtgagcagcggcaacagcaacgccaacagccggggccccagcttctctagcggcctggtgccactgtccctgagagggagccacatgggccccatggagatctacaaaaccgtgagcgcctggaagcggcagcctgtgcgcgtgctgagcctgtttcggaatatcgataaagtcctgaaaagcctgggattcctggagagcggctctggctccggcggtggcaccctgaagtacgtggaggatgtgacaaacgtggtcagacgggatgtggagaagtggggccccttcgatctggtgtacggcagcacccaacccctgggcagctcttgtgaccggtgccctggctggtacatgtttcagttccaccggatcctgcagtacgccctgccgagacaggagtcccagcggccattcttttggattttcatggacaacttgctgctgaccgaggatgaccaggaaactaccactcggttcctgcagaccgaagccgtgaccctgcaggacgtgagaggccgggactaccagaacgccatgcgggtgtggtccaacatccctggactgaaaagcaagcacgcacctctgacccctaaagaagaggagtacctgcaggcccaggtgcggagcagaagcaagctggacgcccctaaggtggatctgctggtgaagaattgcctcctgcccctgagagagtacttcaagtatttcagccagaatagtctgcccctgggaggcagcggcggcggccccaggggcctggtgaccttcaaggacgtggccgtggacttcacccaggaggagtggggcctgctggaccacaaccagaaggagctgtacaaggaggtgatgctggagaacgccaggaacctgctgagcctgggcctgcccgtgcccagggaggacgtgatcagctacttcgagcagagggaggccccctggatgctggagcaggagggcctgaggagcaggtgcctggagggcgagatcaggggcggcccaagcagcggcgcccctcctcccagcggcggcagcccagccggctccccaacctctaccgaggagggcacctctgagtccgccacccccgagagcggccctggcacctccaccgagcccagcgagggcagcgcacccggcagccctgccggcagccccacctccacagaggagggaaccagcaccgagcccagcgaaggcagcgccccaggcaccagcaccgagcctagtgagcaggagattaaacggatcaacaagatcagaagaagacttgtgaaagacagcaacaccaagaaggccggcaagacaggccccatgaaaaccctgctggttagagtgatgacacccgatctgagagagcggctggaaaacctgagaaagaagcctgaaaatatcccccagcccatcagcaatacatctagagccaacctgaataagctgctgaccgattacaccgaaatgaagaaggcgatcctgcatgtgtactgggaagagttccagaaggaccctgtgggcctgatgagccgggtggcccagcctgccagcaagaagatcgatcagaacaagctgaaacctgagatggacgagaagggcaacctgaccaccgccggctttgcctgctctcagtgtggccagcccctgttcgtgtacaagctggagcaggtgtctgagaagggcaaggcttacaccaactacttcggacggtgcaatgtggccgagcacgaaaagctgatcctgctggcccagctgaagcccgagaaggatagcgacgaagccgtgacatatagcctgggaaagtttgggcagagggccctggatttctacagcattcatgtgaccaaggagtccacccaccccgtgaagcccctggcccagatcgccggaaacagatacgcctccggacctgtgggaaaggccctgagcgacgcatgtatgggcacaatcgcctccttcctgtctaagtaccaggacatcatcatcgaacaccagaaggtggtgaagggcaaccagaagagactggagagcctgcgggagctggccggcaaggaaaacctggaataccctagcgtgaccctgccacctcagcctcacaccaaggagggcgttgatgcctacaacgaagtgatcgcccgggtgcgaatgtgggtgaacctgaacctgtggcagaagctgaagctaagcagagatgatgccaagcctctgctgagactgaagggattcccttcctttcctctggtcgagagacaggccaacgaagtggactggtgggacatggtgtgtaacgtgaagaagctgatcaacgagaaaaaggaggatggcaaggtgttttggcagaatctggctggctacaagagacaggaagccctgagaccatacctgagcagcgaggaagatcggaagaagggaaagaaattcgctcggtaccagctgggcgacctgctgctgcacctggaaaagaagcacggcgaggactggggaaaggtgtacgacgaggcctgggagcggattgacaagaaagtggaaggcctgagcaagcacatcaagctggaagaggaacggagaagcgaggacgcccagagcaaggccgccctgaccgactggctgcgggctaaggccagcttcgtgatcgagggcctgaaggaggccgacaaggacgagttctgcagatgcgagctgaagctgcagaagtggtacggggacctgcggggaaagcccttcgccatcgaagccgagaacagcatcctggacatcagcggcttcagcaagcagtacaactgtgccttcatctggcagaaggacggcgtgaagaagctgaacctgtacctgatcatcaactacttcaagggcggcaagctgcggttcaagaagatcaaacctgaagccttcgaagccaacagattctacaccgtgatcaacaaaaagagcggcgagatcgtgcccatggaggtgaacttcaacttcgacgaccccaacctgatcatcctgcctctggcctttggcaagagacagggcagagaattcatctggaacgacctgctgtccctggaaaccggcagcctgaagctggccaacggaagagtgatcgagaagacactgtacaacagaagaacccggcaggatgagcctgccctgttcgtggccctgaccttcgagcggcgggaggtcctggactcctccaatatcaaaccaatgaacctgatcggcgtggcaagaggcgaaaacatccccgccgtgatcgccctgaccgaccccgagggctgcccactgagccggtttaaggatagcctgggaaacccaacccacatcctgagaatcggcgagagctataaggagaagcagcggaccatccaggccaagaaggaggtggagcagcggagagccggcggctacagccggaagtacgccagcaaagccaagaatctggcagacgatatggtgagaaacaccgctagagatctgctgtactacgccgtgacccaggatgccatgctgatcttcgccaacctgagccggggcttcggccggcagggcaagcggaccttcatggccgagagacagtacacacggatggaggactggctgaccgccaagctggcctacgagggcctgagcaagacctacctgtccaagacactggcccagtacacctccaagacatgcagcaactgtgggtttaccatcaccagcgccgactacgacagggtgctggagaagctgaagaagacagcaacaggctggatgaccacaattaacggcaaggagctgaaggtggagggccagattacctactacaacagatacaagagacagaacgtagtcaaggacctgtccgtcgagctggatagactgagcgaagaatctgtgaacaacgacatctcctcctggacaaagggcagaagcggagaagctctgagcctcctgaagaaaagattctcccatagacccgtgcaggagaagttcgtgtgcctgaactgcggcttcgagacacacgcagccgagcaagccgccctgaacatcgccagatcctggctgttcctgcggagccaggagtacaagaaataccagacaaacaagacaaccggcaacaccgataagagagccttcgtcgagacctggcagtccttttaccggaagaagcttaaggaggtgtggaaacctgccgtgcggtctggcggatctggcggaggctccaccagccccaagaaaaagagaaaagtctaagctgccttctgcggggcttgccttctggccatgcccttcttctctcccttgcacctgtacctcttggtctttgaataaagcctgagtaggaaggctagcaaaaaaaaaaaaaaaaaaaaaaaaaaaaaaaaaaaaaaaaaaaaaaaaaaaaaaaaaaaaaaaaaaaaaaaaaaaaaaaa

SEQ ID NO: 13569 - RNA, 5785 nt, synthetic construct
  source 1..5785: mol_type = other RNA
aggaaataagagagaaaagaagagtaagaagaaatataagagccaccatggcccctaagaagaagcgtaaagtgagccggatggaacgcctcgtctacgaggtgcggcagaagtgcagaaacatcgaggacatctgcatctcctgcggatctctgaacgtgaccctggagcacccactgttcatcggcggcatgtgccagaactgtaaaaactgttttctggagtgtgcctatcaatacgacgatgacggctaccagagctactgcaccatctgttgcggcggaagagaggtgctgatgtgtggaaataacaactgctgccggtgcttctgcgtggaatgcgtggacctgctggtgggccccggcgccgcccaggccgctattaaggaagatccttggaactgctacatgtgcggccacaagggcacatacggcctgctgagacggagagaggactggcctagcagactgcagatgttcttcgccaataaccacgaccaggagttcgacccccctaaggtgtaccctcccgtccccgccgagaagagaaagcccatccgggtcctgagcctgttcgatggcatcgccaccggtctgctggtgctgaaggacctgggcatccaggtggataggtacattgcctccgaggtgtgcgaggactccatcaccgtgggaatggtgcgtcatcagggcaagatcatgtacgtgggcgacgtgcggagcgtgacacagaagcatatccaggagtggggccctttcgacctggtgatcggcggcagcccttgcaatgacctgagcatcgtgaacccagcccggaagggcctgtacgagggaaccggcagactgttcttcgagttttacagactgctgcacgacgcccggcctaaggaaggcgacgaccggcccttcttttggctgttcgagaatgtggtggccatgggagtcagcgacaagcgggatattagccggttcctggagagcaaccccgtgatgatcgatgccaaggaagtgagcgccgcccaccgggccagatacttctggggcaatctgcctggcatgaacagacccctggccagcaccgtgaacgacaagctggagctgcaggagtgcctggagcacggccggatcgccaagttcagcaaggtgagaaccatcaccacccgaagcaacagcatcaaacaaggcaaggaccagcactttcctgtgttcatgaacgagaaggaggacatcctgtggtgtaccgagatggagagagtgttcgggttcccagtccactacacagatgtcagcaacatgtctagactggccagacagagactgctgggaagaagctggtccgtccctgtgatcagacacctgttcgcccctctgaaggagtacttcgcctgcgtgagcagcggcaacagcaacgccaacagccggggccccagcttctctagcggcctggtgccactgtccctgagagggagccacatgggccccatggagatctacaaaaccgtgagcgcctggaagcggcagcctgtgcgcgtgctgagcctgtttcggaatatcgataaagtcctgaaaagcctgggattcctggagagcggctctggctccggcggtggcaccctgaagtacgtggaggatgtgacaaacgtggtcagacgggatgtggagaagtggggccccttcgatctggtgtacggcagcacccaacccctgggcagctcttgtgaccggtgccctggctggtacatgtttcagttccaccggatcctgcagtacgccctgccgagacaggagtcccagcggccattcttttggattttcatggacaacttgctgctgaccgaggatgaccaggaaactaccactcggttcctgcagaccgaagccgtgaccctgcaggacgtgagaggccgggactaccagaacgccatgcgggtgtggtccaacatccctggactgaaaagcaagcacgcacctctgacccctaaagaagaggagtacctgcaggcccaggtgcggagcagaagcaagctggacgcccctaaggtggatctgctggtgaagaattgcctcctgcccctgagagagtacttcaagtatttcagccagaatagtctgcccctgggaggcagcggcggcggcatggacgccgtgaccttcatggacgtgcacgtgaacttcagccaggaggagtgggccctgctgaaccccagccagaagagcctgtacaaggacgtgatgctggagacctactggaacctgacctgcatcggctacgagtgggaggaccacaacagcgaggagtgctgccagagcagcaggaggcacggcaggtacttcaacagcagccagtacagcacctgcaaggccaagggctacggcaagggcggcccaagcagcggcgcccctcctcccagcggcggcagcccagccggctccccaacctctaccgaggagggcacctctgagtccgccacccccgagagcggccctggcacctccaccgagcccagcgagggcagcgcacccggcagccctgccggcagccccacctccacagaggagggaaccagcaccgagcccagcgaaggcagcgccccaggcaccagcaccgagcctagtgagcaggagattaaacggatcaacaagatcagaagaagacttgtgaaagacagcaacaccaagaaggccggcaagacaggccccatgaaaaccctgctggttagagtgatgacacccgatctgagagagcggctggaaaacctgagaaagaagcctgaaaatatcccccagcccatcagcaatacatctagagccaacctgaataagctgctgaccgattacaccgaaatgaagaaggcgatcctgcatgtgtactgggaagagttccagaaggaccctgtgggcctgatgagccgggtggcccagcctgccagcaagaagatcgatcagaacaagctgaaacctgagatggacgagaagggcaacctgaccaccgccggctttgcctgctctcagtgtggccagcccctgttcgtgtacaagctggagcaggtgtctgagaagggcaaggcttacaccaactacttcggacggtgcaatgtggccgagcacgaaaagctgatcctgctggcccagctgaagcccgagaaggatagcgacgaagccgtgacatatagcctgggaaagtttgggcagagggccctggatttctacagcattcatgtgaccaaggagtccacccaccccgtgaagcccctggcccagatcgccggaaacagatacgcctccggacctgtgggaaaggccctgagcgacgcatgtatgggcacaatcgcctccttcctgtctaagtaccaggacatcatcatcgaacaccagaaggtggtgaagggcaaccagaagagactggagagcctgcgggagctggccggcaaggaaaacctggaataccctagcgtgaccctgccacctcagcctcacaccaaggagggcgttgatgcctacaacgaagtgatcgcccgggtgcgaatgtgggtgaacctgaacctgtggcagaagctgaagctaagcagagatgatgccaagcctctgctgagactgaagggattcccttcctttcctctggtcgagagacaggccaacgaagtggactggtgggacatggtgtgtaacgtgaagaagctgatcaacgagaaaaaggaggatggcaaggtgttttggcagaatctggctggctacaagagacaggaagccctgagaccatacctgagcagcgaggaagatcggaagaagggaaagaaattcgctcggtaccagctgggcgacctgctgctgcacctggaaaagaagcacggcgaggactggggaaaggtgtacgacgaggcctgggagcggattgacaagaaagtggaaggcctgagcaagcacatcaagctggaagaggaacggagaagcgaggacgcccagagcaaggccgccctgaccgactggctgcgggctaaggccagcttcgtgatcgagggcctgaaggaggccgacaaggacgagttctgcagatgcgagctgaagctgcagaagtggtacggggacctgcggggaaagcccttcgccatcgaagccgagaacagcatcctggacatcagcggcttcagcaagcagtacaactgtgccttcatctggcagaaggacggcgtgaagaagctgaacctgtacctgatcatcaactacttcaagggcggcaagctgcggttcaagaagatcaaacctgaagccttcgaagccaacagattctacaccgtgatcaacaaaaagagcggcgagatcgtgcccatggaggtgaacttcaacttcgacgaccccaacctgatcatcctgcctctggcctttggcaagagacagggcagagaattcatctggaacgacctgctgtccctggaaaccggcagcctgaagctggccaacggaagagtgatcgagaagacactgtacaacagaagaacccggcaggatgagcctgccctgttcgtggccctgaccttcgagcggcgggaggtcctggactcctccaatatcaaaccaatgaacctgatcggcgtggcaagaggcgaaaacatccccgccgtgatcgccctgaccgaccccgagggctgcccactgagccggtttaaggatagcctgggaaacccaacccacatcctgagaatcggcgagagctataaggagaagcagcggaccatccaggccaagaaggaggtggagcagcggagagccggcggctacagccggaagtacgccagcaaagccaagaatctggcagacgatatggtgagaaacaccgctagagatctgctgtactacgccgtgacccaggatgccatgctgatcttcgccaacctgagccggggcttcggccggcagggcaagcggaccttcatggccgagagacagtacacacggatggaggactggctgaccgccaagctggcctacgagggcctgagcaagacctacctgtccaagacactggcccagtacacctccaagacatgcagcaactgtgggtttaccatcaccagcgccgactacgacagggtgctggagaagctgaagaagacagcaacaggctggatgaccacaattaacggcaaggagctgaaggtggagggccagattacctactacaacagatacaagagacagaacgtagtcaaggacctgtccgtcgagctggatagactgagcgaagaatctgtgaacaacgacatctcctcctggacaaagggcagaagcggagaagctctgagcctcctgaagaaaagattctcccatagacccgtgcaggagaagttcgtgtgcctgaactgcggcttcgagacacacgcagccgagcaagccgccctgaacatcgccagatcctggctgttcctgcggagccaggagtacaagaaataccagacaaacaagacaaccggcaacaccgataagagagccttcgtcgagacctggcagtccttttaccggaagaagcttaaggaggtgtggaaacctgccgtgcggtctggcggatctggcggaggctccaccagccccaagaaaaagagaaaagtctaagctgccttctgcggggcttgccttctggccatgcccttcttctctcccttgcacctgtacctcttggtctttgaataaagcctgagtaggaaggctagcaaaaaaaaaaaaaaaaaaaaaaaaaaaaaaaaaaaaaaaaaaaaaaaaaaaaaaaaaaaaaaaaaaaaaaaaaaaaaaaa

SEQ ID NO: 13570 - RNA, 5785 nt, synthetic construct
  source 1..5785: mol_type = other RNA
aggaaataagagagaaaagaagagtaagaagaaatataagagccaccatggcccctaagaagaagcgtaaagtgagccggatggaacgcctcgtctacgaggtgcggcagaagtgcagaaacatcgaggacatctgcatctcctgcggatctctgaacgtgaccctggagcacccactgttcatcggcggcatgtgccagaactgtaaaaactgttttctggagtgtgcctatcaatacgacgatgacggctaccagagctactgcaccatctgttgcggcggaagagaggtgctgatgtgtggaaataacaactgctgccggtgcttctgcgtggaatgcgtggacctgctggtgggccccggcgccgcccaggccgctattaaggaagatccttggaactgctacatgtgcggccacaagggcacatacggcctgctgagacggagagaggactggcctagcagactgcagatgttcttcgccaataaccacgaccaggagttcgacccccctaaggtgtaccctcccgtccccgccgagaagagaaagcccatccgggtcctgagcctgttcgatggcatcgccaccggtctgctggtgctgaaggacctgggcatccaggtggataggtacattgcctccgaggtgtgcgaggactccatcaccgtgggaatggtgcgtcatcagggcaagatcatgtacgtgggcgacgtgcggagcgtgacacagaagcatatccaggagtggggccctttcgacctggtgatcggcggcagcccttgcaatgacctgagcatcgtgaacccagcccggaagggcctgtacgagggaaccggcagactgttcttcgagttttacagactgctgcacgacgcccggcctaaggaaggcgacgaccggcccttcttttggctgttcgagaatgtggtggccatgggagtcagcgacaagcgggatattagccggttcctggagagcaaccccgtgatgatcgatgccaaggaagtgagcgccgcccaccgggccagatacttctggggcaatctgcctggcatgaacagacccctggccagcaccgtgaacgacaagctggagctgcaggagtgcctggagcacggccggatcgccaagttcagcaaggtgagaaccatcaccacccgaagcaacagcatcaaacaaggcaaggaccagcactttcctgtgttcatgaacgagaaggaggacatcctgtggtgtaccgagatggagagagtgttcgggttcccagtccactacacagatgtcagcaacatgtctagactggccagacagagactgctgggaagaagctggtccgtccctgtgatcagacacctgttcgcccctctgaaggagtacttcgcctgcgtgagcagcggcaacagcaacgccaacagccggggccccagcttctctagcggcctggtgccactgtccctgagagggagccacatgggccccatggagatctacaaaaccgtgagcgcctggaagcggcagcctgtgcgcgtgctgagcctgtttcggaatatcgataaagtcctgaaaagcctgggattcctggagagcggctctggctccggcggtggcaccctgaagtacgtggaggatgtgacaaacgtggtcagacgggatgtggagaagtggggccccttcgatctggtgtacggcagcacccaacccctgggcagctcttgtgaccggtgccctggctggtacatgtttcagttccaccggatcctgcagtacgccctgccgagacaggagtcccagcggccattcttttggattttcatggacaacttgctgctgaccgaggatgaccaggaaactaccactcggttcctgcagaccgaagccgtgaccctgcaggacgtgagaggccgggactaccagaacgccatgcgggtgtggtccaacatccctggactgaaaagcaagcacgcacctctgacccctaaagaagaggagtacctgcaggcccaggtgcggagcagaagcaagctggacgcccctaaggtggatctgctggtgaagaattgcctcctgcccctgagagagtacttcaagtatttcagccagaatagtctgcccctgggaggcagcggcggcggcttccaggagagcgtgaccttcaaggacgtggccgtggacttcacccaggaggagtgggcccagctggaccccccccagaggaacctgtacagggacgtgatgctggagaactacgagcacttcgtgttcctgggcctgcccgtggccaagcccgaggtgatcagccagctggagaggggcgaggtgcccctgttccccgagcagcccgagttcagcaccagcatctgccccgacagcctgaacggcggcccaagcagcggcgcccctcctcccagcggcggcagcccagccggctccccaacctctaccgaggagggcacctctgagtccgccacccccgagagcggccctggcacctccaccgagcccagcgagggcagcgcacccggcagccctgccggcagccccacctccacagaggagggaaccagcaccgagcccagcgaaggcagcgccccaggcaccagcaccgagcctagtgagcaggagattaaacggatcaacaagatcagaagaagacttgtgaaagacagcaacaccaagaaggccggcaagacaggccccatgaaaaccctgctggttagagtgatgacacccgatctgagagagcggctggaaaacctgagaaagaagcctgaaaatatcccccagcccatcagcaatacatctagagccaacctgaataagctgctgaccgattacaccgaaatgaagaaggcgatcctgcatgtgtactgggaagagttccagaaggaccctgtgggcctgatgagccgggtggcccagcctgccagcaagaagatcgatcagaacaagctgaaacctgagatggacgagaagggcaacctgaccaccgccggctttgcctgctctcagtgtggccagcccctgttcgtgtacaagctggagcaggtgtctgagaagggcaaggcttacaccaactacttcggacggtgcaatgtggccgagcacgaaaagctgatcctgctggcccagctgaagcccgagaaggatagcgacgaagccgtgacatatagcctgggaaagtttgggcagagggccctggatttctacagcattcatgtgaccaaggagtccacccaccccgtgaagcccctggcccagatcgccggaaacagatacgcctccggacctgtgggaaaggccctgagcgacgcatgtatgggcacaatcgcctccttcctgtctaagtaccaggacatcatcatcgaacaccagaaggtggtgaagggcaaccagaagagactggagagcctgcgggagctggccggcaaggaaaacctggaataccctagcgtgaccctgccacctcagcctcacaccaaggagggcgttgatgcctacaacgaagtgatcgcccgggtgcgaatgtgggtgaacctgaacctgtggcagaagctgaagctaagcagagatgatgccaagcctctgctgagactgaagggattcccttcctttcctctggtcgagagacaggccaacgaagtggactggtgggacatggtgtgtaacgtgaagaagctgatcaacgagaaaaaggaggatggcaaggtgttttggcagaatctggctggctacaagagacaggaagccctgagaccatacctgagcagcgaggaagatcggaagaagggaaagaaattcgctcggtaccagctgggcgacctgctgctgcacctggaaaagaagcacggcgaggactggggaaaggtgtacgacgaggcctgggagcggattgacaagaaagtggaaggcctgagcaagcacatcaagctggaagaggaacggagaagcgaggacgcccagagcaaggccgccctgaccgactggctgcgggctaaggccagcttcgtgatcgagggcctgaaggaggccgacaaggacgagttctgcagatgcgagctgaagctgcagaagtggtacggggacctgcggggaaagcccttcgccatcgaagccgagaacagcatcctggacatcagcggcttcagcaagcagtacaactgtgccttcatctggcagaaggacggcgtgaagaagctgaacctgtacctgatcatcaactacttcaagggcggcaagctgcggttcaagaagatcaaacctgaagccttcgaagccaacagattctacaccgtgatcaacaaaaagagcggcgagatcgtgcccatggaggtgaacttcaacttcgacgaccccaacctgatcatcctgcctctggcctttggcaagagacagggcagagaattcatctggaacgacctgctgtccctggaaaccggcagcctgaagctggccaacggaagagtgatcgagaagacactgtacaacagaagaacccggcaggatgagcctgccctgttcgtggccctgaccttcgagcggcgggaggtcctggactcctccaatatcaaaccaatgaacctgatcggcgtggcaagaggcgaaaacatccccgccgtgatcgccctgaccgaccccgagggctgcccactgagccggtttaaggatagcctgggaaacccaacccacatcctgagaatcggcgagagctataaggagaagcagcggaccatccaggccaagaaggaggtggagcagcggagagccggcggctacagccggaagtacgccagcaaagccaagaatctggcagacgatatggtgagaaacaccgctagagatctgctgtactacgccgtgacccaggatgccatgctgatcttcgccaacctgagccggggcttcggccggcagggcaagcggaccttcatggccgagagacagtacacacggatggaggactggctgaccgccaagctggcctacgagggcctgagcaagacctacctgtccaagacactggcccagtacacctccaagacatgcagcaactgtgggtttaccatcaccagcgccgactacgacagggtgctggagaagctgaagaagacagcaacaggctggatgaccacaattaacggcaaggagctgaaggtggagggccagattacctactacaacagatacaagagacagaacgtagtcaaggacctgtccgtcgagctggatagactgagcgaagaatctgtgaacaacgacatctcctcctggacaaagggcagaagcggagaagctctgagcctcctgaagaaaagattctcccatagacccgtgcaggagaagttcgtgtgcctgaactgcggcttcgagacacacgcagccgagcaagccgccctgaacatcgccagatcctggctgttcctgcggagccaggagtacaagaaataccagacaaacaagacaaccggcaacaccgataagagagccttcgtcgagacctggcagtccttttaccggaagaagcttaaggaggtgtggaaacctgccgtgcggtctggcggatctggcggaggctccaccagccccaagaaaaagagaaaagtctaagctgccttctgcggggcttgccttctggccatgcccttcttctctcccttgcacctgtacctcttggtctttgaataaagcctgagtaggaaggctagcaaaaaaaaaaaaaaaaaaaaaaaaaaaaaaaaaaaaaaaaaaaaaaaaaaaaaaaaaaaaaaaaaaaaaaaaaaaaaaaa

SEQ ID NO: 13571 - RNA, 5785 nt, synthetic construct
  source 1..5785: mol_type = other RNA
aggaaataagagagaaaagaagagtaagaagaaatataagagccaccatggcccctaagaagaagcgtaaagtgagccggatggaacgcctcgtctacgaggtgcggcagaagtgcagaaacatcgaggacatctgcatctcctgcggatctctgaacgtgaccctggagcacccactgttcatcggcggcatgtgccagaactgtaaaaactgttttctggagtgtgcctatcaatacgacgatgacggctaccagagctactgcaccatctgttgcggcggaagagaggtgctgatgtgtggaaataacaactgctgccggtgcttctgcgtggaatgcgtggacctgctggtgggccccggcgccgcccaggccgctattaaggaagatccttggaactgctacatgtgcggccacaagggcacatacggcctgctgagacggagagaggactggcctagcagactgcagatgttcttcgccaataaccacgaccaggagttcgacccccctaaggtgtaccctcccgtccccgccgagaagagaaagcccatccgggtcctgagcctgttcgatggcatcgccaccggtctgctggtgctgaaggacctgggcatccaggtggataggtacattgcctccgaggtgtgcgaggactccatcaccgtgggaatggtgcgtcatcagggcaagatcatgtacgtgggcgacgtgcggagcgtgacacagaagcatatccaggagtggggccctttcgacctggtgatcggcggcagcccttgcaatgacctgagcatcgtgaacccagcccggaagggcctgtacgagggaaccggcagactgttcttcgagttttacagactgctgcacgacgcccggcctaaggaaggcgacgaccggcccttcttttggctgttcgagaatgtggtggccatgggagtcagcgacaagcgggatattagccggttcctggagagcaaccccgtgatgatcgatgccaaggaagtgagcgccgcccaccgggccagatacttctggggcaatctgcctggcatgaacagacccctggccagcaccgtgaacgacaagctggagctgcaggagtgcctggagcacggccggatcgccaagttcagcaaggtgagaaccatcaccacccgaagcaacagcatcaaacaaggcaaggaccagcactttcctgtgttcatgaacgagaaggaggacatcctgtggtgtaccgagatggagagagtgttcgggttcccagtccactacacagatgtcagcaacatgtctagactggccagacagagactgctgggaagaagctggtccgtccctgtgatcagacacctgttcgcccctctgaaggagtacttcgcctgcgtgagcagcggcaacagcaacgccaacagccggggccccagcttctctagcggcctggtgccactgtccctgagagggagccacatgggccccatggagatctacaaaaccgtgagcgcctggaagcggcagcctgtgcgcgtgctgagcctgtttcggaatatcgataaagtcctgaaaagcctgggattcctggagagcggctctggctccggcggtggcaccctgaagtacgtggaggatgtgacaaacgtggtcagacgggatgtggagaagtggggccccttcgatctggtgtacggcagcacccaacccctgggcagctcttgtgaccggtgccctggctggtacatgtttcagttccaccggatcctgcagtacgccctgccgagacaggagtcccagcggccattcttttggattttcatggacaacttgctgctgaccgaggatgaccaggaaactaccactcggttcctgcagaccgaagccgtgaccctgcaggacgtgagaggccgggactaccagaacgccatgcgggtgtggtccaacatccctggactgaaaagcaagcacgcacctctgacccctaaagaagaggagtacctgcaggcccaggtgcggagcagaagcaagctggacgcccctaaggtggatctgctggtgaagaattgcctcctgcccctgagagagtacttcaagtatttcagccagaatagtctgcccctgggaggcagcggcggcggcccccaggccagcgtgaccttcaaggacgtggccgtggacttcacctgggaggagtggaggctgctggaccccagccagaaggagctgttctgggaggtgatgctggagaactacaggaacctggtgtgcctgggcctggccgacagcaacaaggacgtgaggatcagcgagctggagagcggcgagccccactggatccccaccggcggcgtgctgaggagctgctggcccggctgggagagcggcggcccaagcagcggcgcccctcctcccagcggcggcagcccagccggctccccaacctctaccgaggagggcacctctgagtccgccacccccgagagcggccctggcacctccaccgagcccagcgagggcagcgcacccggcagccctgccggcagccccacctccacagaggagggaaccagcaccgagcccagcgaaggcagcgccccaggcaccagcaccgagcctagtgagcaggagattaaacggatcaacaagatcagaagaagacttgtgaaagacagcaacaccaagaaggccggcaagacaggccccatgaaaaccctgctggttagagtgatgacacccgatctgagagagcggctggaaaacctgagaaagaagcctgaaaatatcccccagcccatcagcaatacatctagagccaacctgaataagctgctgaccgattacaccgaaatgaagaaggcgatcctgcatgtgtactgggaagagttccagaaggaccctgtgggcctgatgagccgggtggcccagcctgccagcaagaagatcgatcagaacaagctgaaacctgagatggacgagaagggcaacctgaccaccgccggctttgcctgctctcagtgtggccagcccctgttcgtgtacaagctggagcaggtgtctgagaagggcaaggcttacaccaactacttcggacggtgcaatgtggccgagcacgaaaagctgatcctgctggcccagctgaagcccgagaaggatagcgacgaagccgtgacatatagcctgggaaagtttgggcagagggccctggatttctacagcattcatgtgaccaaggagtccacccaccccgtgaagcccctggcccagatcgccggaaacagatacgcctccggacctgtgggaaaggccctgagcgacgcatgtatgggcacaatcgcctccttcctgtctaagtaccaggacatcatcatcgaacaccagaaggtggtgaagggcaaccagaagagactggagagcctgcgggagctggccggcaaggaaaacctggaataccctagcgtgaccctgccacctcagcctcacaccaaggagggcgttgatgcctacaacgaagtgatcgcccgggtgcgaatgtgggtgaacctgaacctgtggcagaagctgaagctaagcagagatgatgccaagcctctgctgagactgaagggattcccttcctttcctctggtcgagagacaggccaacgaagtggactggtgggacatggtgtgtaacgtgaagaagctgatcaacgagaaaaaggaggatggcaaggtgttttggcagaatctggctggctacaagagacaggaagccctgagaccatacctgagcagcgaggaagatcggaagaagggaaagaaattcgctcggtaccagctgggcgacctgctgctgcacctggaaaagaagcacggcgaggactggggaaaggtgtacgacgaggcctgggagcggattgacaagaaagtggaaggcctgagcaagcacatcaagctggaagaggaacggagaagcgaggacgcccagagcaaggccgccctgaccgactggctgcgggctaaggccagcttcgtgatcgagggcctgaaggaggccgacaaggacgagttctgcagatgcgagctgaagctgcagaagtggtacggggacctgcggggaaagcccttcgccatcgaagccgagaacagcatcctggacatcagcggcttcagcaagcagtacaactgtgccttcatctggcagaaggacggcgtgaagaagctgaacctgtacctgatcatcaactacttcaagggcggcaagctgcggttcaagaagatcaaacctgaagccttcgaagccaacagattctacaccgtgatcaacaaaaagagcggcgagatcgtgcccatggaggtgaacttcaacttcgacgaccccaacctgatcatcctgcctctggcctttggcaagagacagggcagagaattcatctggaacgacctgctgtccctggaaaccggcagcctgaagctggccaacggaagagtgatcgagaagacactgtacaacagaagaacccggcaggatgagcctgccctgttcgtggccctgaccttcgagcggcgggaggtcctggactcctccaatatcaaaccaatgaacctgatcggcgtggcaagaggcgaaaacatccccgccgtgatcgccctgaccgaccccgagggctgcccactgagccggtttaaggatagcctgggaaacccaacccacatcctgagaatcggcgagagctataaggagaagcagcggaccatccaggccaagaaggaggtggagcagcggagagccggcggctacagccggaagtacgccagcaaagccaagaatctggcagacgatatggtgagaaacaccgctagagatctgctgtactacgccgtgacccaggatgccatgctgatcttcgccaacctgagccggggcttcggccggcagggcaagcggaccttcatggccgagagacagtacacacggatggaggactggctgaccgccaagctggcctacgagggcctgagcaagacctacctgtccaagacactggcccagtacacctccaagacatgcagcaactgtgggtttaccatcaccagcgccgactacgacagggtgctggagaagctgaagaagacagcaacaggctggatgaccacaattaacggcaaggagctgaaggtggagggccagattacctactacaacagatacaagagacagaacgtagtcaaggacctgtccgtcgagctggatagactgagcgaagaatctgtgaacaacgacatctcctcctggacaaagggcagaagcggagaagctctgagcctcctgaagaaaagattctcccatagacccgtgcaggagaagttcgtgtgcctgaactgcggcttcgagacacacgcagccgagcaagccgccctgaacatcgccagatcctggctgttcctgcggagccaggagtacaagaaataccagacaaacaagacaaccggcaacaccgataagagagccttcgtcgagacctggcagtccttttaccggaagaagcttaaggaggtgtggaaacctgccgtgcggtctggcggatctggcggaggctccaccagccccaagaaaaagagaaaagtctaagctgccttctgcggggcttgccttctggccatgcccttcttctctcccttgcacctgtacctcttggtctttgaataaagcctgagtaggaaggctagcaaaaaaaaaaaaaaaaaaaaaaaaaaaaaaaaaaaaaaaaaaaaaaaaaaaaaaaaaaaaaaaaaaaaaaaaaaaaaaaa

SEQ ID NO: 13572 - RNA, 5785 nt, synthetic construct
  source 1..5785: mol_type = other RNA
aggaaataagagagaaaagaagagtaagaagaaatataagagccaccatggcccctaagaagaagcgtaaagtgagccggatggaacgcctcgtctacgaggtgcggcagaagtgcagaaacatcgaggacatctgcatctcctgcggatctctgaacgtgaccctggagcacccactgttcatcggcggcatgtgccagaactgtaaaaactgttttctggagtgtgcctatcaatacgacgatgacggctaccagagctactgcaccatctgttgcggcggaagagaggtgctgatgtgtggaaataacaactgctgccggtgcttctgcgtggaatgcgtggacctgctggtgggccccggcgccgcccaggccgctattaaggaagatccttggaactgctacatgtgcggccacaagggcacatacggcctgctgagacggagagaggactggcctagcagactgcagatgttcttcgccaataaccacgaccaggagttcgacccccctaaggtgtaccctcccgtccccgccgagaagagaaagcccatccgggtcctgagcctgttcgatggcatcgccaccggtctgctggtgctgaaggacctgggcatccaggtggataggtacattgcctccgaggtgtgcgaggactccatcaccgtgggaatggtgcgtcatcagggcaagatcatgtacgtgggcgacgtgcggagcgtgacacagaagcatatccaggagtggggccctttcgacctggtgatcggcggcagcccttgcaatgacctgagcatcgtgaacccagcccggaagggcctgtacgagggaaccggcagactgttcttcgagttttacagactgctgcacgacgcccggcctaaggaaggcgacgaccggcccttcttttggctgttcgagaatgtggtggccatgggagtcagcgacaagcgggatattagccggttcctggagagcaaccccgtgatgatcgatgccaaggaagtgagcgccgcccaccgggccagatacttctggggcaatctgcctggcatgaacagacccctggccagcaccgtgaacgacaagctggagctgcaggagtgcctggagcacggccggatcgccaagttcagcaaggtgagaaccatcaccacccgaagcaacagcatcaaacaaggcaaggaccagcactttcctgtgttcatgaacgagaaggaggacatcctgtggtgtaccgagatggagagagtgttcgggttcccagtccactacacagatgtcagcaacatgtctagactggccagacagagactgctgggaagaagctggtccgtccctgtgatcagacacctgttcgcccctctgaaggagtacttcgcctgcgtgagcagcggcaacagcaacgccaacagccggggccccagcttctctagcggcctggtgccactgtccctgagagggagccacatgggccccatggagatctacaaaaccgtgagcgcctggaagcggcagcctgtgcgcgtgctgagcctgtttcggaatatcgataaagtcctgaaaagcctgggattcctggagagcggctctggctccggcggtggcaccctgaagtacgtggaggatgtgacaaacgtggtcagacgggatgtggagaagtggggccccttcgatctggtgtacggcagcacccaacccctgggcagctcttgtgaccggtgccctggctggtacatgtttcagttccaccggatcctgcagtacgccctgccgagacaggagtcccagcggccattcttttggattttcatggacaacttgctgctgaccgaggatgaccaggaaactaccactcggttcctgcagaccgaagccgtgaccctgcaggacgtgagaggccgggactaccagaacgccatgcgggtgtggtccaacatccctggactgaaaagcaagcacgcacctctgacccctaaagaagaggagtacctgcaggcccaggtgcggagcagaagcaagctggacgcccctaaggtggatctgctggtgaagaattgcctcctgcccctgagagagtacttcaagtatttcagccagaatagtctgcccctgggaggcagcggcggcggcagcaaggacctggtgaccttcggcgacgtggccgtgaacttcagccaggaggagtgggagtggctgaaccccgcccagaggaacctgtacaggagggtgatgctggagaactacaggagcctggtgagcctgggcgtgagcgtgagcaagcccgacgtgatcagcctgctggagcagggcaaggagccctggatggtgaagaaggagggcaccaggggcgcctgccccgactgggagtacgtgggcggcccaagcagcggcgcccctcctcccagcggcggcagcccagccggctccccaacctctaccgaggagggcacctctgagtccgccacccccgagagcggccctggcacctccaccgagcccagcgagggcagcgcacccggcagccctgccggcagccccacctccacagaggagggaaccagcaccgagcccagcgaaggcagcgccccaggcaccagcaccgagcctagtgagcaggagattaaacggatcaacaagatcagaagaagacttgtgaaagacagcaacaccaagaaggccggcaagacaggccccatgaaaaccctgctggttagagtgatgacacccgatctgagagagcggctggaaaacctgagaaagaagcctgaaaatatcccccagcccatcagcaatacatctagagccaacctgaataagctgctgaccgattacaccgaaatgaagaaggcgatcctgcatgtgtactgggaagagttccagaaggaccctgtgggcctgatgagccgggtggcccagcctgccagcaagaagatcgatcagaacaagctgaaacctgagatggacgagaagggcaacctgaccaccgccggctttgcctgctctcagtgtggccagcccctgttcgtgtacaagctggagcaggtgtctgagaagggcaaggcttacaccaactacttcggacggtgcaatgtggccgagcacgaaaagctgatcctgctggcccagctgaagcccgagaaggatagcgacgaagccgtgacatatagcctgggaaagtttgggcagagggccctggatttctacagcattcatgtgaccaaggagtccacccaccccgtgaagcccctggcccagatcgccggaaacagatacgcctccggacctgtgggaaaggccctgagcgacgcatgtatgggcacaatcgcctccttcctgtctaagtaccaggacatcatcatcgaacaccagaaggtggtgaagggcaaccagaagagactggagagcctgcgggagctggccggcaaggaaaacctggaataccctagcgtgaccctgccacctcagcctcacaccaaggagggcgttgatgcctacaacgaagtgatcgcccgggtgcgaatgtgggtgaacctgaacctgtggcagaagctgaagctaagcagagatgatgccaagcctctgctgagactgaagggattcccttcctttcctctggtcgagagacaggccaacgaagtggactggtgggacatggtgtgtaacgtgaagaagctgatcaacgagaaaaaggaggatggcaaggtgttttggcagaatctggctggctacaagagacaggaagccctgagaccatacctgagcagcgaggaagatcggaagaagggaaagaaattcgctcggtaccagctgggcgacctgctgctgcacctggaaaagaagcacggcgaggactggggaaaggtgtacgacgaggcctgggagcggattgacaagaaagtggaaggcctgagcaagcacatcaagctggaagaggaacggagaagcgaggacgcccagagcaaggccgccctgaccgactggctgcgggctaaggccagcttcgtgatcgagggcctgaaggaggccgacaaggacgagttctgcagatgcgagctgaagctgcagaagtggtacggggacctgcggggaaagcccttcgccatcgaagccgagaacagcatcctggacatcagcggcttcagcaagcagtacaactgtgccttcatctggcagaaggacggcgtgaagaagctgaacctgtacctgatcatcaactacttcaagggcggcaagctgcggttcaagaagatcaaacctgaagccttcgaagccaacagattctacaccgtgatcaacaaaaagagcggcgagatcgtgcccatggaggtgaacttcaacttcgacgaccccaacctgatcatcctgcctctggcctttggcaagagacagggcagagaattcatctggaacgacctgctgtccctggaaaccggcagcctgaagctggccaacggaagagtgatcgagaagacactgtacaacagaagaacccggcaggatgagcctgccctgttcgtggccctgaccttcgagcggcgggaggtcctggactcctccaatatcaaaccaatgaacctgatcggcgtggcaagaggcgaaaacatccccgccgtgatcgccctgaccgaccccgagggctgcccactgagccggtttaaggatagcctgggaaacccaacccacatcctgagaatcggcgagagctataaggagaagcagcggaccatccaggccaagaaggaggtggagcagcggagagccggcggctacagccggaagtacgccagcaaagccaagaatctggcagacgatatggtgagaaacaccgctagagatctgctgtactacgccgtgacccaggatgccatgctgatcttcgccaacctgagccggggcttcggccggcagggcaagcggaccttcatggccgagagacagtacacacggatggaggactggctgaccgccaagctggcctacgagggcctgagcaagacctacctgtccaagacactggcccagtacacctccaagacatgcagcaactgtgggtttaccatcaccagcgccgactacgacagggtgctggagaagctgaagaagacagcaacaggctggatgaccacaattaacggcaaggagctgaaggtggagggccagattacctactacaacagatacaagagacagaacgtagtcaaggacctgtccgtcgagctggatagactgagcgaagaatctgtgaacaacgacatctcctcctggacaaagggcagaagcggagaagctctgagcctcctgaagaaaagattctcccatagacccgtgcaggagaagttcgtgtgcctgaactgcggcttcgagacacacgcagccgagcaagccgccctgaacatcgccagatcctggctgttcctgcggagccaggagtacaagaaataccagacaaacaagacaaccggcaacaccgataagagagccttcgtcgagacctggcagtccttttaccggaagaagcttaaggaggtgtggaaacctgccgtgcggtctggcggatctggcggaggctccaccagccccaagaaaaagagaaaagtctaagctgccttctgcggggcttgccttctggccatgcccttcttctctcccttgcacctgtacctcttggtctttgaataaagcctgagtaggaaggctagcaaaaaaaaaaaaaaaaaaaaaaaaaaaaaaaaaaaaaaaaaaaaaaaaaaaaaaaaaaaaaaaaaaaaaaaaaaaaaaaa

SEQ ID NO: 13573 - RNA, 5785 nt, synthetic construct
  source 1..5785: mol_type = other RNA
aggaaataagagagaaaagaagagtaagaagaaatataagagccaccatggcccctaagaagaagcgtaaagtgagccggatggaacgcctcgtctacgaggtgcggcagaagtgcagaaacatcgaggacatctgcatctcctgcggatctctgaacgtgaccctggagcacccactgttcatcggcggcatgtgccagaactgtaaaaactgttttctggagtgtgcctatcaatacgacgatgacggctaccagagctactgcaccatctgttgcggcggaagagaggtgctgatgtgtggaaataacaactgctgccggtgcttctgcgtggaatgcgtggacctgctggtgggccccggcgccgcccaggccgctattaaggaagatccttggaactgctacatgtgcggccacaagggcacatacggcctgctgagacggagagaggactggcctagcagactgcagatgttcttcgccaataaccacgaccaggagttcgacccccctaaggtgtaccctcccgtccccgccgagaagagaaagcccatccgggtcctgagcctgttcgatggcatcgccaccggtctgctggtgctgaaggacctgggcatccaggtggataggtacattgcctccgaggtgtgcgaggactccatcaccgtgggaatggtgcgtcatcagggcaagatcatgtacgtgggcgacgtgcggagcgtgacacagaagcatatccaggagtggggccctttcgacctggtgatcggcggcagcccttgcaatgacctgagcatcgtgaacccagcccggaagggcctgtacgagggaaccggcagactgttcttcgagttttacagactgctgcacgacgcccggcctaaggaaggcgacgaccggcccttcttttggctgttcgagaatgtggtggccatgggagtcagcgacaagcgggatattagccggttcctggagagcaaccccgtgatgatcgatgccaaggaagtgagcgccgcccaccgggccagatacttctggggcaatctgcctggcatgaacagacccctggccagcaccgtgaacgacaagctggagctgcaggagtgcctggagcacggccggatcgccaagttcagcaaggtgagaaccatcaccacccgaagcaacagcatcaaacaaggcaaggaccagcactttcctgtgttcatgaacgagaaggaggacatcctgtggtgtaccgagatggagagagtgttcgggttcccagtccactacacagatgtcagcaacatgtctagactggccagacagagactgctgggaagaagctggtccgtccctgtgatcagacacctgttcgcccctctgaaggagtacttcgcctgcgtgagcagcggcaacagcaacgccaacagccggggccccagcttctctagcggcctggtgccactgtccctgagagggagccacatgggccccatggagatctacaaaaccgtgagcgcctggaagcggcagcctgtgcgcgtgctgagcctgtttcggaatatcgataaagtcctgaaaagcctgggattcctggagagcggctctggctccggcggtggcaccctgaagtacgtggaggatgtgacaaacgtggtcagacgggatgtggagaagtggggccccttcgatctggtgtacggcagcacccaacccctgggcagctcttgtgaccggtgccctggctggtacatgtttcagttccaccggatcctgcagtacgccctgccgagacaggagtcccagcggccattcttttggattttcatggacaacttgctgctgaccgaggatgaccaggaaactaccactcggttcctgcagaccgaagccgtgaccctgcaggacgtgagaggccgggactaccagaacgccatgcgggtgtggtccaacatccctggactgaaaagcaagcacgcacctctgacccctaaagaagaggagtacctgcaggcccaggtgcggagcagaagcaagctggacgcccctaaggtggatctgctggtgaagaattgcctcctgcccctgagagagtacttcaagtatttcagccagaatagtctgcccctgggaggcagcggcggcggccaggtgcccgtgaccttcgaggacatcaccgtgtacttcagcagggagcagtgggagtacctggacgagggccagaaggagctgtacagggaggtgatgaaggagaactacgagaccctgatcagcctgggcaccggccccgagggcttcaaccccgaggtgctggccaggatcaagctggaggaggagagccacgtgtgggaccccaaggagcccggccagaaggaggtgaccaggagctacggcggcccaagcagcggcgcccctcctcccagcggcggcagcccagccggctccccaacctctaccgaggagggcacctctgagtccgccacccccgagagcggccctggcacctccaccgagcccagcgagggcagcgcacccggcagccctgccggcagccccacctccacagaggagggaaccagcaccgagcccagcgaaggcagcgccccaggcaccagcaccgagcctagtgagcaggagattaaacggatcaacaagatcagaagaagacttgtgaaagacagcaacaccaagaaggccggcaagacaggccccatgaaaaccctgctggttagagtgatgacacccgatctgagagagcggctggaaaacctgagaaagaagcctgaaaatatcccccagcccatcagcaatacatctagagccaacctgaataagctgctgaccgattacaccgaaatgaagaaggcgatcctgcatgtgtactgggaagagttccagaaggaccctgtgggcctgatgagccgggtggcccagcctgccagcaagaagatcgatcagaacaagctgaaacctgagatggacgagaagggcaacctgaccaccgccggctttgcctgctctcagtgtggccagcccctgttcgtgtacaagctggagcaggtgtctgagaagggcaaggcttacaccaactacttcggacggtgcaatgtggccgagcacgaaaagctgatcctgctggcccagctgaagcccgagaaggatagcgacgaagccgtgacatatagcctgggaaagtttgggcagagggccctggatttctacagcattcatgtgaccaaggagtccacccaccccgtgaagcccctggcccagatcgccggaaacagatacgcctccggacctgtgggaaaggccctgagcgacgcatgtatgggcacaatcgcctccttcctgtctaagtaccaggacatcatcatcgaacaccagaaggtggtgaagggcaaccagaagagactggagagcctgcgggagctggccggcaaggaaaacctggaataccctagcgtgaccctgccacctcagcctcacaccaaggagggcgttgatgcctacaacgaagtgatcgcccgggtgcgaatgtgggtgaacctgaacctgtggcagaagctgaagctaagcagagatgatgccaagcctctgctgagactgaagggattcccttcctttcctctggtcgagagacaggccaacgaagtggactggtgggacatggtgtgtaacgtgaagaagctgatcaacgagaaaaaggaggatggcaaggtgttttggcagaatctggctggctacaagagacaggaagccctgagaccatacctgagcagcgaggaagatcggaagaagggaaagaaattcgctcggtaccagctgggcgacctgctgctgcacctggaaaagaagcacggcgaggactggggaaaggtgtacgacgaggcctgggagcggattgacaagaaagtggaaggcctgagcaagcacatcaagctggaagaggaacggagaagcgaggacgcccagagcaaggccgccctgaccgactggctgcgggctaaggccagcttcgtgatcgagggcctgaaggaggccgacaaggacgagttctgcagatgcgagctgaagctgcagaagtggtacggggacctgcggggaaagcccttcgccatcgaagccgagaacagcatcctggacatcagcggcttcagcaagcagtacaactgtgccttcatctggcagaaggacggcgtgaagaagctgaacctgtacctgatcatcaactacttcaagggcggcaagctgcggttcaagaagatcaaacctgaagccttcgaagccaacagattctacaccgtgatcaacaaaaagagcggcgagatcgtgcccatggaggtgaacttcaacttcgacgaccccaacctgatcatcctgcctctggcctttggcaagagacagggcagagaattcatctggaacgacctgctgtccctggaaaccggcagcctgaagctggccaacggaagagtgatcgagaagacactgtacaacagaagaacccggcaggatgagcctgccctgttcgtggccctgaccttcgagcggcgggaggtcctggactcctccaatatcaaaccaatgaacctgatcggcgtggcaagaggcgaaaacatccccgccgtgatcgccctgaccgaccccgagggctgcccactgagccggtttaaggatagcctgggaaacccaacccacatcctgagaatcggcgagagctataaggagaagcagcggaccatccaggccaagaaggaggtggagcagcggagagccggcggctacagccggaagtacgccagcaaagccaagaatctggcagacgatatggtgagaaacaccgctagagatctgctgtactacgccgtgacccaggatgccatgctgatcttcgccaacctgagccggggcttcggccggcagggcaagcggaccttcatggccgagagacagtacacacggatggaggactggctgaccgccaagctggcctacgagggcctgagcaagacctacctgtccaagacactggcccagtacacctccaagacatgcagcaactgtgggtttaccatcaccagcgccgactacgacagggtgctggagaagctgaagaagacagcaacaggctggatgaccacaattaacggcaaggagctgaaggtggagggccagattacctactacaacagatacaagagacagaacgtagtcaaggacctgtccgtcgagctggatagactgagcgaagaatctgtgaacaacgacatctcctcctggacaaagggcagaagcggagaagctctgagcctcctgaagaaaagattctcccatagacccgtgcaggagaagttcgtgtgcctgaactgcggcttcgagacacacgcagccgagcaagccgccctgaacatcgccagatcctggctgttcctgcggagccaggagtacaagaaataccagacaaacaagacaaccggcaacaccgataagagagccttcgtcgagacctggcagtccttttaccggaagaagcttaaggaggtgtggaaacctgccgtgcggtctggcggatctggcggaggctccaccagccccaagaaaaagagaaaagtctaagctgccttctgcggggcttgccttctggccatgcccttcttctctcccttgcacctgtacctcttggtctttgaataaagcctgagtaggaaggctagcaaaaaaaaaaaaaaaaaaaaaaaaaaaaaaaaaaaaaaaaaaaaaaaaaaaaaaaaaaaaaaaaaaaaaaaaaaaaaaaa

SEQ ID NO: 13574 - RNA, 5785 nt, synthetic construct
  source 1..5785: mol_type = other RNA
aggaaataagagagaaaagaagagtaagaagaaatataagagccaccatggcccctaagaagaagcgtaaagtgagccggatggaacgcctcgtctacgaggtgcggcagaagtgcagaaacatcgaggacatctgcatctcctgcggatctctgaacgtgaccctggagcacccactgttcatcggcggcatgtgccagaactgtaaaaactgttttctggagtgtgcctatcaatacgacgatgacggctaccagagctactgcaccatctgttgcggcggaagagaggtgctgatgtgtggaaataacaactgctgccggtgcttctgcgtggaatgcgtggacctgctggtgggccccggcgccgcccaggccgctattaaggaagatccttggaactgctacatgtgcggccacaagggcacatacggcctgctgagacggagagaggactggcctagcagactgcagatgttcttcgccaataaccacgaccaggagttcgacccccctaaggtgtaccctcccgtccccgccgagaagagaaagcccatccgggtcctgagcctgttcgatggcatcgccaccggtctgctggtgctgaaggacctgggcatccaggtggataggtacattgcctccgaggtgtgcgaggactccatcaccgtgggaatggtgcgtcatcagggcaagatcatgtacgtgggcgacgtgcggagcgtgacacagaagcatatccaggagtggggccctttcgacctggtgatcggcggcagcccttgcaatgacctgagcatcgtgaacccagcccggaagggcctgtacgagggaaccggcagactgttcttcgagttttacagactgctgcacgacgcccggcctaaggaaggcgacgaccggcccttcttttggctgttcgagaatgtggtggccatgggagtcagcgacaagcgggatattagccggttcctggagagcaaccccgtgatgatcgatgccaaggaagtgagcgccgcccaccgggccagatacttctggggcaatctgcctggcatgaacagacccctggccagcaccgtgaacgacaagctggagctgcaggagtgcctggagcacggccggatcgccaagttcagcaaggtgagaaccatcaccacccgaagcaacagcatcaaacaaggcaaggaccagcactttcctgtgttcatgaacgagaaggaggacatcctgtggtgtaccgagatggagagagtgttcgggttcccagtccactacacagatgtcagcaacatgtctagactggccagacagagactgctgggaagaagctggtccgtccctgtgatcagacacctgttcgcccctctgaaggagtacttcgcctgcgtgagcagcggcaacagcaacgccaacagccggggccccagcttctctagcggcctggtgccactgtccctgagagggagccacatgggccccatggagatctacaaaaccgtgagcgcctggaagcggcagcctgtgcgcgtgctgagcctgtttcggaatatcgataaagtcctgaaaagcctgggattcctggagagcggctctggctccggcggtggcaccctgaagtacgtggaggatgtgacaaacgtggtcagacgggatgtggagaagtggggccccttcgatctggtgtacggcagcacccaacccctgggcagctcttgtgaccggtgccctggctggtacatgtttcagttccaccggatcctgcagtacgccctgccgagacaggagtcccagcggccattcttttggattttcatggacaacttgctgctgaccgaggatgaccaggaaactaccactcggttcctgcagaccgaagccgtgaccctgcaggacgtgagaggccgggactaccagaacgccatgcgggtgtggtccaacatccctggactgaaaagcaagcacgcacctctgacccctaaagaagaggagtacctgcaggcccaggtgcggagcagaagcaagctggacgcccctaaggtggatctgctggtgaagaattgcctcctgcccctgagagagtacttcaagtatttcagccagaatagtctgcccctgggaggcagcggcggcggcttccagggcagcgtgatgttcagggacgtgagcatcaacttcagccaggaggagtgggagtgcctggaccccggccagatgaacctgtacaaggaggtgatgctggagaacttcagcaacctggtgagcgtgggcctgagcagcgccaagcccgtggtgatcagcctgctggaggagggcaaggagccctggatggtggagagggaggtgaagaggggcctgtgcagcgacctggagagcatgggcggcccaagcagcggcgcccctcctcccagcggcggcagcccagccggctccccaacctctaccgaggagggcacctctgagtccgccacccccgagagcggccctggcacctccaccgagcccagcgagggcagcgcacccggcagccctgccggcagccccacctccacagaggagggaaccagcaccgagcccagcgaaggcagcgccccaggcaccagcaccgagcctagtgagcaggagattaaacggatcaacaagatcagaagaagacttgtgaaagacagcaacaccaagaaggccggcaagacaggccccatgaaaaccctgctggttagagtgatgacacccgatctgagagagcggctggaaaacctgagaaagaagcctgaaaatatcccccagcccatcagcaatacatctagagccaacctgaataagctgctgaccgattacaccgaaatgaagaaggcgatcctgcatgtgtactgggaagagttccagaaggaccctgtgggcctgatgagccgggtggcccagcctgccagcaagaagatcgatcagaacaagctgaaacctgagatggacgagaagggcaacctgaccaccgccggctttgcctgctctcagtgtggccagcccctgttcgtgtacaagctggagcaggtgtctgagaagggcaaggcttacaccaactacttcggacggtgcaatgtggccgagcacgaaaagctgatcctgctggcccagctgaagcccgagaaggatagcgacgaagccgtgacatatagcctgggaaagtttgggcagagggccctggatttctacagcattcatgtgaccaaggagtccacccaccccgtgaagcccctggcccagatcgccggaaacagatacgcctccggacctgtgggaaaggccctgagcgacgcatgtatgggcacaatcgcctccttcctgtctaagtaccaggacatcatcatcgaacaccagaaggtggtgaagggcaaccagaagagactggagagcctgcgggagctggccggcaaggaaaacctggaataccctagcgtgaccctgccacctcagcctcacaccaaggagggcgttgatgcctacaacgaagtgatcgcccgggtgcgaatgtgggtgaacctgaacctgtggcagaagctgaagctaagcagagatgatgccaagcctctgctgagactgaagggattcccttcctttcctctggtcgagagacaggccaacgaagtggactggtgggacatggtgtgtaacgtgaagaagctgatcaacgagaaaaaggaggatggcaaggtgttttggcagaatctggctggctacaagagacaggaagccctgagaccatacctgagcagcgaggaagatcggaagaagggaaagaaattcgctcggtaccagctgggcgacctgctgctgcacctggaaaagaagcacggcgaggactggggaaaggtgtacgacgaggcctgggagcggattgacaagaaagtggaaggcctgagcaagcacatcaagctggaagaggaacggagaagcgaggacgcccagagcaaggccgccctgaccgactggctgcgggctaaggccagcttcgtgatcgagggcctgaaggaggccgacaaggacgagttctgcagatgcgagctgaagctgcagaagtggtacggggacctgcggggaaagcccttcgccatcgaagccgagaacagcatcctggacatcagcggcttcagcaagcagtacaactgtgccttcatctggcagaaggacggcgtgaagaagctgaacctgtacctgatcatcaactacttcaagggcggcaagctgcggttcaagaagatcaaacctgaagccttcgaagccaacagattctacaccgtgatcaacaaaaagagcggcgagatcgtgcccatggaggtgaacttcaacttcgacgaccccaacctgatcatcctgcctctggcctttggcaagagacagggcagagaattcatctggaacgacctgctgtccctggaaaccggcagcctgaagctggccaacggaagagtgatcgagaagacactgtacaacagaagaacccggcaggatgagcctgccctgttcgtggccctgaccttcgagcggcgggaggtcctggactcctccaatatcaaaccaatgaacctgatcggcgtggcaagaggcgaaaacatccccgccgtgatcgccctgaccgaccccgagggctgcccactgagccggtttaaggatagcctgggaaacccaacccacatcctgagaatcggcgagagctataaggagaagcagcggaccatccaggccaagaaggaggtggagcagcggagagccggcggctacagccggaagtacgccagcaaagccaagaatctggcagacgatatggtgagaaacaccgctagagatctgctgtactacgccgtgacccaggatgccatgctgatcttcgccaacctgagccggggcttcggccggcagggcaagcggaccttcatggccgagagacagtacacacggatggaggactggctgaccgccaagctggcctacgagggcctgagcaagacctacctgtccaagacactggcccagtacacctccaagacatgcagcaactgtgggtttaccatcaccagcgccgactacgacagggtgctggagaagctgaagaagacagcaacaggctggatgaccacaattaacggcaaggagctgaaggtggagggccagattacctactacaacagatacaagagacagaacgtagtcaaggacctgtccgtcgagctggatagactgagcgaagaatctgtgaacaacgacatctcctcctggacaaagggcagaagcggagaagctctgagcctcctgaagaaaagattctcccatagacccgtgcaggagaagttcgtgtgcctgaactgcggcttcgagacacacgcagccgagcaagccgccctgaacatcgccagatcctggctgttcctgcggagccaggagtacaagaaataccagacaaacaagacaaccggcaacaccgataagagagccttcgtcgagacctggcagtccttttaccggaagaagcttaaggaggtgtggaaacctgccgtgcggtctggcggatctggcggaggctccaccagccccaagaaaaagagaaaagtctaagctgccttctgcggggcttgccttctggccatgcccttcttctctcccttgcacctgtacctcttggtctttgaataaagcctgagtaggaaggctagcaaaaaaaaaaaaaaaaaaaaaaaaaaaaaaaaaaaaaaaaaaaaaaaaaaaaaaaaaaaaaaaaaaaaaaaaaaaaaaaa

SEQ ID NO: 13575 - RNA, 5785 nt, synthetic construct
  source 1..5785: mol_type = other RNA
aggaaataagagagaaaagaagagtaagaagaaatataagagccaccatggcccctaagaagaagcgtaaagtgagccggatggaacgcctcgtctacgaggtgcggcagaagtgcagaaacatcgaggacatctgcatctcctgcggatctctgaacgtgaccctggagcacccactgttcatcggcggcatgtgccagaactgtaaaaactgttttctggagtgtgcctatcaatacgacgatgacggctaccagagctactgcaccatctgttgcggcggaagagaggtgctgatgtgtggaaataacaactgctgccggtgcttctgcgtggaatgcgtggacctgctggtgggccccggcgccgcccaggccgctattaaggaagatccttggaactgctacatgtgcggccacaagggcacatacggcctgctgagacggagagaggactggcctagcagactgcagatgttcttcgccaataaccacgaccaggagttcgacccccctaaggtgtaccctcccgtccccgccgagaagagaaagcccatccgggtcctgagcctgttcgatggcatcgccaccggtctgctggtgctgaaggacctgggcatccaggtggataggtacattgcctccgaggtgtgcgaggactccatcaccgtgggaatggtgcgtcatcagggcaagatcatgtacgtgggcgacgtgcggagcgtgacacagaagcatatccaggagtggggccctttcgacctggtgatcggcggcagcccttgcaatgacctgagcatcgtgaacccagcccggaagggcctgtacgagggaaccggcagactgttcttcgagttttacagactgctgcacgacgcccggcctaaggaaggcgacgaccggcccttcttttggctgttcgagaatgtggtggccatgggagtcagcgacaagcgggatattagccggttcctggagagcaaccccgtgatgatcgatgccaaggaagtgagcgccgcccaccgggccagatacttctggggcaatctgcctggcatgaacagacccctggccagcaccgtgaacgacaagctggagctgcaggagtgcctggagcacggccggatcgccaagttcagcaaggtgagaaccatcaccacccgaagcaacagcatcaaacaaggcaaggaccagcactttcctgtgttcatgaacgagaaggaggacatcctgtggtgtaccgagatggagagagtgttcgggttcccagtccactacacagatgtcagcaacatgtctagactggccagacagagactgctgggaagaagctggtccgtccctgtgatcagacacctgttcgcccctctgaaggagtacttcgcctgcgtgagcagcggcaacagcaacgccaacagccggggccccagcttctctagcggcctggtgccactgtccctgagagggagccacatgggccccatggagatctacaaaaccgtgagcgcctggaagcggcagcctgtgcgcgtgctgagcctgtttcggaatatcgataaagtcctgaaaagcctgggattcctggagagcggctctggctccggcggtggcaccctgaagtacgtggaggatgtgacaaacgtggtcagacgggatgtggagaagtggggccccttcgatctggtgtacggcagcacccaacccctgggcagctcttgtgaccggtgccctggctggtacatgtttcagttccaccggatcctgcagtacgccctgccgagacaggagtcccagcggccattcttttggattttcatggacaacttgctgctgaccgaggatgaccaggaaactaccactcggttcctgcagaccgaagccgtgaccctgcaggacgtgagaggccgggactaccagaacgccatgcgggtgtggtccaacatccctggactgaaaagcaagcacgcacctctgacccctaaagaagaggagtacctgcaggcccaggtgcggagcagaagcaagctggacgcccctaaggtggatctgctggtgaagaattgcctcctgcccctgagagagtacttcaagtatttcagccagaatagtctgcccctgggaggcagcggcggcggcctgcagggcggcgtgaccttcgaggacgtggccgtggacttcacccaggaggagtggcagcagctgagccccgagcagaggggcctgtacagggacgtgaccctggagaactacaggaacctggccagcatgggcggcgaggacttcgccaagcccgaggtgatcctgaggctggagaacggcgaggagccctggatggtggagacccaggtgctgaggagctgcggccccgccgagaaggacggcggcccaagcagcggcgcccctcctcccagcggcggcagcccagccggctccccaacctctaccgaggagggcacctctgagtccgccacccccgagagcggccctggcacctccaccgagcccagcgagggcagcgcacccggcagccctgccggcagccccacctccacagaggagggaaccagcaccgagcccagcgaaggcagcgccccaggcaccagcaccgagcctagtgagcaggagattaaacggatcaacaagatcagaagaagacttgtgaaagacagcaacaccaagaaggccggcaagacaggccccatgaaaaccctgctggttagagtgatgacacccgatctgagagagcggctggaaaacctgagaaagaagcctgaaaatatcccccagcccatcagcaatacatctagagccaacctgaataagctgctgaccgattacaccgaaatgaagaaggcgatcctgcatgtgtactgggaagagttccagaaggaccctgtgggcctgatgagccgggtggcccagcctgccagcaagaagatcgatcagaacaagctgaaacctgagatggacgagaagggcaacctgaccaccgccggctttgcctgctctcagtgtggccagcccctgttcgtgtacaagctggagcaggtgtctgagaagggcaaggcttacaccaactacttcggacggtgcaatgtggccgagcacgaaaagctgatcctgctggcccagctgaagcccgagaaggatagcgacgaagccgtgacatatagcctgggaaagtttgggcagagggccctggatttctacagcattcatgtgaccaaggagtccacccaccccgtgaagcccctggcccagatcgccggaaacagatacgcctccggacctgtgggaaaggccctgagcgacgcatgtatgggcacaatcgcctccttcctgtctaagtaccaggacatcatcatcgaacaccagaaggtggtgaagggcaaccagaagagactggagagcctgcgggagctggccggcaaggaaaacctggaataccctagcgtgaccctgccacctcagcctcacaccaaggagggcgttgatgcctacaacgaagtgatcgcccgggtgcgaatgtgggtgaacctgaacctgtggcagaagctgaagctaagcagagatgatgccaagcctctgctgagactgaagggattcccttcctttcctctggtcgagagacaggccaacgaagtggactggtgggacatggtgtgtaacgtgaagaagctgatcaacgagaaaaaggaggatggcaaggtgttttggcagaatctggctggctacaagagacaggaagccctgagaccatacctgagcagcgaggaagatcggaagaagggaaagaaattcgctcggtaccagctgggcgacctgctgctgcacctggaaaagaagcacggcgaggactggggaaaggtgtacgacgaggcctgggagcggattgacaagaaagtggaaggcctgagcaagcacatcaagctggaagaggaacggagaagcgaggacgcccagagcaaggccgccctgaccgactggctgcgggctaaggccagcttcgtgatcgagggcctgaaggaggccgacaaggacgagttctgcagatgcgagctgaagctgcagaagtggtacggggacctgcggggaaagcccttcgccatcgaagccgagaacagcatcctggacatcagcggcttcagcaagcagtacaactgtgccttcatctggcagaaggacggcgtgaagaagctgaacctgtacctgatcatcaactacttcaagggcggcaagctgcggttcaagaagatcaaacctgaagccttcgaagccaacagattctacaccgtgatcaacaaaaagagcggcgagatcgtgcccatggaggtgaacttcaacttcgacgaccccaacctgatcatcctgcctctggcctttggcaagagacagggcagagaattcatctggaacgacctgctgtccctggaaaccggcagcctgaagctggccaacggaagagtgatcgagaagacactgtacaacagaagaacccggcaggatgagcctgccctgttcgtggccctgaccttcgagcggcgggaggtcctggactcctccaatatcaaaccaatgaacctgatcggcgtggcaagaggcgaaaacatccccgccgtgatcgccctgaccgaccccgagggctgcccactgagccggtttaaggatagcctgggaaacccaacccacatcctgagaatcggcgagagctataaggagaagcagcggaccatccaggccaagaaggaggtggagcagcggagagccggcggctacagccggaagtacgccagcaaagccaagaatctggcagacgatatggtgagaaacaccgctagagatctgctgtactacgccgtgacccaggatgccatgctgatcttcgccaacctgagccggggcttcggccggcagggcaagcggaccttcatggccgagagacagtacacacggatggaggactggctgaccgccaagctggcctacgagggcctgagcaagacctacctgtccaagacactggcccagtacacctccaagacatgcagcaactgtgggtttaccatcaccagcgccgactacgacagggtgctggagaagctgaagaagacagcaacaggctggatgaccacaattaacggcaaggagctgaaggtggagggccagattacctactacaacagatacaagagacagaacgtagtcaaggacctgtccgtcgagctggatagactgagcgaagaatctgtgaacaacgacatctcctcctggacaaagggcagaagcggagaagctctgagcctcctgaagaaaagattctcccatagacccgtgcaggagaagttcgtgtgcctgaactgcggcttcgagacacacgcagccgagcaagccgccctgaacatcgccagatcctggctgttcctgcggagccaggagtacaagaaataccagacaaacaagacaaccggcaacaccgataagagagccttcgtcgagacctggcagtccttttaccggaagaagcttaaggaggtgtggaaacctgccgtgcggtctggcggatctggcggaggctccaccagccccaagaaaaagagaaaagtctaagctgccttctgcggggcttgccttctggccatgcccttcttctctcccttgcacctgtacctcttggtctttgaataaagcctgagtaggaaggctagcaaaaaaaaaaaaaaaaaaaaaaaaaaaaaaaaaaaaaaaaaaaaaaaaaaaaaaaaaaaaaaaaaaaaaaaaaaaaaaaa

SEQ ID NO: 13576 - RNA, 5785 nt, synthetic construct
  source 1..5785: mol_type = other RNA
aggaaataagagagaaaagaagagtaagaagaaatataagagccaccatggcccctaagaagaagcgtaaagtgagccggatggaacgcctcgtctacgaggtgcggcagaagtgcagaaacatcgaggacatctgcatctcctgcggatctctgaacgtgaccctggagcacccactgttcatcggcggcatgtgccagaactgtaaaaactgttttctggagtgtgcctatcaatacgacgatgacggctaccagagctactgcaccatctgttgcggcggaagagaggtgctgatgtgtggaaataacaactgctgccggtgcttctgcgtggaatgcgtggacctgctggtgggccccggcgccgcccaggccgctattaaggaagatccttggaactgctacatgtgcggccacaagggcacatacggcctgctgagacggagagaggactggcctagcagactgcagatgttcttcgccaataaccacgaccaggagttcgacccccctaaggtgtaccctcccgtccccgccgagaagagaaagcccatccgggtcctgagcctgttcgatggcatcgccaccggtctgctggtgctgaaggacctgggcatccaggtggataggtacattgcctccgaggtgtgcgaggactccatcaccgtgggaatggtgcgtcatcagggcaagatcatgtacgtgggcgacgtgcggagcgtgacacagaagcatatccaggagtggggccctttcgacctggtgatcggcggcagcccttgcaatgacctgagcatcgtgaacccagcccggaagggcctgtacgagggaaccggcagactgttcttcgagttttacagactgctgcacgacgcccggcctaaggaaggcgacgaccggcccttcttttggctgttcgagaatgtggtggccatgggagtcagcgacaagcgggatattagccggttcctggagagcaaccccgtgatgatcgatgccaaggaagtgagcgccgcccaccgggccagatacttctggggcaatctgcctggcatgaacagacccctggccagcaccgtgaacgacaagctggagctgcaggagtgcctggagcacggccggatcgccaagttcagcaaggtgagaaccatcaccacccgaagcaacagcatcaaacaaggcaaggaccagcactttcctgtgttcatgaacgagaaggaggacatcctgtggtgtaccgagatggagagagtgttcgggttcccagtccactacacagatgtcagcaacatgtctagactggccagacagagactgctgggaagaagctggtccgtccctgtgatcagacacctgttcgcccctctgaaggagtacttcgcctgcgtgagcagcggcaacagcaacgccaacagccggggccccagcttctctagcggcctggtgccactgtccctgagagggagccacatgggccccatggagatctacaaaaccgtgagcgcctggaagcggcagcctgtgcgcgtgctgagcctgtttcggaatatcgataaagtcctgaaaagcctgggattcctggagagcggctctggctccggcggtggcaccctgaagtacgtggaggatgtgacaaacgtggtcagacgggatgtggagaagtggggccccttcgatctggtgtacggcagcacccaacccctgggcagctcttgtgaccggtgccctggctggtacatgtttcagttccaccggatcctgcagtacgccctgccgagacaggagtcccagcggccattcttttggattttcatggacaacttgctgctgaccgaggatgaccaggaaactaccactcggttcctgcagaccgaagccgtgaccctgcaggacgtgagaggccgggactaccagaacgccatgcgggtgtggtccaacatccctggactgaaaagcaagcacgcacctctgacccctaaagaagaggagtacctgcaggcccaggtgcggagcagaagcaagctggacgcccctaaggtggatctgctggtgaagaattgcctcctgcccctgagagagtacttcaagtatttcagccagaatagtctgcccctgggaggcagcggcggcggcatggccgccgccgccctgagggaccccgcccagcagggctacgtgaccttcgaggacgtggccgtgtacttcagccaggaggagtggaggctgctggacgaggcccagaagctgctgtacaggaacgtgatgctggagaacttcagcctgctggccagcctgggcctggccagcagcaagacccacgagatcacccagctggagagctgggaggagcccttcatgcccgcctgggaggtggtgggcggcccaagcagcggcgcccctcctcccagcggcggcagcccagccggctccccaacctctaccgaggagggcacctctgagtccgccacccccgagagcggccctggcacctccaccgagcccagcgagggcagcgcacccggcagccctgccggcagccccacctccacagaggagggaaccagcaccgagcccagcgaaggcagcgccccaggcaccagcaccgagcctagtgagcaggagattaaacggatcaacaagatcagaagaagacttgtgaaagacagcaacaccaagaaggccggcaagacaggccccatgaaaaccctgctggttagagtgatgacacccgatctgagagagcggctggaaaacctgagaaagaagcctgaaaatatcccccagcccatcagcaatacatctagagccaacctgaataagctgctgaccgattacaccgaaatgaagaaggcgatcctgcatgtgtactgggaagagttccagaaggaccctgtgggcctgatgagccgggtggcccagcctgccagcaagaagatcgatcagaacaagctgaaacctgagatggacgagaagggcaacctgaccaccgccggctttgcctgctctcagtgtggccagcccctgttcgtgtacaagctggagcaggtgtctgagaagggcaaggcttacaccaactacttcggacggtgcaatgtggccgagcacgaaaagctgatcctgctggcccagctgaagcccgagaaggatagcgacgaagccgtgacatatagcctgggaaagtttgggcagagggccctggatttctacagcattcatgtgaccaaggagtccacccaccccgtgaagcccctggcccagatcgccggaaacagatacgcctccggacctgtgggaaaggccctgagcgacgcatgtatgggcacaatcgcctccttcctgtctaagtaccaggacatcatcatcgaacaccagaaggtggtgaagggcaaccagaagagactggagagcctgcgggagctggccggcaaggaaaacctggaataccctagcgtgaccctgccacctcagcctcacaccaaggagggcgttgatgcctacaacgaagtgatcgcccgggtgcgaatgtgggtgaacctgaacctgtggcagaagctgaagctaagcagagatgatgccaagcctctgctgagactgaagggattcccttcctttcctctggtcgagagacaggccaacgaagtggactggtgggacatggtgtgtaacgtgaagaagctgatcaacgagaaaaaggaggatggcaaggtgttttggcagaatctggctggctacaagagacaggaagccctgagaccatacctgagcagcgaggaagatcggaagaagggaaagaaattcgctcggtaccagctgggcgacctgctgctgcacctggaaaagaagcacggcgaggactggggaaaggtgtacgacgaggcctgggagcggattgacaagaaagtggaaggcctgagcaagcacatcaagctggaagaggaacggagaagcgaggacgcccagagcaaggccgccctgaccgactggctgcgggctaaggccagcttcgtgatcgagggcctgaaggaggccgacaaggacgagttctgcagatgcgagctgaagctgcagaagtggtacggggacctgcggggaaagcccttcgccatcgaagccgagaacagcatcctggacatcagcggcttcagcaagcagtacaactgtgccttcatctggcagaaggacggcgtgaagaagctgaacctgtacctgatcatcaactacttcaagggcggcaagctgcggttcaagaagatcaaacctgaagccttcgaagccaacagattctacaccgtgatcaacaaaaagagcggcgagatcgtgcccatggaggtgaacttcaacttcgacgaccccaacctgatcatcctgcctctggcctttggcaagagacagggcagagaattcatctggaacgacctgctgtccctggaaaccggcagcctgaagctggccaacggaagagtgatcgagaagacactgtacaacagaagaacccggcaggatgagcctgccctgttcgtggccctgaccttcgagcggcgggaggtcctggactcctccaatatcaaaccaatgaacctgatcggcgtggcaagaggcgaaaacatccccgccgtgatcgccctgaccgaccccgagggctgcccactgagccggtttaaggatagcctgggaaacccaacccacatcctgagaatcggcgagagctataaggagaagcagcggaccatccaggccaagaaggaggtggagcagcggagagccggcggctacagccggaagtacgccagcaaagccaagaatctggcagacgatatggtgagaaacaccgctagagatctgctgtactacgccgtgacccaggatgccatgctgatcttcgccaacctgagccggggcttcggccggcagggcaagcggaccttcatggccgagagacagtacacacggatggaggactggctgaccgccaagctggcctacgagggcctgagcaagacctacctgtccaagacactggcccagtacacctccaagacatgcagcaactgtgggtttaccatcaccagcgccgactacgacagggtgctggagaagctgaagaagacagcaacaggctggatgaccacaattaacggcaaggagctgaaggtggagggccagattacctactacaacagatacaagagacagaacgtagtcaaggacctgtccgtcgagctggatagactgagcgaagaatctgtgaacaacgacatctcctcctggacaaagggcagaagcggagaagctctgagcctcctgaagaaaagattctcccatagacccgtgcaggagaagttcgtgtgcctgaactgcggcttcgagacacacgcagccgagcaagccgccctgaacatcgccagatcctggctgttcctgcggagccaggagtacaagaaataccagacaaacaagacaaccggcaacaccgataagagagccttcgtcgagacctggcagtccttttaccggaagaagcttaaggaggtgtggaaacctgccgtgcggtctggcggatctggcggaggctccaccagccccaagaaaaagagaaaagtctaagctgccttctgcggggcttgccttctggccatgcccttcttctctcccttgcacctgtacctcttggtctttgaataaagcctgagtaggaaggctagcaaaaaaaaaaaaaaaaaaaaaaaaaaaaaaaaaaaaaaaaaaaaaaaaaaaaaaaaaaaaaaaaaaaaaaaaaaaaaaaa

SEQ ID NO: 13577 - RNA, 5785 nt, synthetic construct
  source 1..5785: mol_type = other RNA
aggaaataagagagaaaagaagagtaagaagaaatataagagccaccatggcccctaagaagaagcgtaaagtgagccggatggaacgcctcgtctacgaggtgcggcagaagtgcagaaacatcgaggacatctgcatctcctgcggatctctgaacgtgaccctggagcacccactgttcatcggcggcatgtgccagaactgtaaaaactgttttctggagtgtgcctatcaatacgacgatgacggctaccagagctactgcaccatctgttgcggcggaagagaggtgctgatgtgtggaaataacaactgctgccggtgcttctgcgtggaatgcgtggacctgctggtgggccccggcgccgcccaggccgctattaaggaagatccttggaactgctacatgtgcggccacaagggcacatacggcctgctgagacggagagaggactggcctagcagactgcagatgttcttcgccaataaccacgaccaggagttcgacccccctaaggtgtaccctcccgtccccgccgagaagagaaagcccatccgggtcctgagcctgttcgatggcatcgccaccggtctgctggtgctgaaggacctgggcatccaggtggataggtacattgcctccgaggtgtgcgaggactccatcaccgtgggaatggtgcgtcatcagggcaagatcatgtacgtgggcgacgtgcggagcgtgacacagaagcatatccaggagtggggccctttcgacctggtgatcggcggcagcccttgcaatgacctgagcatcgtgaacccagcccggaagggcctgtacgagggaaccggcagactgttcttcgagttttacagactgctgcacgacgcccggcctaaggaaggcgacgaccggcccttcttttggctgttcgagaatgtggtggccatgggagtcagcgacaagcgggatattagccggttcctggagagcaaccccgtgatgatcgatgccaaggaagtgagcgccgcccaccgggccagatacttctggggcaatctgcctggcatgaacagacccctggccagcaccgtgaacgacaagctggagctgcaggagtgcctggagcacggccggatcgccaagttcagcaaggtgagaaccatcaccacccgaagcaacagcatcaaacaaggcaaggaccagcactttcctgtgttcatgaacgagaaggaggacatcctgtggtgtaccgagatggagagagtgttcgggttcccagtccactacacagatgtcagcaacatgtctagactggccagacagagactgctgggaagaagctggtccgtccctgtgatcagacacctgttcgcccctctgaaggagtacttcgcctgcgtgagcagcggcaacagcaacgccaacagccggggccccagcttctctagcggcctggtgccactgtccctgagagggagccacatgggccccatggagatctacaaaaccgtgagcgcctggaagcggcagcctgtgcgcgtgctgagcctgtttcggaatatcgataaagtcctgaaaagcctgggattcctggagagcggctctggctccggcggtggcaccctgaagtacgtggaggatgtgacaaacgtggtcagacgggatgtggagaagtggggccccttcgatctggtgtacggcagcacccaacccctgggcagctcttgtgaccggtgccctggctggtacatgtttcagttccaccggatcctgcagtacgccctgccgagacaggagtcccagcggccattcttttggattttcatggacaacttgctgctgaccgaggatgaccaggaaactaccactcggttcctgcagaccgaagccgtgaccctgcaggacgtgagaggccgggactaccagaacgccatgcgggtgtggtccaacatccctggactgaaaagcaagcacgcacctctgacccctaaagaagaggagtacctgcaggcccaggtgcggagcagaagcaagctggacgcccctaaggtggatctgctggtgaagaattgcctcctgcccctgagagagtacttcaagtatttcagccagaatagtctgcccctgggaggcagcggcggcggcgagatggagcccctgaccttcagggacgtggccatcgagttcagcctggaggagtggcagtgcctgaaccccgcccagcaggacctgttcaggaacgtgatgctggagaactacaggaacctggtgttcctgggcatcgccgccagcaagcccgacctgatcacctgcctggagaaggccaaggagccctggaagatgaagcagcacgagatggtggacgagccccccggcgccagcaccttcggcggcccaagcagcggcgcccctcctcccagcggcggcagcccagccggctccccaacctctaccgaggagggcacctctgagtccgccacccccgagagcggccctggcacctccaccgagcccagcgagggcagcgcacccggcagccctgccggcagccccacctccacagaggagggaaccagcaccgagcccagcgaaggcagcgccccaggcaccagcaccgagcctagtgagcaggagattaaacggatcaacaagatcagaagaagacttgtgaaagacagcaacaccaagaaggccggcaagacaggccccatgaaaaccctgctggttagagtgatgacacccgatctgagagagcggctggaaaacctgagaaagaagcctgaaaatatcccccagcccatcagcaatacatctagagccaacctgaataagctgctgaccgattacaccgaaatgaagaaggcgatcctgcatgtgtactgggaagagttccagaaggaccctgtgggcctgatgagccgggtggcccagcctgccagcaagaagatcgatcagaacaagctgaaacctgagatggacgagaagggcaacctgaccaccgccggctttgcctgctctcagtgtggccagcccctgttcgtgtacaagctggagcaggtgtctgagaagggcaaggcttacaccaactacttcggacggtgcaatgtggccgagcacgaaaagctgatcctgctggcccagctgaagcccgagaaggatagcgacgaagccgtgacatatagcctgggaaagtttgggcagagggccctggatttctacagcattcatgtgaccaaggagtccacccaccccgtgaagcccctggcccagatcgccggaaacagatacgcctccggacctgtgggaaaggccctgagcgacgcatgtatgggcacaatcgcctccttcctgtctaagtaccaggacatcatcatcgaacaccagaaggtggtgaagggcaaccagaagagactggagagcctgcgggagctggccggcaaggaaaacctggaataccctagcgtgaccctgccacctcagcctcacaccaaggagggcgttgatgcctacaacgaagtgatcgcccgggtgcgaatgtgggtgaacctgaacctgtggcagaagctgaagctaagcagagatgatgccaagcctctgctgagactgaagggattcccttcctttcctctggtcgagagacaggccaacgaagtggactggtgggacatggtgtgtaacgtgaagaagctgatcaacgagaaaaaggaggatggcaaggtgttttggcagaatctggctggctacaagagacaggaagccctgagaccatacctgagcagcgaggaagatcggaagaagggaaagaaattcgctcggtaccagctgggcgacctgctgctgcacctggaaaagaagcacggcgaggactggggaaaggtgtacgacgaggcctgggagcggattgacaagaaagtggaaggcctgagcaagcacatcaagctggaagaggaacggagaagcgaggacgcccagagcaaggccgccctgaccgactggctgcgggctaaggccagcttcgtgatcgagggcctgaaggaggccgacaaggacgagttctgcagatgcgagctgaagctgcagaagtggtacggggacctgcggggaaagcccttcgccatcgaagccgagaacagcatcctggacatcagcggcttcagcaagcagtacaactgtgccttcatctggcagaaggacggcgtgaagaagctgaacctgtacctgatcatcaactacttcaagggcggcaagctgcggttcaagaagatcaaacctgaagccttcgaagccaacagattctacaccgtgatcaacaaaaagagcggcgagatcgtgcccatggaggtgaacttcaacttcgacgaccccaacctgatcatcctgcctctggcctttggcaagagacagggcagagaattcatctggaacgacctgctgtccctggaaaccggcagcctgaagctggccaacggaagagtgatcgagaagacactgtacaacagaagaacccggcaggatgagcctgccctgttcgtggccctgaccttcgagcggcgggaggtcctggactcctccaatatcaaaccaatgaacctgatcggcgtggcaagaggcgaaaacatccccgccgtgatcgccctgaccgaccccgagggctgcccactgagccggtttaaggatagcctgggaaacccaacccacatcctgagaatcggcgagagctataaggagaagcagcggaccatccaggccaagaaggaggtggagcagcggagagccggcggctacagccggaagtacgccagcaaagccaagaatctggcagacgatatggtgagaaacaccgctagagatctgctgtactacgccgtgacccaggatgccatgctgatcttcgccaacctgagccggggcttcggccggcagggcaagcggaccttcatggccgagagacagtacacacggatggaggactggctgaccgccaagctggcctacgagggcctgagcaagacctacctgtccaagacactggcccagtacacctccaagacatgcagcaactgtgggtttaccatcaccagcgccgactacgacagggtgctggagaagctgaagaagacagcaacaggctggatgaccacaattaacggcaaggagctgaaggtggagggccagattacctactacaacagatacaagagacagaacgtagtcaaggacctgtccgtcgagctggatagactgagcgaagaatctgtgaacaacgacatctcctcctggacaaagggcagaagcggagaagctctgagcctcctgaagaaaagattctcccatagacccgtgcaggagaagttcgtgtgcctgaactgcggcttcgagacacacgcagccgagcaagccgccctgaacatcgccagatcctggctgttcctgcggagccaggagtacaagaaataccagacaaacaagacaaccggcaacaccgataagagagccttcgtcgagacctggcagtccttttaccggaagaagcttaaggaggtgtggaaacctgccgtgcggtctggcggatctggcggaggctccaccagccccaagaaaaagagaaaagtctaagctgccttctgcggggcttgccttctggccatgcccttcttctctcccttgcacctgtacctcttggtctttgaataaagcctgagtaggaaggctagcaaaaaaaaaaaaaaaaaaaaaaaaaaaaaaaaaaaaaaaaaaaaaaaaaaaaaaaaaaaaaaaaaaaaaaaaaaaaaaaa

SEQ ID NO: 13578 - RNA, 5785 nt, synthetic construct
  source 1..5785: mol_type = other RNA
aggaaataagagagaaaagaagagtaagaagaaatataagagccaccatggcccctaagaagaagcgtaaagtgagccggatggaacgcctcgtctacgaggtgcggcagaagtgcagaaacatcgaggacatctgcatctcctgcggatctctgaacgtgaccctggagcacccactgttcatcggcggcatgtgccagaactgtaaaaactgttttctggagtgtgcctatcaatacgacgatgacggctaccagagctactgcaccatctgttgcggcggaagagaggtgctgatgtgtggaaataacaactgctgccggtgcttctgcgtggaatgcgtggacctgctggtgggccccggcgccgcccaggccgctattaaggaagatccttggaactgctacatgtgcggccacaagggcacatacggcctgctgagacggagagaggactggcctagcagactgcagatgttcttcgccaataaccacgaccaggagttcgacccccctaaggtgtaccctcccgtccccgccgagaagagaaagcccatccgggtcctgagcctgttcgatggcatcgccaccggtctgctggtgctgaaggacctgggcatccaggtggataggtacattgcctccgaggtgtgcgaggactccatcaccgtgggaatggtgcgtcatcagggcaagatcatgtacgtgggcgacgtgcggagcgtgacacagaagcatatccaggagtggggccctttcgacctggtgatcggcggcagcccttgcaatgacctgagcatcgtgaacccagcccggaagggcctgtacgagggaaccggcagactgttcttcgagttttacagactgctgcacgacgcccggcctaaggaaggcgacgaccggcccttcttttggctgttcgagaatgtggtggccatgggagtcagcgacaagcgggatattagccggttcctggagagcaaccccgtgatgatcgatgccaaggaagtgagcgccgcccaccgggccagatacttctggggcaatctgcctggcatgaacagacccctggccagcaccgtgaacgacaagctggagctgcaggagtgcctggagcacggccggatcgccaagttcagcaaggtgagaaccatcaccacccgaagcaacagcatcaaacaaggcaaggaccagcactttcctgtgttcatgaacgagaaggaggacatcctgtggtgtaccgagatggagagagtgttcgggttcccagtccactacacagatgtcagcaacatgtctagactggccagacagagactgctgggaagaagctggtccgtccctgtgatcagacacctgttcgcccctctgaaggagtacttcgcctgcgtgagcagcggcaacagcaacgccaacagccggggccccagcttctctagcggcctggtgccactgtccctgagagggagccacatgggccccatggagatctacaaaaccgtgagcgcctggaagcggcagcctgtgcgcgtgctgagcctgtttcggaatatcgataaagtcctgaaaagcctgggattcctggagagcggctctggctccggcggtggcaccctgaagtacgtggaggatgtgacaaacgtggtcagacgggatgtggagaagtggggccccttcgatctggtgtacggcagcacccaacccctgggcagctcttgtgaccggtgccctggctggtacatgtttcagttccaccggatcctgcagtacgccctgccgagacaggagtcccagcggccattcttttggattttcatggacaacttgctgctgaccgaggatgaccaggaaactaccactcggttcctgcagaccgaagccgtgaccctgcaggacgtgagaggccgggactaccagaacgccatgcgggtgtggtccaacatccctggactgaaaagcaagcacgcacctctgacccctaaagaagaggagtacctgcaggcccaggtgcggagcagaagcaagctggacgcccctaaggtggatctgctggtgaagaattgcctcctgcccctgagagagtacttcaagtatttcagccagaatagtctgcccctgggaggcagcggcggcggcaagcccggcgccgtgagcttcgccgacgtggccgtgtacttcagccccgaggagtggggctgcctgaggcccgcccagaggagcctgtacagggacgtgatgagggagacctacggccacctgggcgccctgggcttccccggccccaagcccgccctgatcagctggatggagcaggagagcgaggcctggagcagcgccgcccaggaccccgagaagggcgagagcctgggcggcgcccagggcggcccaagcagcggcgcccctcctcccagcggcggcagcccagccggctccccaacctctaccgaggagggcacctctgagtccgccacccccgagagcggccctggcacctccaccgagcccagcgagggcagcgcacccggcagccctgccggcagccccacctccacagaggagggaaccagcaccgagcccagcgaaggcagcgccccaggcaccagcaccgagcctagtgagcaggagattaaacggatcaacaagatcagaagaagacttgtgaaagacagcaacaccaagaaggccggcaagacaggccccatgaaaaccctgctggttagagtgatgacacccgatctgagagagcggctggaaaacctgagaaagaagcctgaaaatatcccccagcccatcagcaatacatctagagccaacctgaataagctgctgaccgattacaccgaaatgaagaaggcgatcctgcatgtgtactgggaagagttccagaaggaccctgtgggcctgatgagccgggtggcccagcctgccagcaagaagatcgatcagaacaagctgaaacctgagatggacgagaagggcaacctgaccaccgccggctttgcctgctctcagtgtggccagcccctgttcgtgtacaagctggagcaggtgtctgagaagggcaaggcttacaccaactacttcggacggtgcaatgtggccgagcacgaaaagctgatcctgctggcccagctgaagcccgagaaggatagcgacgaagccgtgacatatagcctgggaaagtttgggcagagggccctggatttctacagcattcatgtgaccaaggagtccacccaccccgtgaagcccctggcccagatcgccggaaacagatacgcctccggacctgtgggaaaggccctgagcgacgcatgtatgggcacaatcgcctccttcctgtctaagtaccaggacatcatcatcgaacaccagaaggtggtgaagggcaaccagaagagactggagagcctgcgggagctggccggcaaggaaaacctggaataccctagcgtgaccctgccacctcagcctcacaccaaggagggcgttgatgcctacaacgaagtgatcgcccgggtgcgaatgtgggtgaacctgaacctgtggcagaagctgaagctaagcagagatgatgccaagcctctgctgagactgaagggattcccttcctttcctctggtcgagagacaggccaacgaagtggactggtgggacatggtgtgtaacgtgaagaagctgatcaacgagaaaaaggaggatggcaaggtgttttggcagaatctggctggctacaagagacaggaagccctgagaccatacctgagcagcgaggaagatcggaagaagggaaagaaattcgctcggtaccagctgggcgacctgctgctgcacctggaaaagaagcacggcgaggactggggaaaggtgtacgacgaggcctgggagcggattgacaagaaagtggaaggcctgagcaagcacatcaagctggaagaggaacggagaagcgaggacgcccagagcaaggccgccctgaccgactggctgcgggctaaggccagcttcgtgatcgagggcctgaaggaggccgacaaggacgagttctgcagatgcgagctgaagctgcagaagtggtacggggacctgcggggaaagcccttcgccatcgaagccgagaacagcatcctggacatcagcggcttcagcaagcagtacaactgtgccttcatctggcagaaggacggcgtgaagaagctgaacctgtacctgatcatcaactacttcaagggcggcaagctgcggttcaagaagatcaaacctgaagccttcgaagccaacagattctacaccgtgatcaacaaaaagagcggcgagatcgtgcccatggaggtgaacttcaacttcgacgaccccaacctgatcatcctgcctctggcctttggcaagagacagggcagagaattcatctggaacgacctgctgtccctggaaaccggcagcctgaagctggccaacggaagagtgatcgagaagacactgtacaacagaagaacccggcaggatgagcctgccctgttcgtggccctgaccttcgagcggcgggaggtcctggactcctccaatatcaaaccaatgaacctgatcggcgtggcaagaggcgaaaacatccccgccgtgatcgccctgaccgaccccgagggctgcccactgagccggtttaaggatagcctgggaaacccaacccacatcctgagaatcggcgagagctataaggagaagcagcggaccatccaggccaagaaggaggtggagcagcggagagccggcggctacagccggaagtacgccagcaaagccaagaatctggcagacgatatggtgagaaacaccgctagagatctgctgtactacgccgtgacccaggatgccatgctgatcttcgccaacctgagccggggcttcggccggcagggcaagcggaccttcatggccgagagacagtacacacggatggaggactggctgaccgccaagctggcctacgagggcctgagcaagacctacctgtccaagacactggcccagtacacctccaagacatgcagcaactgtgggtttaccatcaccagcgccgactacgacagggtgctggagaagctgaagaagacagcaacaggctggatgaccacaattaacggcaaggagctgaaggtggagggccagattacctactacaacagatacaagagacagaacgtagtcaaggacctgtccgtcgagctggatagactgagcgaagaatctgtgaacaacgacatctcctcctggacaaagggcagaagcggagaagctctgagcctcctgaagaaaagattctcccatagacccgtgcaggagaagttcgtgtgcctgaactgcggcttcgagacacacgcagccgagcaagccgccctgaacatcgccagatcctggctgttcctgcggagccaggagtacaagaaataccagacaaacaagacaaccggcaacaccgataagagagccttcgtcgagacctggcagtccttttaccggaagaagcttaaggaggtgtggaaacctgccgtgcggtctggcggatctggcggaggctccaccagccccaagaaaaagagaaaagtctaagctgccttctgcggggcttgccttctggccatgcccttcttctctcccttgcacctgtacctcttggtctttgaataaagcctgagtaggaaggctagcaaaaaaaaaaaaaaaaaaaaaaaaaaaaaaaaaaaaaaaaaaaaaaaaaaaaaaaaaaaaaaaaaaaaaaaaaaaaaaaa

SEQ ID NO: 13579 - RNA, 5785 nt, synthetic construct
  source 1..5785: mol_type = other RNA
aggaaataagagagaaaagaagagtaagaagaaatataagagccaccatggcccctaagaagaagcgtaaagtgagccggatggaacgcctcgtctacgaggtgcggcagaagtgcagaaacatcgaggacatctgcatctcctgcggatctctgaacgtgaccctggagcacccactgttcatcggcggcatgtgccagaactgtaaaaactgttttctggagtgtgcctatcaatacgacgatgacggctaccagagctactgcaccatctgttgcggcggaagagaggtgctgatgtgtggaaataacaactgctgccggtgcttctgcgtggaatgcgtggacctgctggtgggccccggcgccgcccaggccgctattaaggaagatccttggaactgctacatgtgcggccacaagggcacatacggcctgctgagacggagagaggactggcctagcagactgcagatgttcttcgccaataaccacgaccaggagttcgacccccctaaggtgtaccctcccgtccccgccgagaagagaaagcccatccgggtcctgagcctgttcgatggcatcgccaccggtctgctggtgctgaaggacctgggcatccaggtggataggtacattgcctccgaggtgtgcgaggactccatcaccgtgggaatggtgcgtcatcagggcaagatcatgtacgtgggcgacgtgcggagcgtgacacagaagcatatccaggagtggggccctttcgacctggtgatcggcggcagcccttgcaatgacctgagcatcgtgaacccagcccggaagggcctgtacgagggaaccggcagactgttcttcgagttttacagactgctgcacgacgcccggcctaaggaaggcgacgaccggcccttcttttggctgttcgagaatgtggtggccatgggagtcagcgacaagcgggatattagccggttcctggagagcaaccccgtgatgatcgatgccaaggaagtgagcgccgcccaccgggccagatacttctggggcaatctgcctggcatgaacagacccctggccagcaccgtgaacgacaagctggagctgcaggagtgcctggagcacggccggatcgccaagttcagcaaggtgagaaccatcaccacccgaagcaacagcatcaaacaaggcaaggaccagcactttcctgtgttcatgaacgagaaggaggacatcctgtggtgtaccgagatggagagagtgttcgggttcccagtccactacacagatgtcagcaacatgtctagactggccagacagagactgctgggaagaagctggtccgtccctgtgatcagacacctgttcgcccctctgaaggagtacttcgcctgcgtgagcagcggcaacagcaacgccaacagccggggccccagcttctctagcggcctggtgccactgtccctgagagggagccacatgggccccatggagatctacaaaaccgtgagcgcctggaagcggcagcctgtgcgcgtgctgagcctgtttcggaatatcgataaagtcctgaaaagcctgggattcctggagagcggctctggctccggcggtggcaccctgaagtacgtggaggatgtgacaaacgtggtcagacgggatgtggagaagtggggccccttcgatctggtgtacggcagcacccaacccctgggcagctcttgtgaccggtgccctggctggtacatgtttcagttccaccggatcctgcagtacgccctgccgagacaggagtcccagcggccattcttttggattttcatggacaacttgctgctgaccgaggatgaccaggaaactaccactcggttcctgcagaccgaagccgtgaccctgcaggacgtgagaggccgggactaccagaacgccatgcgggtgtggtccaacatccctggactgaaaagcaagcacgcacctctgacccctaaagaagaggagtacctgcaggcccaggtgcggagcagaagcaagctggacgcccctaaggtggatctgctggtgaagaattgcctcctgcccctgagagagtacttcaagtatttcagccagaatagtctgcccctgggaggcagcggcggcggcttccaggagctggtgagcttcaaggacgtgaccgtgggcttcacccaggaggagtggcagcacctggaccccacccagaggagcctgtacagggacgtgatgctggagaactacagcaacctggtgagcgtgggctactgcgtgaccaagcccgaggtgatcttcaggctggagcagggcgaggagccctggatcctggaggaggagttccccaggcagagcttccccgaggtgtggaagatcggcggcccaagcagcggcgcccctcctcccagcggcggcagcccagccggctccccaacctctaccgaggagggcacctctgagtccgccacccccgagagcggccctggcacctccaccgagcccagcgagggcagcgcacccggcagccctgccggcagccccacctccacagaggagggaaccagcaccgagcccagcgaaggcagcgccccaggcaccagcaccgagcctagtgagcaggagattaaacggatcaacaagatcagaagaagacttgtgaaagacagcaacaccaagaaggccggcaagacaggccccatgaaaaccctgctggttagagtgatgacacccgatctgagagagcggctggaaaacctgagaaagaagcctgaaaatatcccccagcccatcagcaatacatctagagccaacctgaataagctgctgaccgattacaccgaaatgaagaaggcgatcctgcatgtgtactgggaagagttccagaaggaccctgtgggcctgatgagccgggtggcccagcctgccagcaagaagatcgatcagaacaagctgaaacctgagatggacgagaagggcaacctgaccaccgccggctttgcctgctctcagtgtggccagcccctgttcgtgtacaagctggagcaggtgtctgagaagggcaaggcttacaccaactacttcggacggtgcaatgtggccgagcacgaaaagctgatcctgctggcccagctgaagcccgagaaggatagcgacgaagccgtgacatatagcctgggaaagtttgggcagagggccctggatttctacagcattcatgtgaccaaggagtccacccaccccgtgaagcccctggcccagatcgccggaaacagatacgcctccggacctgtgggaaaggccctgagcgacgcatgtatgggcacaatcgcctccttcctgtctaagtaccaggacatcatcatcgaacaccagaaggtggtgaagggcaaccagaagagactggagagcctgcgggagctggccggcaaggaaaacctggaataccctagcgtgaccctgccacctcagcctcacaccaaggagggcgttgatgcctacaacgaagtgatcgcccgggtgcgaatgtgggtgaacctgaacctgtggcagaagctgaagctaagcagagatgatgccaagcctctgctgagactgaagggattcccttcctttcctctggtcgagagacaggccaacgaagtggactggtgggacatggtgtgtaacgtgaagaagctgatcaacgagaaaaaggaggatggcaaggtgttttggcagaatctggctggctacaagagacaggaagccctgagaccatacctgagcagcgaggaagatcggaagaagggaaagaaattcgctcggtaccagctgggcgacctgctgctgcacctggaaaagaagcacggcgaggactggggaaaggtgtacgacgaggcctgggagcggattgacaagaaagtggaaggcctgagcaagcacatcaagctggaagaggaacggagaagcgaggacgcccagagcaaggccgccctgaccgactggctgcgggctaaggccagcttcgtgatcgagggcctgaaggaggccgacaaggacgagttctgcagatgcgagctgaagctgcagaagtggtacggggacctgcggggaaagcccttcgccatcgaagccgagaacagcatcctggacatcagcggcttcagcaagcagtacaactgtgccttcatctggcagaaggacggcgtgaagaagctgaacctgtacctgatcatcaactacttcaagggcggcaagctgcggttcaagaagatcaaacctgaagccttcgaagccaacagattctacaccgtgatcaacaaaaagagcggcgagatcgtgcccatggaggtgaacttcaacttcgacgaccccaacctgatcatcctgcctctggcctttggcaagagacagggcagagaattcatctggaacgacctgctgtccctggaaaccggcagcctgaagctggccaacggaagagtgatcgagaagacactgtacaacagaagaacccggcaggatgagcctgccctgttcgtggccctgaccttcgagcggcgggaggtcctggactcctccaatatcaaaccaatgaacctgatcggcgtggcaagaggcgaaaacatccccgccgtgatcgccctgaccgaccccgagggctgcccactgagccggtttaaggatagcctgggaaacccaacccacatcctgagaatcggcgagagctataaggagaagcagcggaccatccaggccaagaaggaggtggagcagcggagagccggcggctacagccggaagtacgccagcaaagccaagaatctggcagacgatatggtgagaaacaccgctagagatctgctgtactacgccgtgacccaggatgccatgctgatcttcgccaacctgagccggggcttcggccggcagggcaagcggaccttcatggccgagagacagtacacacggatggaggactggctgaccgccaagctggcctacgagggcctgagcaagacctacctgtccaagacactggcccagtacacctccaagacatgcagcaactgtgggtttaccatcaccagcgccgactacgacagggtgctggagaagctgaagaagacagcaacaggctggatgaccacaattaacggcaaggagctgaaggtggagggccagattacctactacaacagatacaagagacagaacgtagtcaaggacctgtccgtcgagctggatagactgagcgaagaatctgtgaacaacgacatctcctcctggacaaagggcagaagcggagaagctctgagcctcctgaagaaaagattctcccatagacccgtgcaggagaagttcgtgtgcctgaactgcggcttcgagacacacgcagccgagcaagccgccctgaacatcgccagatcctggctgttcctgcggagccaggagtacaagaaataccagacaaacaagacaaccggcaacaccgataagagagccttcgtcgagacctggcagtccttttaccggaagaagcttaaggaggtgtggaaacctgccgtgcggtctggcggatctggcggaggctccaccagccccaagaaaaagagaaaagtctaagctgccttctgcggggcttgccttctggccatgcccttcttctctcccttgcacctgtacctcttggtctttgaataaagcctgagtaggaaggctagcaaaaaaaaaaaaaaaaaaaaaaaaaaaaaaaaaaaaaaaaaaaaaaaaaaaaaaaaaaaaaaaaaaaaaaaaaaaaaaaa

SEQ ID NO: 13580 - RNA, 5785 nt, synthetic construct
  source 1..5785: mol_type = other RNA
aggaaataagagagaaaagaagagtaagaagaaatataagagccaccatggcccctaagaagaagcgtaaagtgagccggatggaacgcctcgtctacgaggtgcggcagaagtgcagaaacatcgaggacatctgcatctcctgcggatctctgaacgtgaccctggagcacccactgttcatcggcggcatgtgccagaactgtaaaaactgttttctggagtgtgcctatcaatacgacgatgacggctaccagagctactgcaccatctgttgcggcggaagagaggtgctgatgtgtggaaataacaactgctgccggtgcttctgcgtggaatgcgtggacctgctggtgggccccggcgccgcccaggccgctattaaggaagatccttggaactgctacatgtgcggccacaagggcacatacggcctgctgagacggagagaggactggcctagcagactgcagatgttcttcgccaataaccacgaccaggagttcgacccccctaaggtgtaccctcccgtccccgccgagaagagaaagcccatccgggtcctgagcctgttcgatggcatcgccaccggtctgctggtgctgaaggacctgggcatccaggtggataggtacattgcctccgaggtgtgcgaggactccatcaccgtgggaatggtgcgtcatcagggcaagatcatgtacgtgggcgacgtgcggagcgtgacacagaagcatatccaggagtggggccctttcgacctggtgatcggcggcagcccttgcaatgacctgagcatcgtgaacccagcccggaagggcctgtacgagggaaccggcagactgttcttcgagttttacagactgctgcacgacgcccggcctaaggaaggcgacgaccggcccttcttttggctgttcgagaatgtggtggccatgggagtcagcgacaagcgggatattagccggttcctggagagcaaccccgtgatgatcgatgccaaggaagtgagcgccgcccaccgggccagatacttctggggcaatctgcctggcatgaacagacccctggccagcaccgtgaacgacaagctggagctgcaggagtgcctggagcacggccggatcgccaagttcagcaaggtgagaaccatcaccacccgaagcaacagcatcaaacaaggcaaggaccagcactttcctgtgttcatgaacgagaaggaggacatcctgtggtgtaccgagatggagagagtgttcgggttcccagtccactacacagatgtcagcaacatgtctagactggccagacagagactgctgggaagaagctggtccgtccctgtgatcagacacctgttcgcccctctgaaggagtacttcgcctgcgtgagcagcggcaacagcaacgccaacagccggggccccagcttctctagcggcctggtgccactgtccctgagagggagccacatgggccccatggagatctacaaaaccgtgagcgcctggaagcggcagcctgtgcgcgtgctgagcctgtttcggaatatcgataaagtcctgaaaagcctgggattcctggagagcggctctggctccggcggtggcaccctgaagtacgtggaggatgtgacaaacgtggtcagacgggatgtggagaagtggggccccttcgatctggtgtacggcagcacccaacccctgggcagctcttgtgaccggtgccctggctggtacatgtttcagttccaccggatcctgcagtacgccctgccgagacaggagtcccagcggccattcttttggattttcatggacaacttgctgctgaccgaggatgaccaggaaactaccactcggttcctgcagaccgaagccgtgaccctgcaggacgtgagaggccgggactaccagaacgccatgcgggtgtggtccaacatccctggactgaaaagcaagcacgcacctctgacccctaaagaagaggagtacctgcaggcccaggtgcggagcagaagcaagctggacgcccctaaggtggatctgctggtgaagaattgcctcctgcccctgagagagtacttcaagtatttcagccagaatagtctgcccctgggaggcagcggcggcggcctgagggagagcgtgaccttcaaggacgtggccgtggacttcaccggcgaggagtggaggaggctggaccccgcccagagggccctgtacagggacgtgatgctggagaactacgagaacctggtgagcctgggcctgcccgtgagcaagctggacgtgatcagcctgctggagaggggcgaggccccctggtggctggagggcggcggcctgcagagcccctgcagcgacgccctgagccagggcggcccaagcagcggcgcccctcctcccagcggcggcagcccagccggctccccaacctctaccgaggagggcacctctgagtccgccacccccgagagcggccctggcacctccaccgagcccagcgagggcagcgcacccggcagccctgccggcagccccacctccacagaggagggaaccagcaccgagcccagcgaaggcagcgccccaggcaccagcaccgagcctagtgagcaggagattaaacggatcaacaagatcagaagaagacttgtgaaagacagcaacaccaagaaggccggcaagacaggccccatgaaaaccctgctggttagagtgatgacacccgatctgagagagcggctggaaaacctgagaaagaagcctgaaaatatcccccagcccatcagcaatacatctagagccaacctgaataagctgctgaccgattacaccgaaatgaagaaggcgatcctgcatgtgtactgggaagagttccagaaggaccctgtgggcctgatgagccgggtggcccagcctgccagcaagaagatcgatcagaacaagctgaaacctgagatggacgagaagggcaacctgaccaccgccggctttgcctgctctcagtgtggccagcccctgttcgtgtacaagctggagcaggtgtctgagaagggcaaggcttacaccaactacttcggacggtgcaatgtggccgagcacgaaaagctgatcctgctggcccagctgaagcccgagaaggatagcgacgaagccgtgacatatagcctgggaaagtttgggcagagggccctggatttctacagcattcatgtgaccaaggagtccacccaccccgtgaagcccctggcccagatcgccggaaacagatacgcctccggacctgtgggaaaggccctgagcgacgcatgtatgggcacaatcgcctccttcctgtctaagtaccaggacatcatcatcgaacaccagaaggtggtgaagggcaaccagaagagactggagagcctgcgggagctggccggcaaggaaaacctggaataccctagcgtgaccctgccacctcagcctcacaccaaggagggcgttgatgcctacaacgaagtgatcgcccgggtgcgaatgtgggtgaacctgaacctgtggcagaagctgaagctaagcagagatgatgccaagcctctgctgagactgaagggattcccttcctttcctctggtcgagagacaggccaacgaagtggactggtgggacatggtgtgtaacgtgaagaagctgatcaacgagaaaaaggaggatggcaaggtgttttggcagaatctggctggctacaagagacaggaagccctgagaccatacctgagcagcgaggaagatcggaagaagggaaagaaattcgctcggtaccagctgggcgacctgctgctgcacctggaaaagaagcacggcgaggactggggaaaggtgtacgacgaggcctgggagcggattgacaagaaagtggaaggcctgagcaagcacatcaagctggaagaggaacggagaagcgaggacgcccagagcaaggccgccctgaccgactggctgcgggctaaggccagcttcgtgatcgagggcctgaaggaggccgacaaggacgagttctgcagatgcgagctgaagctgcagaagtggtacggggacctgcggggaaagcccttcgccatcgaagccgagaacagcatcctggacatcagcggcttcagcaagcagtacaactgtgccttcatctggcagaaggacggcgtgaagaagctgaacctgtacctgatcatcaactacttcaagggcggcaagctgcggttcaagaagatcaaacctgaagccttcgaagccaacagattctacaccgtgatcaacaaaaagagcggcgagatcgtgcccatggaggtgaacttcaacttcgacgaccccaacctgatcatcctgcctctggcctttggcaagagacagggcagagaattcatctggaacgacctgctgtccctggaaaccggcagcctgaagctggccaacggaagagtgatcgagaagacactgtacaacagaagaacccggcaggatgagcctgccctgttcgtggccctgaccttcgagcggcgggaggtcctggactcctccaatatcaaaccaatgaacctgatcggcgtggcaagaggcgaaaacatccccgccgtgatcgccctgaccgaccccgagggctgcccactgagccggtttaaggatagcctgggaaacccaacccacatcctgagaatcggcgagagctataaggagaagcagcggaccatccaggccaagaaggaggtggagcagcggagagccggcggctacagccggaagtacgccagcaaagccaagaatctggcagacgatatggtgagaaacaccgctagagatctgctgtactacgccgtgacccaggatgccatgctgatcttcgccaacctgagccggggcttcggccggcagggcaagcggaccttcatggccgagagacagtacacacggatggaggactggctgaccgccaagctggcctacgagggcctgagcaagacctacctgtccaagacactggcccagtacacctccaagacatgcagcaactgtgggtttaccatcaccagcgccgactacgacagggtgctggagaagctgaagaagacagcaacaggctggatgaccacaattaacggcaaggagctgaaggtggagggccagattacctactacaacagatacaagagacagaacgtagtcaaggacctgtccgtcgagctggatagactgagcgaagaatctgtgaacaacgacatctcctcctggacaaagggcagaagcggagaagctctgagcctcctgaagaaaagattctcccatagacccgtgcaggagaagttcgtgtgcctgaactgcggcttcgagacacacgcagccgagcaagccgccctgaacatcgccagatcctggctgttcctgcggagccaggagtacaagaaataccagacaaacaagacaaccggcaacaccgataagagagccttcgtcgagacctggcagtccttttaccggaagaagcttaaggaggtgtggaaacctgccgtgcggtctggcggatctggcggaggctccaccagccccaagaaaaagagaaaagtctaagctgccttctgcggggcttgccttctggccatgcccttcttctctcccttgcacctgtacctcttggtctttgaataaagcctgagtaggaaggctagcaaaaaaaaaaaaaaaaaaaaaaaaaaaaaaaaaaaaaaaaaaaaaaaaaaaaaaaaaaaaaaaaaaaaaaaaaaaaaaaa

SEQ ID NO: 13581 - RNA, 5785 nt, synthetic construct
  source 1..5785: mol_type = other RNA
aggaaataagagagaaaagaagagtaagaagaaatataagagccaccatggcccctaagaagaagcgtaaagtgagccggatggaacgcctcgtctacgaggtgcggcagaagtgcagaaacatcgaggacatctgcatctcctgcggatctctgaacgtgaccctggagcacccactgttcatcggcggcatgtgccagaactgtaaaaactgttttctggagtgtgcctatcaatacgacgatgacggctaccagagctactgcaccatctgttgcggcggaagagaggtgctgatgtgtggaaataacaactgctgccggtgcttctgcgtggaatgcgtggacctgctggtgggccccggcgccgcccaggccgctattaaggaagatccttggaactgctacatgtgcggccacaagggcacatacggcctgctgagacggagagaggactggcctagcagactgcagatgttcttcgccaataaccacgaccaggagttcgacccccctaaggtgtaccctcccgtccccgccgagaagagaaagcccatccgggtcctgagcctgttcgatggcatcgccaccggtctgctggtgctgaaggacctgggcatccaggtggataggtacattgcctccgaggtgtgcgaggactccatcaccgtgggaatggtgcgtcatcagggcaagatcatgtacgtgggcgacgtgcggagcgtgacacagaagcatatccaggagtggggccctttcgacctggtgatcggcggcagcccttgcaatgacctgagcatcgtgaacccagcccggaagggcctgtacgagggaaccggcagactgttcttcgagttttacagactgctgcacgacgcccggcctaaggaaggcgacgaccggcccttcttttggctgttcgagaatgtggtggccatgggagtcagcgacaagcgggatattagccggttcctggagagcaaccccgtgatgatcgatgccaaggaagtgagcgccgcccaccgggccagatacttctggggcaatctgcctggcatgaacagacccctggccagcaccgtgaacgacaagctggagctgcaggagtgcctggagcacggccggatcgccaagttcagcaaggtgagaaccatcaccacccgaagcaacagcatcaaacaaggcaaggaccagcactttcctgtgttcatgaacgagaaggaggacatcctgtggtgtaccgagatggagagagtgttcgggttcccagtccactacacagatgtcagcaacatgtctagactggccagacagagactgctgggaagaagctggtccgtccctgtgatcagacacctgttcgcccctctgaaggagtacttcgcctgcgtgagcagcggcaacagcaacgccaacagccggggccccagcttctctagcggcctggtgccactgtccctgagagggagccacatgggccccatggagatctacaaaaccgtgagcgcctggaagcggcagcctgtgcgcgtgctgagcctgtttcggaatatcgataaagtcctgaaaagcctgggattcctggagagcggctctggctccggcggtggcaccctgaagtacgtggaggatgtgacaaacgtggtcagacgggatgtggagaagtggggccccttcgatctggtgtacggcagcacccaacccctgggcagctcttgtgaccggtgccctggctggtacatgtttcagttccaccggatcctgcagtacgccctgccgagacaggagtcccagcggccattcttttggattttcatggacaacttgctgctgaccgaggatgaccaggaaactaccactcggttcctgcagaccgaagccgtgaccctgcaggacgtgagaggccgggactaccagaacgccatgcgggtgtggtccaacatccctggactgaaaagcaagcacgcacctctgacccctaaagaagaggagtacctgcaggcccaggtgcggagcagaagcaagctggacgcccctaaggtggatctgctggtgaagaattgcctcctgcccctgagagagtacttcaagtatttcagccagaatagtctgcccctgggaggcagcggcggcggcttccagggccccgtgaccttcgaggaggtggccgtgtacttcaccagcgaggagtgggccctgctggaccccacccagagggccctgtactgggacgtgatgcaggagaactacgagaacgtgaccagcctgggcttccccgtgagcaagccccacatcatcagccagctggagcagggcgccgagccctgggtgcccgacctgcagggcagcgaggagatcctgagcaagcaccagaggatcggcggcccaagcagcggcgcccctcctcccagcggcggcagcccagccggctccccaacctctaccgaggagggcacctctgagtccgccacccccgagagcggccctggcacctccaccgagcccagcgagggcagcgcacccggcagccctgccggcagccccacctccacagaggagggaaccagcaccgagcccagcgaaggcagcgccccaggcaccagcaccgagcctagtgagcaggagattaaacggatcaacaagatcagaagaagacttgtgaaagacagcaacaccaagaaggccggcaagacaggccccatgaaaaccctgctggttagagtgatgacacccgatctgagagagcggctggaaaacctgagaaagaagcctgaaaatatcccccagcccatcagcaatacatctagagccaacctgaataagctgctgaccgattacaccgaaatgaagaaggcgatcctgcatgtgtactgggaagagttccagaaggaccctgtgggcctgatgagccgggtggcccagcctgccagcaagaagatcgatcagaacaagctgaaacctgagatggacgagaagggcaacctgaccaccgccggctttgcctgctctcagtgtggccagcccctgttcgtgtacaagctggagcaggtgtctgagaagggcaaggcttacaccaactacttcggacggtgcaatgtggccgagcacgaaaagctgatcctgctggcccagctgaagcccgagaaggatagcgacgaagccgtgacatatagcctgggaaagtttgggcagagggccctggatttctacagcattcatgtgaccaaggagtccacccaccccgtgaagcccctggcccagatcgccggaaacagatacgcctccggacctgtgggaaaggccctgagcgacgcatgtatgggcacaatcgcctccttcctgtctaagtaccaggacatcatcatcgaacaccagaaggtggtgaagggcaaccagaagagactggagagcctgcgggagctggccggcaaggaaaacctggaataccctagcgtgaccctgccacctcagcctcacaccaaggagggcgttgatgcctacaacgaagtgatcgcccgggtgcgaatgtgggtgaacctgaacctgtggcagaagctgaagctaagcagagatgatgccaagcctctgctgagactgaagggattcccttcctttcctctggtcgagagacaggccaacgaagtggactggtgggacatggtgtgtaacgtgaagaagctgatcaacgagaaaaaggaggatggcaaggtgttttggcagaatctggctggctacaagagacaggaagccctgagaccatacctgagcagcgaggaagatcggaagaagggaaagaaattcgctcggtaccagctgggcgacctgctgctgcacctggaaaagaagcacggcgaggactggggaaaggtgtacgacgaggcctgggagcggattgacaagaaagtggaaggcctgagcaagcacatcaagctggaagaggaacggagaagcgaggacgcccagagcaaggccgccctgaccgactggctgcgggctaaggccagcttcgtgatcgagggcctgaaggaggccgacaaggacgagttctgcagatgcgagctgaagctgcagaagtggtacggggacctgcggggaaagcccttcgccatcgaagccgagaacagcatcctggacatcagcggcttcagcaagcagtacaactgtgccttcatctggcagaaggacggcgtgaagaagctgaacctgtacctgatcatcaactacttcaagggcggcaagctgcggttcaagaagatcaaacctgaagccttcgaagccaacagattctacaccgtgatcaacaaaaagagcggcgagatcgtgcccatggaggtgaacttcaacttcgacgaccccaacctgatcatcctgcctctggcctttggcaagagacagggcagagaattcatctggaacgacctgctgtccctggaaaccggcagcctgaagctggccaacggaagagtgatcgagaagacactgtacaacagaagaacccggcaggatgagcctgccctgttcgtggccctgaccttcgagcggcgggaggtcctggactcctccaatatcaaaccaatgaacctgatcggcgtggcaagaggcgaaaacatccccgccgtgatcgccctgaccgaccccgagggctgcccactgagccggtttaaggatagcctgggaaacccaacccacatcctgagaatcggcgagagctataaggagaagcagcggaccatccaggccaagaaggaggtggagcagcggagagccggcggctacagccggaagtacgccagcaaagccaagaatctggcagacgatatggtgagaaacaccgctagagatctgctgtactacgccgtgacccaggatgccatgctgatcttcgccaacctgagccggggcttcggccggcagggcaagcggaccttcatggccgagagacagtacacacggatggaggactggctgaccgccaagctggcctacgagggcctgagcaagacctacctgtccaagacactggcccagtacacctccaagacatgcagcaactgtgggtttaccatcaccagcgccgactacgacagggtgctggagaagctgaagaagacagcaacaggctggatgaccacaattaacggcaaggagctgaaggtggagggccagattacctactacaacagatacaagagacagaacgtagtcaaggacctgtccgtcgagctggatagactgagcgaagaatctgtgaacaacgacatctcctcctggacaaagggcagaagcggagaagctctgagcctcctgaagaaaagattctcccatagacccgtgcaggagaagttcgtgtgcctgaactgcggcttcgagacacacgcagccgagcaagccgccctgaacatcgccagatcctggctgttcctgcggagccaggagtacaagaaataccagacaaacaagacaaccggcaacaccgataagagagccttcgtcgagacctggcagtccttttaccggaagaagcttaaggaggtgtggaaacctgccgtgcggtctggcggatctggcggaggctccaccagccccaagaaaaagagaaaagtctaagctgccttctgcggggcttgccttctggccatgcccttcttctctcccttgcacctgtacctcttggtctttgaataaagcctgagtaggaaggctagcaaaaaaaaaaaaaaaaaaaaaaaaaaaaaaaaaaaaaaaaaaaaaaaaaaaaaaaaaaaaaaaaaaaaaaaaaaaaaaaa

SEQ ID NO: 13582 - RNA, 5785 nt, synthetic construct
  source 1..5785: mol_type = other RNA
aggaaataagagagaaaagaagagtaagaagaaatataagagccaccatggcccctaagaagaagcgtaaagtgagccggatggaacgcctcgtctacgaggtgcggcagaagtgcagaaacatcgaggacatctgcatctcctgcggatctctgaacgtgaccctggagcacccactgttcatcggcggcatgtgccagaactgtaaaaactgttttctggagtgtgcctatcaatacgacgatgacggctaccagagctactgcaccatctgttgcggcggaagagaggtgctgatgtgtggaaataacaactgctgccggtgcttctgcgtggaatgcgtggacctgctggtgggccccggcgccgcccaggccgctattaaggaagatccttggaactgctacatgtgcggccacaagggcacatacggcctgctgagacggagagaggactggcctagcagactgcagatgttcttcgccaataaccacgaccaggagttcgacccccctaaggtgtaccctcccgtccccgccgagaagagaaagcccatccgggtcctgagcctgttcgatggcatcgccaccggtctgctggtgctgaaggacctgggcatccaggtggataggtacattgcctccgaggtgtgcgaggactccatcaccgtgggaatggtgcgtcatcagggcaagatcatgtacgtgggcgacgtgcggagcgtgacacagaagcatatccaggagtggggccctttcgacctggtgatcggcggcagcccttgcaatgacctgagcatcgtgaacccagcccggaagggcctgtacgagggaaccggcagactgttcttcgagttttacagactgctgcacgacgcccggcctaaggaaggcgacgaccggcccttcttttggctgttcgagaatgtggtggccatgggagtcagcgacaagcgggatattagccggttcctggagagcaaccccgtgatgatcgatgccaaggaagtgagcgccgcccaccgggccagatacttctggggcaatctgcctggcatgaacagacccctggccagcaccgtgaacgacaagctggagctgcaggagtgcctggagcacggccggatcgccaagttcagcaaggtgagaaccatcaccacccgaagcaacagcatcaaacaaggcaaggaccagcactttcctgtgttcatgaacgagaaggaggacatcctgtggtgtaccgagatggagagagtgttcgggttcccagtccactacacagatgtcagcaacatgtctagactggccagacagagactgctgggaagaagctggtccgtccctgtgatcagacacctgttcgcccctctgaaggagtacttcgcctgcgtgagcagcggcaacagcaacgccaacagccggggccccagcttctctagcggcctggtgccactgtccctgagagggagccacatgggccccatggagatctacaaaaccgtgagcgcctggaagcggcagcctgtgcgcgtgctgagcctgtttcggaatatcgataaagtcctgaaaagcctgggattcctggagagcggctctggctccggcggtggcaccctgaagtacgtggaggatgtgacaaacgtggtcagacgggatgtggagaagtggggccccttcgatctggtgtacggcagcacccaacccctgggcagctcttgtgaccggtgccctggctggtacatgtttcagttccaccggatcctgcagtacgccctgccgagacaggagtcccagcggccattcttttggattttcatggacaacttgctgctgaccgaggatgaccaggaaactaccactcggttcctgcagaccgaagccgtgaccctgcaggacgtgagaggccgggactaccagaacgccatgcgggtgtggtccaacatccctggactgaaaagcaagcacgcacctctgacccctaaagaagaggagtacctgcaggcccaggtgcggagcagaagcaagctggacgcccctaaggtggatctgctggtgaagaattgcctcctgcccctgagagagtacttcaagtatttcagccagaatagtctgcccctgggaggcagcggcggcggcccccaggagcccgtgaccttcgccgacgtggccgtgctgttcacccccgaggagtggctgttcctggacagcgcccagaagagcctgtacagggacgtgatgctggagaactacaggaacctggccagcgtgggcgaccagctgtgcaagaccaggatgagcagccacatggagcagagggaggagctgtgcgtgaccgagaggggcgtgttccccggcgcccacctgggcccccacctgcagggcggcccaagcagcggcgcccctcctcccagcggcggcagcccagccggctccccaacctctaccgaggagggcacctctgagtccgccacccccgagagcggccctggcacctccaccgagcccagcgagggcagcgcacccggcagccctgccggcagccccacctccacagaggagggaaccagcaccgagcccagcgaaggcagcgccccaggcaccagcaccgagcctagtgagcaggagattaaacggatcaacaagatcagaagaagacttgtgaaagacagcaacaccaagaaggccggcaagacaggccccatgaaaaccctgctggttagagtgatgacacccgatctgagagagcggctggaaaacctgagaaagaagcctgaaaatatcccccagcccatcagcaatacatctagagccaacctgaataagctgctgaccgattacaccgaaatgaagaaggcgatcctgcatgtgtactgggaagagttccagaaggaccctgtgggcctgatgagccgggtggcccagcctgccagcaagaagatcgatcagaacaagctgaaacctgagatggacgagaagggcaacctgaccaccgccggctttgcctgctctcagtgtggccagcccctgttcgtgtacaagctggagcaggtgtctgagaagggcaaggcttacaccaactacttcggacggtgcaatgtggccgagcacgaaaagctgatcctgctggcccagctgaagcccgagaaggatagcgacgaagccgtgacatatagcctgggaaagtttgggcagagggccctggatttctacagcattcatgtgaccaaggagtccacccaccccgtgaagcccctggcccagatcgccggaaacagatacgcctccggacctgtgggaaaggccctgagcgacgcatgtatgggcacaatcgcctccttcctgtctaagtaccaggacatcatcatcgaacaccagaaggtggtgaagggcaaccagaagagactggagagcctgcgggagctggccggcaaggaaaacctggaataccctagcgtgaccctgccacctcagcctcacaccaaggagggcgttgatgcctacaacgaagtgatcgcccgggtgcgaatgtgggtgaacctgaacctgtggcagaagctgaagctaagcagagatgatgccaagcctctgctgagactgaagggattcccttcctttcctctggtcgagagacaggccaacgaagtggactggtgggacatggtgtgtaacgtgaagaagctgatcaacgagaaaaaggaggatggcaaggtgttttggcagaatctggctggctacaagagacaggaagccctgagaccatacctgagcagcgaggaagatcggaagaagggaaagaaattcgctcggtaccagctgggcgacctgctgctgcacctggaaaagaagcacggcgaggactggggaaaggtgtacgacgaggcctgggagcggattgacaagaaagtggaaggcctgagcaagcacatcaagctggaagaggaacggagaagcgaggacgcccagagcaaggccgccctgaccgactggctgcgggctaaggccagcttcgtgatcgagggcctgaaggaggccgacaaggacgagttctgcagatgcgagctgaagctgcagaagtggtacggggacctgcggggaaagcccttcgccatcgaagccgagaacagcatcctggacatcagcggcttcagcaagcagtacaactgtgccttcatctggcagaaggacggcgtgaagaagctgaacctgtacctgatcatcaactacttcaagggcggcaagctgcggttcaagaagatcaaacctgaagccttcgaagccaacagattctacaccgtgatcaacaaaaagagcggcgagatcgtgcccatggaggtgaacttcaacttcgacgaccccaacctgatcatcctgcctctggcctttggcaagagacagggcagagaattcatctggaacgacctgctgtccctggaaaccggcagcctgaagctggccaacggaagagtgatcgagaagacactgtacaacagaagaacccggcaggatgagcctgccctgttcgtggccctgaccttcgagcggcgggaggtcctggactcctccaatatcaaaccaatgaacctgatcggcgtggcaagaggcgaaaacatccccgccgtgatcgccctgaccgaccccgagggctgcccactgagccggtttaaggatagcctgggaaacccaacccacatcctgagaatcggcgagagctataaggagaagcagcggaccatccaggccaagaaggaggtggagcagcggagagccggcggctacagccggaagtacgccagcaaagccaagaatctggcagacgatatggtgagaaacaccgctagagatctgctgtactacgccgtgacccaggatgccatgctgatcttcgccaacctgagccggggcttcggccggcagggcaagcggaccttcatggccgagagacagtacacacggatggaggactggctgaccgccaagctggcctacgagggcctgagcaagacctacctgtccaagacactggcccagtacacctccaagacatgcagcaactgtgggtttaccatcaccagcgccgactacgacagggtgctggagaagctgaagaagacagcaacaggctggatgaccacaattaacggcaaggagctgaaggtggagggccagattacctactacaacagatacaagagacagaacgtagtcaaggacctgtccgtcgagctggatagactgagcgaagaatctgtgaacaacgacatctcctcctggacaaagggcagaagcggagaagctctgagcctcctgaagaaaagattctcccatagacccgtgcaggagaagttcgtgtgcctgaactgcggcttcgagacacacgcagccgagcaagccgccctgaacatcgccagatcctggctgttcctgcggagccaggagtacaagaaataccagacaaacaagacaaccggcaacaccgataagagagccttcgtcgagacctggcagtccttttaccggaagaagcttaaggaggtgtggaaacctgccgtgcggtctggcggatctggcggaggctccaccagccccaagaaaaagagaaaagtctaagctgccttctgcggggcttgccttctggccatgcccttcttctctcccttgcacctgtacctcttggtctttgaataaagcctgagtaggaaggctagcaaaaaaaaaaaaaaaaaaaaaaaaaaaaaaaaaaaaaaaaaaaaaaaaaaaaaaaaaaaaaaaaaaaaaaaaaaaaaaaa

SEQ ID NO: 13583 - RNA, 5785 nt, synthetic construct
  source 1..5785: mol_type = other RNA
aggaaataagagagaaaagaagagtaagaagaaatataagagccaccatggcccctaagaagaagcgtaaagtgagccggatggaacgcctcgtctacgaggtgcggcagaagtgcagaaacatcgaggacatctgcatctcctgcggatctctgaacgtgaccctggagcacccactgttcatcggcggcatgtgccagaactgtaaaaactgttttctggagtgtgcctatcaatacgacgatgacggctaccagagctactgcaccatctgttgcggcggaagagaggtgctgatgtgtggaaataacaactgctgccggtgcttctgcgtggaatgcgtggacctgctggtgggccccggcgccgcccaggccgctattaaggaagatccttggaactgctacatgtgcggccacaagggcacatacggcctgctgagacggagagaggactggcctagcagactgcagatgttcttcgccaataaccacgaccaggagttcgacccccctaaggtgtaccctcccgtccccgccgagaagagaaagcccatccgggtcctgagcctgttcgatggcatcgccaccggtctgctggtgctgaaggacctgggcatccaggtggataggtacattgcctccgaggtgtgcgaggactccatcaccgtgggaatggtgcgtcatcagggcaagatcatgtacgtgggcgacgtgcggagcgtgacacagaagcatatccaggagtggggccctttcgacctggtgatcggcggcagcccttgcaatgacctgagcatcgtgaacccagcccggaagggcctgtacgagggaaccggcagactgttcttcgagttttacagactgctgcacgacgcccggcctaaggaaggcgacgaccggcccttcttttggctgttcgagaatgtggtggccatgggagtcagcgacaagcgggatattagccggttcctggagagcaaccccgtgatgatcgatgccaaggaagtgagcgccgcccaccgggccagatacttctggggcaatctgcctggcatgaacagacccctggccagcaccgtgaacgacaagctggagctgcaggagtgcctggagcacggccggatcgccaagttcagcaaggtgagaaccatcaccacccgaagcaacagcatcaaacaaggcaaggaccagcactttcctgtgttcatgaacgagaaggaggacatcctgtggtgtaccgagatggagagagtgttcgggttcccagtccactacacagatgtcagcaacatgtctagactggccagacagagactgctgggaagaagctggtccgtccctgtgatcagacacctgttcgcccctctgaaggagtacttcgcctgcgtgagcagcggcaacagcaacgccaacagccggggccccagcttctctagcggcctggtgccactgtccctgagagggagccacatgggccccatggagatctacaaaaccgtgagcgcctggaagcggcagcctgtgcgcgtgctgagcctgtttcggaatatcgataaagtcctgaaaagcctgggattcctggagagcggctctggctccggcggtggcaccctgaagtacgtggaggatgtgacaaacgtggtcagacgggatgtggagaagtggggccccttcgatctggtgtacggcagcacccaacccctgggcagctcttgtgaccggtgccctggctggtacatgtttcagttccaccggatcctgcagtacgccctgccgagacaggagtcccagcggccattcttttggattttcatggacaacttgctgctgaccgaggatgaccaggaaactaccactcggttcctgcagaccgaagccgtgaccctgcaggacgtgagaggccgggactaccagaacgccatgcgggtgtggtccaacatccctggactgaaaagcaagcacgcacctctgacccctaaagaagaggagtacctgcaggcccaggtgcggagcagaagcaagctggacgcccctaaggtggatctgctggtgaagaattgcctcctgcccctgagagagtacttcaagtatttcagccagaatagtctgcccctgggaggcagcggcggcggcagggagcccgcccaggtgctggtggccgccgagagcctgatcgacaacgaggagggctacgtgaccttcgaggacgtggccgtgtacttcagccaggaggagtggaggctgctggacgaggcccagaggctgctgtacaggaacgtgatgctggagaacttcagcctgatggccagcctgggcctggccagcagcaagacccacgagatcacccagctggagagctgggaggagcccttcgtgggcggcccaagcagcggcgcccctcctcccagcggcggcagcccagccggctccccaacctctaccgaggagggcacctctgagtccgccacccccgagagcggccctggcacctccaccgagcccagcgagggcagcgcacccggcagccctgccggcagccccacctccacagaggagggaaccagcaccgagcccagcgaaggcagcgccccaggcaccagcaccgagcctagtgagcaggagattaaacggatcaacaagatcagaagaagacttgtgaaagacagcaacaccaagaaggccggcaagacaggccccatgaaaaccctgctggttagagtgatgacacccgatctgagagagcggctggaaaacctgagaaagaagcctgaaaatatcccccagcccatcagcaatacatctagagccaacctgaataagctgctgaccgattacaccgaaatgaagaaggcgatcctgcatgtgtactgggaagagttccagaaggaccctgtgggcctgatgagccgggtggcccagcctgccagcaagaagatcgatcagaacaagctgaaacctgagatggacgagaagggcaacctgaccaccgccggctttgcctgctctcagtgtggccagcccctgttcgtgtacaagctggagcaggtgtctgagaagggcaaggcttacaccaactacttcggacggtgcaatgtggccgagcacgaaaagctgatcctgctggcccagctgaagcccgagaaggatagcgacgaagccgtgacatatagcctgggaaagtttgggcagagggccctggatttctacagcattcatgtgaccaaggagtccacccaccccgtgaagcccctggcccagatcgccggaaacagatacgcctccggacctgtgggaaaggccctgagcgacgcatgtatgggcacaatcgcctccttcctgtctaagtaccaggacatcatcatcgaacaccagaaggtggtgaagggcaaccagaagagactggagagcctgcgggagctggccggcaaggaaaacctggaataccctagcgtgaccctgccacctcagcctcacaccaaggagggcgttgatgcctacaacgaagtgatcgcccgggtgcgaatgtgggtgaacctgaacctgtggcagaagctgaagctaagcagagatgatgccaagcctctgctgagactgaagggattcccttcctttcctctggtcgagagacaggccaacgaagtggactggtgggacatggtgtgtaacgtgaagaagctgatcaacgagaaaaaggaggatggcaaggtgttttggcagaatctggctggctacaagagacaggaagccctgagaccatacctgagcagcgaggaagatcggaagaagggaaagaaattcgctcggtaccagctgggcgacctgctgctgcacctggaaaagaagcacggcgaggactggggaaaggtgtacgacgaggcctgggagcggattgacaagaaagtggaaggcctgagcaagcacatcaagctggaagaggaacggagaagcgaggacgcccagagcaaggccgccctgaccgactggctgcgggctaaggccagcttcgtgatcgagggcctgaaggaggccgacaaggacgagttctgcagatgcgagctgaagctgcagaagtggtacggggacctgcggggaaagcccttcgccatcgaagccgagaacagcatcctggacatcagcggcttcagcaagcagtacaactgtgccttcatctggcagaaggacggcgtgaagaagctgaacctgtacctgatcatcaactacttcaagggcggcaagctgcggttcaagaagatcaaacctgaagccttcgaagccaacagattctacaccgtgatcaacaaaaagagcggcgagatcgtgcccatggaggtgaacttcaacttcgacgaccccaacctgatcatcctgcctctggcctttggcaagagacagggcagagaattcatctggaacgacctgctgtccctggaaaccggcagcctgaagctggccaacggaagagtgatcgagaagacactgtacaacagaagaacccggcaggatgagcctgccctgttcgtggccctgaccttcgagcggcgggaggtcctggactcctccaatatcaaaccaatgaacctgatcggcgtggcaagaggcgaaaacatccccgccgtgatcgccctgaccgaccccgagggctgcccactgagccggtttaaggatagcctgggaaacccaacccacatcctgagaatcggcgagagctataaggagaagcagcggaccatccaggccaagaaggaggtggagcagcggagagccggcggctacagccggaagtacgccagcaaagccaagaatctggcagacgatatggtgagaaacaccgctagagatctgctgtactacgccgtgacccaggatgccatgctgatcttcgccaacctgagccggggcttcggccggcagggcaagcggaccttcatggccgagagacagtacacacggatggaggactggctgaccgccaagctggcctacgagggcctgagcaagacctacctgtccaagacactggcccagtacacctccaagacatgcagcaactgtgggtttaccatcaccagcgccgactacgacagggtgctggagaagctgaagaagacagcaacaggctggatgaccacaattaacggcaaggagctgaaggtggagggccagattacctactacaacagatacaagagacagaacgtagtcaaggacctgtccgtcgagctggatagactgagcgaagaatctgtgaacaacgacatctcctcctggacaaagggcagaagcggagaagctctgagcctcctgaagaaaagattctcccatagacccgtgcaggagaagttcgtgtgcctgaactgcggcttcgagacacacgcagccgagcaagccgccctgaacatcgccagatcctggctgttcctgcggagccaggagtacaagaaataccagacaaacaagacaaccggcaacaccgataagagagccttcgtcgagacctggcagtccttttaccggaagaagcttaaggaggtgtggaaacctgccgtgcggtctggcggatctggcggaggctccaccagccccaagaaaaagagaaaagtctaagctgccttctgcggggcttgccttctggccatgcccttcttctctcccttgcacctgtacctcttggtctttgaataaagcctgagtaggaaggctagcaaaaaaaaaaaaaaaaaaaaaaaaaaaaaaaaaaaaaaaaaaaaaaaaaaaaaaaaaaaaaaaaaaaaaaaaaaaaaaaa

SEQ ID NO: 13584 - RNA, 5785 nt, synthetic construct
  source 1..5785: mol_type = other RNA
aggaaataagagagaaaagaagagtaagaagaaatataagagccaccatggcccctaagaagaagcgtaaagtgagccggatggaacgcctcgtctacgaggtgcggcagaagtgcagaaacatcgaggacatctgcatctcctgcggatctctgaacgtgaccctggagcacccactgttcatcggcggcatgtgccagaactgtaaaaactgttttctggagtgtgcctatcaatacgacgatgacggctaccagagctactgcaccatctgttgcggcggaagagaggtgctgatgtgtggaaataacaactgctgccggtgcttctgcgtggaatgcgtggacctgctggtgggccccggcgccgcccaggccgctattaaggaagatccttggaactgctacatgtgcggccacaagggcacatacggcctgctgagacggagagaggactggcctagcagactgcagatgttcttcgccaataaccacgaccaggagttcgacccccctaaggtgtaccctcccgtccccgccgagaagagaaagcccatccgggtcctgagcctgttcgatggcatcgccaccggtctgctggtgctgaaggacctgggcatccaggtggataggtacattgcctccgaggtgtgcgaggactccatcaccgtgggaatggtgcgtcatcagggcaagatcatgtacgtgggcgacgtgcggagcgtgacacagaagcatatccaggagtggggccctttcgacctggtgatcggcggcagcccttgcaatgacctgagcatcgtgaacccagcccggaagggcctgtacgagggaaccggcagactgttcttcgagttttacagactgctgcacgacgcccggcctaaggaaggcgacgaccggcccttcttttggctgttcgagaatgtggtggccatgggagtcagcgacaagcgggatattagccggttcctggagagcaaccccgtgatgatcgatgccaaggaagtgagcgccgcccaccgggccagatacttctggggcaatctgcctggcatgaacagacccctggccagcaccgtgaacgacaagctggagctgcaggagtgcctggagcacggccggatcgccaagttcagcaaggtgagaaccatcaccacccgaagcaacagcatcaaacaaggcaaggaccagcactttcctgtgttcatgaacgagaaggaggacatcctgtggtgtaccgagatggagagagtgttcgggttcccagtccactacacagatgtcagcaacatgtctagactggccagacagagactgctgggaagaagctggtccgtccctgtgatcagacacctgttcgcccctctgaaggagtacttcgcctgcgtgagcagcggcaacagcaacgccaacagccggggccccagcttctctagcggcctggtgccactgtccctgagagggagccacatgggccccatggagatctacaaaaccgtgagcgcctggaagcggcagcctgtgcgcgtgctgagcctgtttcggaatatcgataaagtcctgaaaagcctgggattcctggagagcggctctggctccggcggtggcaccctgaagtacgtggaggatgtgacaaacgtggtcagacgggatgtggagaagtggggccccttcgatctggtgtacggcagcacccaacccctgggcagctcttgtgaccggtgccctggctggtacatgtttcagttccaccggatcctgcagtacgccctgccgagacaggagtcccagcggccattcttttggattttcatggacaacttgctgctgaccgaggatgaccaggaaactaccactcggttcctgcagaccgaagccgtgaccctgcaggacgtgagaggccgggactaccagaacgccatgcgggtgtggtccaacatccctggactgaaaagcaagcacgcacctctgacccctaaagaagaggagtacctgcaggcccaggtgcggagcagaagcaagctggacgcccctaaggtggatctgctggtgaagaattgcctcctgcccctgagagagtacttcaagtatttcagccagaatagtctgcccctgggaggcagcggcggcggcttccaggccagcgtggtgttcgaggacgtggccgtgaagttcacccccgaggagtgggccctgctggacaggggccagaggaagctgtacagggacgtgatgctggagacctgcaggaacctgagcagcgtggagaagcagaagttccacagcaacggcgacctgaccaggatgcaggagggcctgctgaggagccccctggtggagagcgtgtgcgagaggatcgagggcgaccagtgcggcggcggcccaagcagcggcgcccctcctcccagcggcggcagcccagccggctccccaacctctaccgaggagggcacctctgagtccgccacccccgagagcggccctggcacctccaccgagcccagcgagggcagcgcacccggcagccctgccggcagccccacctccacagaggagggaaccagcaccgagcccagcgaaggcagcgccccaggcaccagcaccgagcctagtgagcaggagattaaacggatcaacaagatcagaagaagacttgtgaaagacagcaacaccaagaaggccggcaagacaggccccatgaaaaccctgctggttagagtgatgacacccgatctgagagagcggctggaaaacctgagaaagaagcctgaaaatatcccccagcccatcagcaatacatctagagccaacctgaataagctgctgaccgattacaccgaaatgaagaaggcgatcctgcatgtgtactgggaagagttccagaaggaccctgtgggcctgatgagccgggtggcccagcctgccagcaagaagatcgatcagaacaagctgaaacctgagatggacgagaagggcaacctgaccaccgccggctttgcctgctctcagtgtggccagcccctgttcgtgtacaagctggagcaggtgtctgagaagggcaaggcttacaccaactacttcggacggtgcaatgtggccgagcacgaaaagctgatcctgctggcccagctgaagcccgagaaggatagcgacgaagccgtgacatatagcctgggaaagtttgggcagagggccctggatttctacagcattcatgtgaccaaggagtccacccaccccgtgaagcccctggcccagatcgccggaaacagatacgcctccggacctgtgggaaaggccctgagcgacgcatgtatgggcacaatcgcctccttcctgtctaagtaccaggacatcatcatcgaacaccagaaggtggtgaagggcaaccagaagagactggagagcctgcgggagctggccggcaaggaaaacctggaataccctagcgtgaccctgccacctcagcctcacaccaaggagggcgttgatgcctacaacgaagtgatcgcccgggtgcgaatgtgggtgaacctgaacctgtggcagaagctgaagctaagcagagatgatgccaagcctctgctgagactgaagggattcccttcctttcctctggtcgagagacaggccaacgaagtggactggtgggacatggtgtgtaacgtgaagaagctgatcaacgagaaaaaggaggatggcaaggtgttttggcagaatctggctggctacaagagacaggaagccctgagaccatacctgagcagcgaggaagatcggaagaagggaaagaaattcgctcggtaccagctgggcgacctgctgctgcacctggaaaagaagcacggcgaggactggggaaaggtgtacgacgaggcctgggagcggattgacaagaaagtggaaggcctgagcaagcacatcaagctggaagaggaacggagaagcgaggacgcccagagcaaggccgccctgaccgactggctgcgggctaaggccagcttcgtgatcgagggcctgaaggaggccgacaaggacgagttctgcagatgcgagctgaagctgcagaagtggtacggggacctgcggggaaagcccttcgccatcgaagccgagaacagcatcctggacatcagcggcttcagcaagcagtacaactgtgccttcatctggcagaaggacggcgtgaagaagctgaacctgtacctgatcatcaactacttcaagggcggcaagctgcggttcaagaagatcaaacctgaagccttcgaagccaacagattctacaccgtgatcaacaaaaagagcggcgagatcgtgcccatggaggtgaacttcaacttcgacgaccccaacctgatcatcctgcctctggcctttggcaagagacagggcagagaattcatctggaacgacctgctgtccctggaaaccggcagcctgaagctggccaacggaagagtgatcgagaagacactgtacaacagaagaacccggcaggatgagcctgccctgttcgtggccctgaccttcgagcggcgggaggtcctggactcctccaatatcaaaccaatgaacctgatcggcgtggcaagaggcgaaaacatccccgccgtgatcgccctgaccgaccccgagggctgcccactgagccggtttaaggatagcctgggaaacccaacccacatcctgagaatcggcgagagctataaggagaagcagcggaccatccaggccaagaaggaggtggagcagcggagagccggcggctacagccggaagtacgccagcaaagccaagaatctggcagacgatatggtgagaaacaccgctagagatctgctgtactacgccgtgacccaggatgccatgctgatcttcgccaacctgagccggggcttcggccggcagggcaagcggaccttcatggccgagagacagtacacacggatggaggactggctgaccgccaagctggcctacgagggcctgagcaagacctacctgtccaagacactggcccagtacacctccaagacatgcagcaactgtgggtttaccatcaccagcgccgactacgacagggtgctggagaagctgaagaagacagcaacaggctggatgaccacaattaacggcaaggagctgaaggtggagggccagattacctactacaacagatacaagagacagaacgtagtcaaggacctgtccgtcgagctggatagactgagcgaagaatctgtgaacaacgacatctcctcctggacaaagggcagaagcggagaagctctgagcctcctgaagaaaagattctcccatagacccgtgcaggagaagttcgtgtgcctgaactgcggcttcgagacacacgcagccgagcaagccgccctgaacatcgccagatcctggctgttcctgcggagccaggagtacaagaaataccagacaaacaagacaaccggcaacaccgataagagagccttcgtcgagacctggcagtccttttaccggaagaagcttaaggaggtgtggaaacctgccgtgcggtctggcggatctggcggaggctccaccagccccaagaaaaagagaaaagtctaagctgccttctgcggggcttgccttctggccatgcccttcttctctcccttgcacctgtacctcttggtctttgaataaagcctgagtaggaaggctagcaaaaaaaaaaaaaaaaaaaaaaaaaaaaaaaaaaaaaaaaaaaaaaaaaaaaaaaaaaaaaaaaaaaaaaaaaaaaaaaa

SEQ ID NO: 13585 - RNA, 5785 nt, synthetic construct
  source 1..5785: mol_type = other RNA
aggaaataagagagaaaagaagagtaagaagaaatataagagccaccatggcccctaagaagaagcgtaaagtgagccggatggaacgcctcgtctacgaggtgcggcagaagtgcagaaacatcgaggacatctgcatctcctgcggatctctgaacgtgaccctggagcacccactgttcatcggcggcatgtgccagaactgtaaaaactgttttctggagtgtgcctatcaatacgacgatgacggctaccagagctactgcaccatctgttgcggcggaagagaggtgctgatgtgtggaaataacaactgctgccggtgcttctgcgtggaatgcgtggacctgctggtgggccccggcgccgcccaggccgctattaaggaagatccttggaactgctacatgtgcggccacaagggcacatacggcctgctgagacggagagaggactggcctagcagactgcagatgttcttcgccaataaccacgaccaggagttcgacccccctaaggtgtaccctcccgtccccgccgagaagagaaagcccatccgggtcctgagcctgttcgatggcatcgccaccggtctgctggtgctgaaggacctgggcatccaggtggataggtacattgcctccgaggtgtgcgaggactccatcaccgtgggaatggtgcgtcatcagggcaagatcatgtacgtgggcgacgtgcggagcgtgacacagaagcatatccaggagtggggccctttcgacctggtgatcggcggcagcccttgcaatgacctgagcatcgtgaacccagcccggaagggcctgtacgagggaaccggcagactgttcttcgagttttacagactgctgcacgacgcccggcctaaggaaggcgacgaccggcccttcttttggctgttcgagaatgtggtggccatgggagtcagcgacaagcgggatattagccggttcctggagagcaaccccgtgatgatcgatgccaaggaagtgagcgccgcccaccgggccagatacttctggggcaatctgcctggcatgaacagacccctggccagcaccgtgaacgacaagctggagctgcaggagtgcctggagcacggccggatcgccaagttcagcaaggtgagaaccatcaccacccgaagcaacagcatcaaacaaggcaaggaccagcactttcctgtgttcatgaacgagaaggaggacatcctgtggtgtaccgagatggagagagtgttcgggttcccagtccactacacagatgtcagcaacatgtctagactggccagacagagactgctgggaagaagctggtccgtccctgtgatcagacacctgttcgcccctctgaaggagtacttcgcctgcgtgagcagcggcaacagcaacgccaacagccggggccccagcttctctagcggcctggtgccactgtccctgagagggagccacatgggccccatggagatctacaaaaccgtgagcgcctggaagcggcagcctgtgcgcgtgctgagcctgtttcggaatatcgataaagtcctgaaaagcctgggattcctggagagcggctctggctccggcggtggcaccctgaagtacgtggaggatgtgacaaacgtggtcagacgggatgtggagaagtggggccccttcgatctggtgtacggcagcacccaacccctgggcagctcttgtgaccggtgccctggctggtacatgtttcagttccaccggatcctgcagtacgccctgccgagacaggagtcccagcggccattcttttggattttcatggacaacttgctgctgaccgaggatgaccaggaaactaccactcggttcctgcagaccgaagccgtgaccctgcaggacgtgagaggccgggactaccagaacgccatgcgggtgtggtccaacatccctggactgaaaagcaagcacgcacctctgacccctaaagaagaggagtacctgcaggcccaggtgcggagcagaagcaagctggacgcccctaaggtggatctgctggtgaagaattgcctcctgcccctgagagagtacttcaagtatttcagccagaatagtctgcccctgggaggcagcggcggcggccagtgcctgctgaccttcaaggacgtgttcctggacttcagcagcgaggagtgggagtgcctgaacttcgcccagaggaccctgtacatggacgtgatgctggagaactacaacaacctgctgttcgtggagaaccactgcatctgcggcaactacgagaaggagaaggtgctggagcaggacacccagcacatcgtgaacgagcacggccacaacaggaagaagagcagcaagtgcaacgagggcggcccaagcagcggcgcccctcctcccagcggcggcagcccagccggctccccaacctctaccgaggagggcacctctgagtccgccacccccgagagcggccctggcacctccaccgagcccagcgagggcagcgcacccggcagccctgccggcagccccacctccacagaggagggaaccagcaccgagcccagcgaaggcagcgccccaggcaccagcaccgagcctagtgagcaggagattaaacggatcaacaagatcagaagaagacttgtgaaagacagcaacaccaagaaggccggcaagacaggccccatgaaaaccctgctggttagagtgatgacacccgatctgagagagcggctggaaaacctgagaaagaagcctgaaaatatcccccagcccatcagcaatacatctagagccaacctgaataagctgctgaccgattacaccgaaatgaagaaggcgatcctgcatgtgtactgggaagagttccagaaggaccctgtgggcctgatgagccgggtggcccagcctgccagcaagaagatcgatcagaacaagctgaaacctgagatggacgagaagggcaacctgaccaccgccggctttgcctgctctcagtgtggccagcccctgttcgtgtacaagctggagcaggtgtctgagaagggcaaggcttacaccaactacttcggacggtgcaatgtggccgagcacgaaaagctgatcctgctggcccagctgaagcccgagaaggatagcgacgaagccgtgacatatagcctgggaaagtttgggcagagggccctggatttctacagcattcatgtgaccaaggagtccacccaccccgtgaagcccctggcccagatcgccggaaacagatacgcctccggacctgtgggaaaggccctgagcgacgcatgtatgggcacaatcgcctccttcctgtctaagtaccaggacatcatcatcgaacaccagaaggtggtgaagggcaaccagaagagactggagagcctgcgggagctggccggcaaggaaaacctggaataccctagcgtgaccctgccacctcagcctcacaccaaggagggcgttgatgcctacaacgaagtgatcgcccgggtgcgaatgtgggtgaacctgaacctgtggcagaagctgaagctaagcagagatgatgccaagcctctgctgagactgaagggattcccttcctttcctctggtcgagagacaggccaacgaagtggactggtgggacatggtgtgtaacgtgaagaagctgatcaacgagaaaaaggaggatggcaaggtgttttggcagaatctggctggctacaagagacaggaagccctgagaccatacctgagcagcgaggaagatcggaagaagggaaagaaattcgctcggtaccagctgggcgacctgctgctgcacctggaaaagaagcacggcgaggactggggaaaggtgtacgacgaggcctgggagcggattgacaagaaagtggaaggcctgagcaagcacatcaagctggaagaggaacggagaagcgaggacgcccagagcaaggccgccctgaccgactggctgcgggctaaggccagcttcgtgatcgagggcctgaaggaggccgacaaggacgagttctgcagatgcgagctgaagctgcagaagtggtacggggacctgcggggaaagcccttcgccatcgaagccgagaacagcatcctggacatcagcggcttcagcaagcagtacaactgtgccttcatctggcagaaggacggcgtgaagaagctgaacctgtacctgatcatcaactacttcaagggcggcaagctgcggttcaagaagatcaaacctgaagccttcgaagccaacagattctacaccgtgatcaacaaaaagagcggcgagatcgtgcccatggaggtgaacttcaacttcgacgaccccaacctgatcatcctgcctctggcctttggcaagagacagggcagagaattcatctggaacgacctgctgtccctggaaaccggcagcctgaagctggccaacggaagagtgatcgagaagacactgtacaacagaagaacccggcaggatgagcctgccctgttcgtggccctgaccttcgagcggcgggaggtcctggactcctccaatatcaaaccaatgaacctgatcggcgtggcaagaggcgaaaacatccccgccgtgatcgccctgaccgaccccgagggctgcccactgagccggtttaaggatagcctgggaaacccaacccacatcctgagaatcggcgagagctataaggagaagcagcggaccatccaggccaagaaggaggtggagcagcggagagccggcggctacagccggaagtacgccagcaaagccaagaatctggcagacgatatggtgagaaacaccgctagagatctgctgtactacgccgtgacccaggatgccatgctgatcttcgccaacctgagccggggcttcggccggcagggcaagcggaccttcatggccgagagacagtacacacggatggaggactggctgaccgccaagctggcctacgagggcctgagcaagacctacctgtccaagacactggcccagtacacctccaagacatgcagcaactgtgggtttaccatcaccagcgccgactacgacagggtgctggagaagctgaagaagacagcaacaggctggatgaccacaattaacggcaaggagctgaaggtggagggccagattacctactacaacagatacaagagacagaacgtagtcaaggacctgtccgtcgagctggatagactgagcgaagaatctgtgaacaacgacatctcctcctggacaaagggcagaagcggagaagctctgagcctcctgaagaaaagattctcccatagacccgtgcaggagaagttcgtgtgcctgaactgcggcttcgagacacacgcagccgagcaagccgccctgaacatcgccagatcctggctgttcctgcggagccaggagtacaagaaataccagacaaacaagacaaccggcaacaccgataagagagccttcgtcgagacctggcagtccttttaccggaagaagcttaaggaggtgtggaaacctgccgtgcggtctggcggatctggcggaggctccaccagccccaagaaaaagagaaaagtctaagctgccttctgcggggcttgccttctggccatgcccttcttctctcccttgcacctgtacctcttggtctttgaataaagcctgagtaggaaggctagcaaaaaaaaaaaaaaaaaaaaaaaaaaaaaaaaaaaaaaaaaaaaaaaaaaaaaaaaaaaaaaaaaaaaaaaaaaaaaaaa

SEQ ID NO: 13586 - RNA, 5785 nt, synthetic construct
  source 1..5785: mol_type = other RNA
aggaaataagagagaaaagaagagtaagaagaaatataagagccaccatggcccctaagaagaagcgtaaagtgagccggatggaacgcctcgtctacgaggtgcggcagaagtgcagaaacatcgaggacatctgcatctcctgcggatctctgaacgtgaccctggagcacccactgttcatcggcggcatgtgccagaactgtaaaaactgttttctggagtgtgcctatcaatacgacgatgacggctaccagagctactgcaccatctgttgcggcggaagagaggtgctgatgtgtggaaataacaactgctgccggtgcttctgcgtggaatgcgtggacctgctggtgggccccggcgccgcccaggccgctattaaggaagatccttggaactgctacatgtgcggccacaagggcacatacggcctgctgagacggagagaggactggcctagcagactgcagatgttcttcgccaataaccacgaccaggagttcgacccccctaaggtgtaccctcccgtccccgccgagaagagaaagcccatccgggtcctgagcctgttcgatggcatcgccaccggtctgctggtgctgaaggacctgggcatccaggtggataggtacattgcctccgaggtgtgcgaggactccatcaccgtgggaatggtgcgtcatcagggcaagatcatgtacgtgggcgacgtgcggagcgtgacacagaagcatatccaggagtggggccctttcgacctggtgatcggcggcagcccttgcaatgacctgagcatcgtgaacccagcccggaagggcctgtacgagggaaccggcagactgttcttcgagttttacagactgctgcacgacgcccggcctaaggaaggcgacgaccggcccttcttttggctgttcgagaatgtggtggccatgggagtcagcgacaagcgggatattagccggttcctggagagcaaccccgtgatgatcgatgccaaggaagtgagcgccgcccaccgggccagatacttctggggcaatctgcctggcatgaacagacccctggccagcaccgtgaacgacaagctggagctgcaggagtgcctggagcacggccggatcgccaagttcagcaaggtgagaaccatcaccacccgaagcaacagcatcaaacaaggcaaggaccagcactttcctgtgttcatgaacgagaaggaggacatcctgtggtgtaccgagatggagagagtgttcgggttcccagtccactacacagatgtcagcaacatgtctagactggccagacagagactgctgggaagaagctggtccgtccctgtgatcagacacctgttcgcccctctgaaggagtacttcgcctgcgtgagcagcggcaacagcaacgccaacagccggggccccagcttctctagcggcctggtgccactgtccctgagagggagccacatgggccccatggagatctacaaaaccgtgagcgcctggaagcggcagcctgtgcgcgtgctgagcctgtttcggaatatcgataaagtcctgaaaagcctgggattcctggagagcggctctggctccggcggtggcaccctgaagtacgtggaggatgtgacaaacgtggtcagacgggatgtggagaagtggggccccttcgatctggtgtacggcagcacccaacccctgggcagctcttgtgaccggtgccctggctggtacatgtttcagttccaccggatcctgcagtacgccctgccgagacaggagtcccagcggccattcttttggattttcatggacaacttgctgctgaccgaggatgaccaggaaactaccactcggttcctgcagaccgaagccgtgaccctgcaggacgtgagaggccgggactaccagaacgccatgcgggtgtggtccaacatccctggactgaaaagcaagcacgcacctctgacccctaaagaagaggagtacctgcaggcccaggtgcggagcagaagcaagctggacgcccctaaggtggatctgctggtgaagaattgcctcctgcccctgagagagtacttcaagtatttcagccagaatagtctgcccctgggaggcagcggcggcggcagccaggccagcgtgagcttcaaggacgtgaccatcgagttcacccaggaggagtggcagcagatggcccccgtgcagaagaacctgtacagggacgtgatgctggagaactacagcaacctggtgagcgtgggctactgctgcttcaagcccgaggtgatcttcaagctggagcagggcgaggagccctggttcagcgaggaggagttcagcaaccagagccaccccaaggactacaggggcggcggcccaagcagcggcgcccctcctcccagcggcggcagcccagccggctccccaacctctaccgaggagggcacctctgagtccgccacccccgagagcggccctggcacctccaccgagcccagcgagggcagcgcacccggcagccctgccggcagccccacctccacagaggagggaaccagcaccgagcccagcgaaggcagcgccccaggcaccagcaccgagcctagtgagcaggagattaaacggatcaacaagatcagaagaagacttgtgaaagacagcaacaccaagaaggccggcaagacaggccccatgaaaaccctgctggttagagtgatgacacccgatctgagagagcggctggaaaacctgagaaagaagcctgaaaatatcccccagcccatcagcaatacatctagagccaacctgaataagctgctgaccgattacaccgaaatgaagaaggcgatcctgcatgtgtactgggaagagttccagaaggaccctgtgggcctgatgagccgggtggcccagcctgccagcaagaagatcgatcagaacaagctgaaacctgagatggacgagaagggcaacctgaccaccgccggctttgcctgctctcagtgtggccagcccctgttcgtgtacaagctggagcaggtgtctgagaagggcaaggcttacaccaactacttcggacggtgcaatgtggccgagcacgaaaagctgatcctgctggcccagctgaagcccgagaaggatagcgacgaagccgtgacatatagcctgggaaagtttgggcagagggccctggatttctacagcattcatgtgaccaaggagtccacccaccccgtgaagcccctggcccagatcgccggaaacagatacgcctccggacctgtgggaaaggccctgagcgacgcatgtatgggcacaatcgcctccttcctgtctaagtaccaggacatcatcatcgaacaccagaaggtggtgaagggcaaccagaagagactggagagcctgcgggagctggccggcaaggaaaacctggaataccctagcgtgaccctgccacctcagcctcacaccaaggagggcgttgatgcctacaacgaagtgatcgcccgggtgcgaatgtgggtgaacctgaacctgtggcagaagctgaagctaagcagagatgatgccaagcctctgctgagactgaagggattcccttcctttcctctggtcgagagacaggccaacgaagtggactggtgggacatggtgtgtaacgtgaagaagctgatcaacgagaaaaaggaggatggcaaggtgttttggcagaatctggctggctacaagagacaggaagccctgagaccatacctgagcagcgaggaagatcggaagaagggaaagaaattcgctcggtaccagctgggcgacctgctgctgcacctggaaaagaagcacggcgaggactggggaaaggtgtacgacgaggcctgggagcggattgacaagaaagtggaaggcctgagcaagcacatcaagctggaagaggaacggagaagcgaggacgcccagagcaaggccgccctgaccgactggctgcgggctaaggccagcttcgtgatcgagggcctgaaggaggccgacaaggacgagttctgcagatgcgagctgaagctgcagaagtggtacggggacctgcggggaaagcccttcgccatcgaagccgagaacagcatcctggacatcagcggcttcagcaagcagtacaactgtgccttcatctggcagaaggacggcgtgaagaagctgaacctgtacctgatcatcaactacttcaagggcggcaagctgcggttcaagaagatcaaacctgaagccttcgaagccaacagattctacaccgtgatcaacaaaaagagcggcgagatcgtgcccatggaggtgaacttcaacttcgacgaccccaacctgatcatcctgcctctggcctttggcaagagacagggcagagaattcatctggaacgacctgctgtccctggaaaccggcagcctgaagctggccaacggaagagtgatcgagaagacactgtacaacagaagaacccggcaggatgagcctgccctgttcgtggccctgaccttcgagcggcgggaggtcctggactcctccaatatcaaaccaatgaacctgatcggcgtggcaagaggcgaaaacatccccgccgtgatcgccctgaccgaccccgagggctgcccactgagccggtttaaggatagcctgggaaacccaacccacatcctgagaatcggcgagagctataaggagaagcagcggaccatccaggccaagaaggaggtggagcagcggagagccggcggctacagccggaagtacgccagcaaagccaagaatctggcagacgatatggtgagaaacaccgctagagatctgctgtactacgccgtgacccaggatgccatgctgatcttcgccaacctgagccggggcttcggccggcagggcaagcggaccttcatggccgagagacagtacacacggatggaggactggctgaccgccaagctggcctacgagggcctgagcaagacctacctgtccaagacactggcccagtacacctccaagacatgcagcaactgtgggtttaccatcaccagcgccgactacgacagggtgctggagaagctgaagaagacagcaacaggctggatgaccacaattaacggcaaggagctgaaggtggagggccagattacctactacaacagatacaagagacagaacgtagtcaaggacctgtccgtcgagctggatagactgagcgaagaatctgtgaacaacgacatctcctcctggacaaagggcagaagcggagaagctctgagcctcctgaagaaaagattctcccatagacccgtgcaggagaagttcgtgtgcctgaactgcggcttcgagacacacgcagccgagcaagccgccctgaacatcgccagatcctggctgttcctgcggagccaggagtacaagaaataccagacaaacaagacaaccggcaacaccgataagagagccttcgtcgagacctggcagtccttttaccggaagaagcttaaggaggtgtggaaacctgccgtgcggtctggcggatctggcggaggctccaccagccccaagaaaaagagaaaagtctaagctgccttctgcggggcttgccttctggccatgcccttcttctctcccttgcacctgtacctcttggtctttgaataaagcctgagtaggaaggctagcaaaaaaaaaaaaaaaaaaaaaaaaaaaaaaaaaaaaaaaaaaaaaaaaaaaaaaaaaaaaaaaaaaaaaaaaaaaaaaaa

SEQ ID NO: 13587 - RNA, 5785 nt, synthetic construct
  source 1..5785: mol_type = other RNA
aggaaataagagagaaaagaagagtaagaagaaatataagagccaccatggcccctaagaagaagcgtaaagtgagccggatggaacgcctcgtctacgaggtgcggcagaagtgcagaaacatcgaggacatctgcatctcctgcggatctctgaacgtgaccctggagcacccactgttcatcggcggcatgtgccagaactgtaaaaactgttttctggagtgtgcctatcaatacgacgatgacggctaccagagctactgcaccatctgttgcggcggaagagaggtgctgatgtgtggaaataacaactgctgccggtgcttctgcgtggaatgcgtggacctgctggtgggccccggcgccgcccaggccgctattaaggaagatccttggaactgctacatgtgcggccacaagggcacatacggcctgctgagacggagagaggactggcctagcagactgcagatgttcttcgccaataaccacgaccaggagttcgacccccctaaggtgtaccctcccgtccccgccgagaagagaaagcccatccgggtcctgagcctgttcgatggcatcgccaccggtctgctggtgctgaaggacctgggcatccaggtggataggtacattgcctccgaggtgtgcgaggactccatcaccgtgggaatggtgcgtcatcagggcaagatcatgtacgtgggcgacgtgcggagcgtgacacagaagcatatccaggagtggggccctttcgacctggtgatcggcggcagcccttgcaatgacctgagcatcgtgaacccagcccggaagggcctgtacgagggaaccggcagactgttcttcgagttttacagactgctgcacgacgcccggcctaaggaaggcgacgaccggcccttcttttggctgttcgagaatgtggtggccatgggagtcagcgacaagcgggatattagccggttcctggagagcaaccccgtgatgatcgatgccaaggaagtgagcgccgcccaccgggccagatacttctggggcaatctgcctggcatgaacagacccctggccagcaccgtgaacgacaagctggagctgcaggagtgcctggagcacggccggatcgccaagttcagcaaggtgagaaccatcaccacccgaagcaacagcatcaaacaaggcaaggaccagcactttcctgtgttcatgaacgagaaggaggacatcctgtggtgtaccgagatggagagagtgttcgggttcccagtccactacacagatgtcagcaacatgtctagactggccagacagagactgctgggaagaagctggtccgtccctgtgatcagacacctgttcgcccctctgaaggagtacttcgcctgcgtgagcagcggcaacagcaacgccaacagccggggccccagcttctctagcggcctggtgccactgtccctgagagggagccacatgggccccatggagatctacaaaaccgtgagcgcctggaagcggcagcctgtgcgcgtgctgagcctgtttcggaatatcgataaagtcctgaaaagcctgggattcctggagagcggctctggctccggcggtggcaccctgaagtacgtggaggatgtgacaaacgtggtcagacgggatgtggagaagtggggccccttcgatctggtgtacggcagcacccaacccctgggcagctcttgtgaccggtgccctggctggtacatgtttcagttccaccggatcctgcagtacgccctgccgagacaggagtcccagcggccattcttttggattttcatggacaacttgctgctgaccgaggatgaccaggaaactaccactcggttcctgcagaccgaagccgtgaccctgcaggacgtgagaggccgggactaccagaacgccatgcgggtgtggtccaacatccctggactgaaaagcaagcacgcacctctgacccctaaagaagaggagtacctgcaggcccaggtgcggagcagaagcaagctggacgcccctaaggtggatctgctggtgaagaattgcctcctgcccctgagagagtacttcaagtatttcagccagaatagtctgcccctgggaggcagcggcggcggcgtgaaggagagcgtgaccttcaaggacgtggccatcgacttcaccctggaggagtggaggctgatggaccccacccagaggaacctgcacaaggacgtgatgctggagaactacaggaacctggtgagcctgggcctggccgtgagcaagcccgacatgatcagccacctggagaacggcaagggcccctggcccaagcccgccaccaagaacgccaccaggaccaaggacatcagcgaggacggcggcccaagcagcggcgcccctcctcccagcggcggcagcccagccggctccccaacctctaccgaggagggcacctctgagtccgccacccccgagagcggccctggcacctccaccgagcccagcgagggcagcgcacccggcagccctgccggcagccccacctccacagaggagggaaccagcaccgagcccagcgaaggcagcgccccaggcaccagcaccgagcctagtgagcaggagattaaacggatcaacaagatcagaagaagacttgtgaaagacagcaacaccaagaaggccggcaagacaggccccatgaaaaccctgctggttagagtgatgacacccgatctgagagagcggctggaaaacctgagaaagaagcctgaaaatatcccccagcccatcagcaatacatctagagccaacctgaataagctgctgaccgattacaccgaaatgaagaaggcgatcctgcatgtgtactgggaagagttccagaaggaccctgtgggcctgatgagccgggtggcccagcctgccagcaagaagatcgatcagaacaagctgaaacctgagatggacgagaagggcaacctgaccaccgccggctttgcctgctctcagtgtggccagcccctgttcgtgtacaagctggagcaggtgtctgagaagggcaaggcttacaccaactacttcggacggtgcaatgtggccgagcacgaaaagctgatcctgctggcccagctgaagcccgagaaggatagcgacgaagccgtgacatatagcctgggaaagtttgggcagagggccctggatttctacagcattcatgtgaccaaggagtccacccaccccgtgaagcccctggcccagatcgccggaaacagatacgcctccggacctgtgggaaaggccctgagcgacgcatgtatgggcacaatcgcctccttcctgtctaagtaccaggacatcatcatcgaacaccagaaggtggtgaagggcaaccagaagagactggagagcctgcgggagctggccggcaaggaaaacctggaataccctagcgtgaccctgccacctcagcctcacaccaaggagggcgttgatgcctacaacgaagtgatcgcccgggtgcgaatgtgggtgaacctgaacctgtggcagaagctgaagctaagcagagatgatgccaagcctctgctgagactgaagggattcccttcctttcctctggtcgagagacaggccaacgaagtggactggtgggacatggtgtgtaacgtgaagaagctgatcaacgagaaaaaggaggatggcaaggtgttttggcagaatctggctggctacaagagacaggaagccctgagaccatacctgagcagcgaggaagatcggaagaagggaaagaaattcgctcggtaccagctgggcgacctgctgctgcacctggaaaagaagcacggcgaggactggggaaaggtgtacgacgaggcctgggagcggattgacaagaaagtggaaggcctgagcaagcacatcaagctggaagaggaacggagaagcgaggacgcccagagcaaggccgccctgaccgactggctgcgggctaaggccagcttcgtgatcgagggcctgaaggaggccgacaaggacgagttctgcagatgcgagctgaagctgcagaagtggtacggggacctgcggggaaagcccttcgccatcgaagccgagaacagcatcctggacatcagcggcttcagcaagcagtacaactgtgccttcatctggcagaaggacggcgtgaagaagctgaacctgtacctgatcatcaactacttcaagggcggcaagctgcggttcaagaagatcaaacctgaagccttcgaagccaacagattctacaccgtgatcaacaaaaagagcggcgagatcgtgcccatggaggtgaacttcaacttcgacgaccccaacctgatcatcctgcctctggcctttggcaagagacagggcagagaattcatctggaacgacctgctgtccctggaaaccggcagcctgaagctggccaacggaagagtgatcgagaagacactgtacaacagaagaacccggcaggatgagcctgccctgttcgtggccctgaccttcgagcggcgggaggtcctggactcctccaatatcaaaccaatgaacctgatcggcgtggcaagaggcgaaaacatccccgccgtgatcgccctgaccgaccccgagggctgcccactgagccggtttaaggatagcctgggaaacccaacccacatcctgagaatcggcgagagctataaggagaagcagcggaccatccaggccaagaaggaggtggagcagcggagagccggcggctacagccggaagtacgccagcaaagccaagaatctggcagacgatatggtgagaaacaccgctagagatctgctgtactacgccgtgacccaggatgccatgctgatcttcgccaacctgagccggggcttcggccggcagggcaagcggaccttcatggccgagagacagtacacacggatggaggactggctgaccgccaagctggcctacgagggcctgagcaagacctacctgtccaagacactggcccagtacacctccaagacatgcagcaactgtgggtttaccatcaccagcgccgactacgacagggtgctggagaagctgaagaagacagcaacaggctggatgaccacaattaacggcaaggagctgaaggtggagggccagattacctactacaacagatacaagagacagaacgtagtcaaggacctgtccgtcgagctggatagactgagcgaagaatctgtgaacaacgacatctcctcctggacaaagggcagaagcggagaagctctgagcctcctgaagaaaagattctcccatagacccgtgcaggagaagttcgtgtgcctgaactgcggcttcgagacacacgcagccgagcaagccgccctgaacatcgccagatcctggctgttcctgcggagccaggagtacaagaaataccagacaaacaagacaaccggcaacaccgataagagagccttcgtcgagacctggcagtccttttaccggaagaagcttaaggaggtgtggaaacctgccgtgcggtctggcggatctggcggaggctccaccagccccaagaaaaagagaaaagtctaagctgccttctgcggggcttgccttctggccatgcccttcttctctcccttgcacctgtacctcttggtctttgaataaagcctgagtaggaaggctagcaaaaaaaaaaaaaaaaaaaaaaaaaaaaaaaaaaaaaaaaaaaaaaaaaaaaaaaaaaaaaaaaaaaaaaaaaaaaaaaa

SEQ ID NO: 13588 - RNA, 5785 nt, synthetic construct
  source 1..5785: mol_type = other RNA
aggaaataagagagaaaagaagagtaagaagaaatataagagccaccatggcccctaagaagaagcgtaaagtgagccggatggaacgcctcgtctacgaggtgcggcagaagtgcagaaacatcgaggacatctgcatctcctgcggatctctgaacgtgaccctggagcacccactgttcatcggcggcatgtgccagaactgtaaaaactgttttctggagtgtgcctatcaatacgacgatgacggctaccagagctactgcaccatctgttgcggcggaagagaggtgctgatgtgtggaaataacaactgctgccggtgcttctgcgtggaatgcgtggacctgctggtgggccccggcgccgcccaggccgctattaaggaagatccttggaactgctacatgtgcggccacaagggcacatacggcctgctgagacggagagaggactggcctagcagactgcagatgttcttcgccaataaccacgaccaggagttcgacccccctaaggtgtaccctcccgtccccgccgagaagagaaagcccatccgggtcctgagcctgttcgatggcatcgccaccggtctgctggtgctgaaggacctgggcatccaggtggataggtacattgcctccgaggtgtgcgaggactccatcaccgtgggaatggtgcgtcatcagggcaagatcatgtacgtgggcgacgtgcggagcgtgacacagaagcatatccaggagtggggccctttcgacctggtgatcggcggcagcccttgcaatgacctgagcatcgtgaacccagcccggaagggcctgtacgagggaaccggcagactgttcttcgagttttacagactgctgcacgacgcccggcctaaggaaggcgacgaccggcccttcttttggctgttcgagaatgtggtggccatgggagtcagcgacaagcgggatattagccggttcctggagagcaaccccgtgatgatcgatgccaaggaagtgagcgccgcccaccgggccagatacttctggggcaatctgcctggcatgaacagacccctggccagcaccgtgaacgacaagctggagctgcaggagtgcctggagcacggccggatcgccaagttcagcaaggtgagaaccatcaccacccgaagcaacagcatcaaacaaggcaaggaccagcactttcctgtgttcatgaacgagaaggaggacatcctgtggtgtaccgagatggagagagtgttcgggttcccagtccactacacagatgtcagcaacatgtctagactggccagacagagactgctgggaagaagctggtccgtccctgtgatcagacacctgttcgcccctctgaaggagtacttcgcctgcgtgagcagcggcaacagcaacgccaacagccggggccccagcttctctagcggcctggtgccactgtccctgagagggagccacatgggccccatggagatctacaaaaccgtgagcgcctggaagcggcagcctgtgcgcgtgctgagcctgtttcggaatatcgataaagtcctgaaaagcctgggattcctggagagcggctctggctccggcggtggcaccctgaagtacgtggaggatgtgacaaacgtggtcagacgggatgtggagaagtggggccccttcgatctggtgtacggcagcacccaacccctgggcagctcttgtgaccggtgccctggctggtacatgtttcagttccaccggatcctgcagtacgccctgccgagacaggagtcccagcggccattcttttggattttcatggacaacttgctgctgaccgaggatgaccaggaaactaccactcggttcctgcagaccgaagccgtgaccctgcaggacgtgagaggccgggactaccagaacgccatgcgggtgtggtccaacatccctggactgaaaagcaagcacgcacctctgacccctaaagaagaggagtacctgcaggcccaggtgcggagcagaagcaagctggacgcccctaaggtggatctgctggtgaagaattgcctcctgcccctgagagagtacttcaagtatttcagccagaatagtctgcccctgggaggcagcggcggcggcgcccaggagatggtgaccttccaggacgtggccgtggacttcaccagggaggagtggtgcctgctgagccccccccagaaggagctgtacaaggaggtgatgctggagaacgccaggaacctgctgagcgtgggcctgcccgccctgcccgaggacgtgatcagctacctggagcagagggaggccccctggatgctggagagggagggccccaggagctgctgccccggcgagatcctgctgggcggcccaagcagcggcgcccctcctcccagcggcggcagcccagccggctccccaacctctaccgaggagggcacctctgagtccgccacccccgagagcggccctggcacctccaccgagcccagcgagggcagcgcacccggcagccctgccggcagccccacctccacagaggagggaaccagcaccgagcccagcgaaggcagcgccccaggcaccagcaccgagcctagtgagcaggagattaaacggatcaacaagatcagaagaagacttgtgaaagacagcaacaccaagaaggccggcaagacaggccccatgaaaaccctgctggttagagtgatgacacccgatctgagagagcggctggaaaacctgagaaagaagcctgaaaatatcccccagcccatcagcaatacatctagagccaacctgaataagctgctgaccgattacaccgaaatgaagaaggcgatcctgcatgtgtactgggaagagttccagaaggaccctgtgggcctgatgagccgggtggcccagcctgccagcaagaagatcgatcagaacaagctgaaacctgagatggacgagaagggcaacctgaccaccgccggctttgcctgctctcagtgtggccagcccctgttcgtgtacaagctggagcaggtgtctgagaagggcaaggcttacaccaactacttcggacggtgcaatgtggccgagcacgaaaagctgatcctgctggcccagctgaagcccgagaaggatagcgacgaagccgtgacatatagcctgggaaagtttgggcagagggccctggatttctacagcattcatgtgaccaaggagtccacccaccccgtgaagcccctggcccagatcgccggaaacagatacgcctccggacctgtgggaaaggccctgagcgacgcatgtatgggcacaatcgcctccttcctgtctaagtaccaggacatcatcatcgaacaccagaaggtggtgaagggcaaccagaagagactggagagcctgcgggagctggccggcaaggaaaacctggaataccctagcgtgaccctgccacctcagcctcacaccaaggagggcgttgatgcctacaacgaagtgatcgcccgggtgcgaatgtgggtgaacctgaacctgtggcagaagctgaagctaagcagagatgatgccaagcctctgctgagactgaagggattcccttcctttcctctggtcgagagacaggccaacgaagtggactggtgggacatggtgtgtaacgtgaagaagctgatcaacgagaaaaaggaggatggcaaggtgttttggcagaatctggctggctacaagagacaggaagccctgagaccatacctgagcagcgaggaagatcggaagaagggaaagaaattcgctcggtaccagctgggcgacctgctgctgcacctggaaaagaagcacggcgaggactggggaaaggtgtacgacgaggcctgggagcggattgacaagaaagtggaaggcctgagcaagcacatcaagctggaagaggaacggagaagcgaggacgcccagagcaaggccgccctgaccgactggctgcgggctaaggccagcttcgtgatcgagggcctgaaggaggccgacaaggacgagttctgcagatgcgagctgaagctgcagaagtggtacggggacctgcggggaaagcccttcgccatcgaagccgagaacagcatcctggacatcagcggcttcagcaagcagtacaactgtgccttcatctggcagaaggacggcgtgaagaagctgaacctgtacctgatcatcaactacttcaagggcggcaagctgcggttcaagaagatcaaacctgaagccttcgaagccaacagattctacaccgtgatcaacaaaaagagcggcgagatcgtgcccatggaggtgaacttcaacttcgacgaccccaacctgatcatcctgcctctggcctttggcaagagacagggcagagaattcatctggaacgacctgctgtccctggaaaccggcagcctgaagctggccaacggaagagtgatcgagaagacactgtacaacagaagaacccggcaggatgagcctgccctgttcgtggccctgaccttcgagcggcgggaggtcctggactcctccaatatcaaaccaatgaacctgatcggcgtggcaagaggcgaaaacatccccgccgtgatcgccctgaccgaccccgagggctgcccactgagccggtttaaggatagcctgggaaacccaacccacatcctgagaatcggcgagagctataaggagaagcagcggaccatccaggccaagaaggaggtggagcagcggagagccggcggctacagccggaagtacgccagcaaagccaagaatctggcagacgatatggtgagaaacaccgctagagatctgctgtactacgccgtgacccaggatgccatgctgatcttcgccaacctgagccggggcttcggccggcagggcaagcggaccttcatggccgagagacagtacacacggatggaggactggctgaccgccaagctggcctacgagggcctgagcaagacctacctgtccaagacactggcccagtacacctccaagacatgcagcaactgtgggtttaccatcaccagcgccgactacgacagggtgctggagaagctgaagaagacagcaacaggctggatgaccacaattaacggcaaggagctgaaggtggagggccagattacctactacaacagatacaagagacagaacgtagtcaaggacctgtccgtcgagctggatagactgagcgaagaatctgtgaacaacgacatctcctcctggacaaagggcagaagcggagaagctctgagcctcctgaagaaaagattctcccatagacccgtgcaggagaagttcgtgtgcctgaactgcggcttcgagacacacgcagccgagcaagccgccctgaacatcgccagatcctggctgttcctgcggagccaggagtacaagaaataccagacaaacaagacaaccggcaacaccgataagagagccttcgtcgagacctggcagtccttttaccggaagaagcttaaggaggtgtggaaacctgccgtgcggtctggcggatctggcggaggctccaccagccccaagaaaaagagaaaagtctaagctgccttctgcggggcttgccttctggccatgcccttcttctctcccttgcacctgtacctcttggtctttgaataaagcctgagtaggaaggctagcaaaaaaaaaaaaaaaaaaaaaaaaaaaaaaaaaaaaaaaaaaaaaaaaaaaaaaaaaaaaaaaaaaaaaaaaaaaaaaaa

SEQ ID NO: 13589 - RNA, 5785 nt, synthetic construct
  source 1..5785: mol_type = other RNA
aggaaataagagagaaaagaagagtaagaagaaatataagagccaccatggcccctaagaagaagcgtaaagtgagccggatggaacgcctcgtctacgaggtgcggcagaagtgcagaaacatcgaggacatctgcatctcctgcggatctctgaacgtgaccctggagcacccactgttcatcggcggcatgtgccagaactgtaaaaactgttttctggagtgtgcctatcaatacgacgatgacggctaccagagctactgcaccatctgttgcggcggaagagaggtgctgatgtgtggaaataacaactgctgccggtgcttctgcgtggaatgcgtggacctgctggtgggccccggcgccgcccaggccgctattaaggaagatccttggaactgctacatgtgcggccacaagggcacatacggcctgctgagacggagagaggactggcctagcagactgcagatgttcttcgccaataaccacgaccaggagttcgacccccctaaggtgtaccctcccgtccccgccgagaagagaaagcccatccgggtcctgagcctgttcgatggcatcgccaccggtctgctggtgctgaaggacctgggcatccaggtggataggtacattgcctccgaggtgtgcgaggactccatcaccgtgggaatggtgcgtcatcagggcaagatcatgtacgtgggcgacgtgcggagcgtgacacagaagcatatccaggagtggggccctttcgacctggtgatcggcggcagcccttgcaatgacctgagcatcgtgaacccagcccggaagggcctgtacgagggaaccggcagactgttcttcgagttttacagactgctgcacgacgcccggcctaaggaaggcgacgaccggcccttcttttggctgttcgagaatgtggtggccatgggagtcagcgacaagcgggatattagccggttcctggagagcaaccccgtgatgatcgatgccaaggaagtgagcgccgcccaccgggccagatacttctggggcaatctgcctggcatgaacagacccctggccagcaccgtgaacgacaagctggagctgcaggagtgcctggagcacggccggatcgccaagttcagcaaggtgagaaccatcaccacccgaagcaacagcatcaaacaaggcaaggaccagcactttcctgtgttcatgaacgagaaggaggacatcctgtggtgtaccgagatggagagagtgttcgggttcccagtccactacacagatgtcagcaacatgtctagactggccagacagagactgctgggaagaagctggtccgtccctgtgatcagacacctgttcgcccctctgaaggagtacttcgcctgcgtgagcagcggcaacagcaacgccaacagccggggccccagcttctctagcggcctggtgccactgtccctgagagggagccacatgggccccatggagatctacaaaaccgtgagcgcctggaagcggcagcctgtgcgcgtgctgagcctgtttcggaatatcgataaagtcctgaaaagcctgggattcctggagagcggctctggctccggcggtggcaccctgaagtacgtggaggatgtgacaaacgtggtcagacgggatgtggagaagtggggccccttcgatctggtgtacggcagcacccaacccctgggcagctcttgtgaccggtgccctggctggtacatgtttcagttccaccggatcctgcagtacgccctgccgagacaggagtcccagcggccattcttttggattttcatggacaacttgctgctgaccgaggatgaccaggaaactaccactcggttcctgcagaccgaagccgtgaccctgcaggacgtgagaggccgggactaccagaacgccatgcgggtgtggtccaacatccctggactgaaaagcaagcacgcacctctgacccctaaagaagaggagtacctgcaggcccaggtgcggagcagaagcaagctggacgcccctaaggtggatctgctggtgaagaattgcctcctgcccctgagagagtacttcaagtatttcagccagaatagtctgcccctgggaggcagcggcggcggcgtgagcttcgaggacgtggccgtgtacttcacccaggaggagtggaccctgctggacagcgcccagagggacctgtacagggacgtgatgctggagacctgcgagaacctggccagcatcggcaacctgctgaaccacagcgtgatgtactggctggagggcgaggagaacctgggcaccgtgcaggagggcgacccccaggagtggaggctgaagaccaagggcagcaccctgaggcccgacggcggcccaagcagcggcgcccctcctcccagcggcggcagcccagccggctccccaacctctaccgaggagggcacctctgagtccgccacccccgagagcggccctggcacctccaccgagcccagcgagggcagcgcacccggcagccctgccggcagccccacctccacagaggagggaaccagcaccgagcccagcgaaggcagcgccccaggcaccagcaccgagcctagtgagcaggagattaaacggatcaacaagatcagaagaagacttgtgaaagacagcaacaccaagaaggccggcaagacaggccccatgaaaaccctgctggttagagtgatgacacccgatctgagagagcggctggaaaacctgagaaagaagcctgaaaatatcccccagcccatcagcaatacatctagagccaacctgaataagctgctgaccgattacaccgaaatgaagaaggcgatcctgcatgtgtactgggaagagttccagaaggaccctgtgggcctgatgagccgggtggcccagcctgccagcaagaagatcgatcagaacaagctgaaacctgagatggacgagaagggcaacctgaccaccgccggctttgcctgctctcagtgtggccagcccctgttcgtgtacaagctggagcaggtgtctgagaagggcaaggcttacaccaactacttcggacggtgcaatgtggccgagcacgaaaagctgatcctgctggcccagctgaagcccgagaaggatagcgacgaagccgtgacatatagcctgggaaagtttgggcagagggccctggatttctacagcattcatgtgaccaaggagtccacccaccccgtgaagcccctggcccagatcgccggaaacagatacgcctccggacctgtgggaaaggccctgagcgacgcatgtatgggcacaatcgcctccttcctgtctaagtaccaggacatcatcatcgaacaccagaaggtggtgaagggcaaccagaagagactggagagcctgcgggagctggccggcaaggaaaacctggaataccctagcgtgaccctgccacctcagcctcacaccaaggagggcgttgatgcctacaacgaagtgatcgcccgggtgcgaatgtgggtgaacctgaacctgtggcagaagctgaagctaagcagagatgatgccaagcctctgctgagactgaagggattcccttcctttcctctggtcgagagacaggccaacgaagtggactggtgggacatggtgtgtaacgtgaagaagctgatcaacgagaaaaaggaggatggcaaggtgttttggcagaatctggctggctacaagagacaggaagccctgagaccatacctgagcagcgaggaagatcggaagaagggaaagaaattcgctcggtaccagctgggcgacctgctgctgcacctggaaaagaagcacggcgaggactggggaaaggtgtacgacgaggcctgggagcggattgacaagaaagtggaaggcctgagcaagcacatcaagctggaagaggaacggagaagcgaggacgcccagagcaaggccgccctgaccgactggctgcgggctaaggccagcttcgtgatcgagggcctgaaggaggccgacaaggacgagttctgcagatgcgagctgaagctgcagaagtggtacggggacctgcggggaaagcccttcgccatcgaagccgagaacagcatcctggacatcagcggcttcagcaagcagtacaactgtgccttcatctggcagaaggacggcgtgaagaagctgaacctgtacctgatcatcaactacttcaagggcggcaagctgcggttcaagaagatcaaacctgaagccttcgaagccaacagattctacaccgtgatcaacaaaaagagcggcgagatcgtgcccatggaggtgaacttcaacttcgacgaccccaacctgatcatcctgcctctggcctttggcaagagacagggcagagaattcatctggaacgacctgctgtccctggaaaccggcagcctgaagctggccaacggaagagtgatcgagaagacactgtacaacagaagaacccggcaggatgagcctgccctgttcgtggccctgaccttcgagcggcgggaggtcctggactcctccaatatcaaaccaatgaacctgatcggcgtggcaagaggcgaaaacatccccgccgtgatcgccctgaccgaccccgagggctgcccactgagccggtttaaggatagcctgggaaacccaacccacatcctgagaatcggcgagagctataaggagaagcagcggaccatccaggccaagaaggaggtggagcagcggagagccggcggctacagccggaagtacgccagcaaagccaagaatctggcagacgatatggtgagaaacaccgctagagatctgctgtactacgccgtgacccaggatgccatgctgatcttcgccaacctgagccggggcttcggccggcagggcaagcggaccttcatggccgagagacagtacacacggatggaggactggctgaccgccaagctggcctacgagggcctgagcaagacctacctgtccaagacactggcccagtacacctccaagacatgcagcaactgtgggtttaccatcaccagcgccgactacgacagggtgctggagaagctgaagaagacagcaacaggctggatgaccacaattaacggcaaggagctgaaggtggagggccagattacctactacaacagatacaagagacagaacgtagtcaaggacctgtccgtcgagctggatagactgagcgaagaatctgtgaacaacgacatctcctcctggacaaagggcagaagcggagaagctctgagcctcctgaagaaaagattctcccatagacccgtgcaggagaagttcgtgtgcctgaactgcggcttcgagacacacgcagccgagcaagccgccctgaacatcgccagatcctggctgttcctgcggagccaggagtacaagaaataccagacaaacaagacaaccggcaacaccgataagagagccttcgtcgagacctggcagtccttttaccggaagaagcttaaggaggtgtggaaacctgccgtgcggtctggcggatctggcggaggctccaccagccccaagaaaaagagaaaagtctaagctgccttctgcggggcttgccttctggccatgcccttcttctctcccttgcacctgtacctcttggtctttgaataaagcctgagtaggaaggctagcaaaaaaaaaaaaaaaaaaaaaaaaaaaaaaaaaaaaaaaaaaaaaaaaaaaaaaaaaaaaaaaaaaaaaaaaaaaaaaaa

SEQ ID NO: 13590 - RNA, 5785 nt, synthetic construct
  source 1..5785: mol_type = other RNA
aggaaataagagagaaaagaagagtaagaagaaatataagagccaccatggcccctaagaagaagcgtaaagtgagccggatggaacgcctcgtctacgaggtgcggcagaagtgcagaaacatcgaggacatctgcatctcctgcggatctctgaacgtgaccctggagcacccactgttcatcggcggcatgtgccagaactgtaaaaactgttttctggagtgtgcctatcaatacgacgatgacggctaccagagctactgcaccatctgttgcggcggaagagaggtgctgatgtgtggaaataacaactgctgccggtgcttctgcgtggaatgcgtggacctgctggtgggccccggcgccgcccaggccgctattaaggaagatccttggaactgctacatgtgcggccacaagggcacatacggcctgctgagacggagagaggactggcctagcagactgcagatgttcttcgccaataaccacgaccaggagttcgacccccctaaggtgtaccctcccgtccccgccgagaagagaaagcccatccgggtcctgagcctgttcgatggcatcgccaccggtctgctggtgctgaaggacctgggcatccaggtggataggtacattgcctccgaggtgtgcgaggactccatcaccgtgggaatggtgcgtcatcagggcaagatcatgtacgtgggcgacgtgcggagcgtgacacagaagcatatccaggagtggggccctttcgacctggtgatcggcggcagcccttgcaatgacctgagcatcgtgaacccagcccggaagggcctgtacgagggaaccggcagactgttcttcgagttttacagactgctgcacgacgcccggcctaaggaaggcgacgaccggcccttcttttggctgttcgagaatgtggtggccatgggagtcagcgacaagcgggatattagccggttcctggagagcaaccccgtgatgatcgatgccaaggaagtgagcgccgcccaccgggccagatacttctggggcaatctgcctggcatgaacagacccctggccagcaccgtgaacgacaagctggagctgcaggagtgcctggagcacggccggatcgccaagttcagcaaggtgagaaccatcaccacccgaagcaacagcatcaaacaaggcaaggaccagcactttcctgtgttcatgaacgagaaggaggacatcctgtggtgtaccgagatggagagagtgttcgggttcccagtccactacacagatgtcagcaacatgtctagactggccagacagagactgctgggaagaagctggtccgtccctgtgatcagacacctgttcgcccctctgaaggagtacttcgcctgcgtgagcagcggcaacagcaacgccaacagccggggccccagcttctctagcggcctggtgccactgtccctgagagggagccacatgggccccatggagatctacaaaaccgtgagcgcctggaagcggcagcctgtgcgcgtgctgagcctgtttcggaatatcgataaagtcctgaaaagcctgggattcctggagagcggctctggctccggcggtggcaccctgaagtacgtggaggatgtgacaaacgtggtcagacgggatgtggagaagtggggccccttcgatctggtgtacggcagcacccaacccctgggcagctcttgtgaccggtgccctggctggtacatgtttcagttccaccggatcctgcagtacgccctgccgagacaggagtcccagcggccattcttttggattttcatggacaacttgctgctgaccgaggatgaccaggaaactaccactcggttcctgcagaccgaagccgtgaccctgcaggacgtgagaggccgggactaccagaacgccatgcgggtgtggtccaacatccctggactgaaaagcaagcacgcacctctgacccctaaagaagaggagtacctgcaggcccaggtgcggagcagaagcaagctggacgcccctaaggtggatctgctggtgaagaattgcctcctgcccctgagagagtacttcaagtatttcagccagaatagtctgcccctgggaggcagcggcggcggcgcctgggcccccctgagcttcgaggacgtggccgtgggcttcagctgggaggagtggcagctgctggcccccagccagaaggacctgtacagggacgtgatgctggagaactacaggaacctggtgagcgtgggctaccaggccagcaagcccgacagcgtgttccagctggagcagggcgagcccccctggatcgtggagggcgccgcccagagccagacctgccaggaggagatctgggagggcggcccaagcagcggcgcccctcctcccagcggcggcagcccagccggctccccaacctctaccgaggagggcacctctgagtccgccacccccgagagcggccctggcacctccaccgagcccagcgagggcagcgcacccggcagccctgccggcagccccacctccacagaggagggaaccagcaccgagcccagcgaaggcagcgccccaggcaccagcaccgagcctagtgagcaggagattaaacggatcaacaagatcagaagaagacttgtgaaagacagcaacaccaagaaggccggcaagacaggccccatgaaaaccctgctggttagagtgatgacacccgatctgagagagcggctggaaaacctgagaaagaagcctgaaaatatcccccagcccatcagcaatacatctagagccaacctgaataagctgctgaccgattacaccgaaatgaagaaggcgatcctgcatgtgtactgggaagagttccagaaggaccctgtgggcctgatgagccgggtggcccagcctgccagcaagaagatcgatcagaacaagctgaaacctgagatggacgagaagggcaacctgaccaccgccggctttgcctgctctcagtgtggccagcccctgttcgtgtacaagctggagcaggtgtctgagaagggcaaggcttacaccaactacttcggacggtgcaatgtggccgagcacgaaaagctgatcctgctggcccagctgaagcccgagaaggatagcgacgaagccgtgacatatagcctgggaaagtttgggcagagggccctggatttctacagcattcatgtgaccaaggagtccacccaccccgtgaagcccctggcccagatcgccggaaacagatacgcctccggacctgtgggaaaggccctgagcgacgcatgtatgggcacaatcgcctccttcctgtctaagtaccaggacatcatcatcgaacaccagaaggtggtgaagggcaaccagaagagactggagagcctgcgggagctggccggcaaggaaaacctggaataccctagcgtgaccctgccacctcagcctcacaccaaggagggcgttgatgcctacaacgaagtgatcgcccgggtgcgaatgtgggtgaacctgaacctgtggcagaagctgaagctaagcagagatgatgccaagcctctgctgagactgaagggattcccttcctttcctctggtcgagagacaggccaacgaagtggactggtgggacatggtgtgtaacgtgaagaagctgatcaacgagaaaaaggaggatggcaaggtgttttggcagaatctggctggctacaagagacaggaagccctgagaccatacctgagcagcgaggaagatcggaagaagggaaagaaattcgctcggtaccagctgggcgacctgctgctgcacctggaaaagaagcacggcgaggactggggaaaggtgtacgacgaggcctgggagcggattgacaagaaagtggaaggcctgagcaagcacatcaagctggaagaggaacggagaagcgaggacgcccagagcaaggccgccctgaccgactggctgcgggctaaggccagcttcgtgatcgagggcctgaaggaggccgacaaggacgagttctgcagatgcgagctgaagctgcagaagtggtacggggacctgcggggaaagcccttcgccatcgaagccgagaacagcatcctggacatcagcggcttcagcaagcagtacaactgtgccttcatctggcagaaggacggcgtgaagaagctgaacctgtacctgatcatcaactacttcaagggcggcaagctgcggttcaagaagatcaaacctgaagccttcgaagccaacagattctacaccgtgatcaacaaaaagagcggcgagatcgtgcccatggaggtgaacttcaacttcgacgaccccaacctgatcatcctgcctctggcctttggcaagagacagggcagagaattcatctggaacgacctgctgtccctggaaaccggcagcctgaagctggccaacggaagagtgatcgagaagacactgtacaacagaagaacccggcaggatgagcctgccctgttcgtggccctgaccttcgagcggcgggaggtcctggactcctccaatatcaaaccaatgaacctgatcggcgtggcaagaggcgaaaacatccccgccgtgatcgccctgaccgaccccgagggctgcccactgagccggtttaaggatagcctgggaaacccaacccacatcctgagaatcggcgagagctataaggagaagcagcggaccatccaggccaagaaggaggtggagcagcggagagccggcggctacagccggaagtacgccagcaaagccaagaatctggcagacgatatggtgagaaacaccgctagagatctgctgtactacgccgtgacccaggatgccatgctgatcttcgccaacctgagccggggcttcggccggcagggcaagcggaccttcatggccgagagacagtacacacggatggaggactggctgaccgccaagctggcctacgagggcctgagcaagacctacctgtccaagacactggcccagtacacctccaagacatgcagcaactgtgggtttaccatcaccagcgccgactacgacagggtgctggagaagctgaagaagacagcaacaggctggatgaccacaattaacggcaaggagctgaaggtggagggccagattacctactacaacagatacaagagacagaacgtagtcaaggacctgtccgtcgagctggatagactgagcgaagaatctgtgaacaacgacatctcctcctggacaaagggcagaagcggagaagctctgagcctcctgaagaaaagattctcccatagacccgtgcaggagaagttcgtgtgcctgaactgcggcttcgagacacacgcagccgagcaagccgccctgaacatcgccagatcctggctgttcctgcggagccaggagtacaagaaataccagacaaacaagacaaccggcaacaccgataagagagccttcgtcgagacctggcagtccttttaccggaagaagcttaaggaggtgtggaaacctgccgtgcggtctggcggatctggcggaggctccaccagccccaagaaaaagagaaaagtctaagctgccttctgcggggcttgccttctggccatgcccttcttctctcccttgcacctgtacctcttggtctttgaataaagcctgagtaggaaggctagcaaaaaaaaaaaaaaaaaaaaaaaaaaaaaaaaaaaaaaaaaaaaaaaaaaaaaaaaaaaaaaaaaaaaaaaaaaaaaaaa

SEQ ID NO: 13591 - RNA, 5785 nt, synthetic construct
  source 1..5785: mol_type = other RNA
aggaaataagagagaaaagaagagtaagaagaaatataagagccaccatggcccctaagaagaagcgtaaagtgagccggatggaacgcctcgtctacgaggtgcggcagaagtgcagaaacatcgaggacatctgcatctcctgcggatctctgaacgtgaccctggagcacccactgttcatcggcggcatgtgccagaactgtaaaaactgttttctggagtgtgcctatcaatacgacgatgacggctaccagagctactgcaccatctgttgcggcggaagagaggtgctgatgtgtggaaataacaactgctgccggtgcttctgcgtggaatgcgtggacctgctggtgggccccggcgccgcccaggccgctattaaggaagatccttggaactgctacatgtgcggccacaagggcacatacggcctgctgagacggagagaggactggcctagcagactgcagatgttcttcgccaataaccacgaccaggagttcgacccccctaaggtgtaccctcccgtccccgccgagaagagaaagcccatccgggtcctgagcctgttcgatggcatcgccaccggtctgctggtgctgaaggacctgggcatccaggtggataggtacattgcctccgaggtgtgcgaggactccatcaccgtgggaatggtgcgtcatcagggcaagatcatgtacgtgggcgacgtgcggagcgtgacacagaagcatatccaggagtggggccctttcgacctggtgatcggcggcagcccttgcaatgacctgagcatcgtgaacccagcccggaagggcctgtacgagggaaccggcagactgttcttcgagttttacagactgctgcacgacgcccggcctaaggaaggcgacgaccggcccttcttttggctgttcgagaatgtggtggccatgggagtcagcgacaagcgggatattagccggttcctggagagcaaccccgtgatgatcgatgccaaggaagtgagcgccgcccaccgggccagatacttctggggcaatctgcctggcatgaacagacccctggccagcaccgtgaacgacaagctggagctgcaggagtgcctggagcacggccggatcgccaagttcagcaaggtgagaaccatcaccacccgaagcaacagcatcaaacaaggcaaggaccagcactttcctgtgttcatgaacgagaaggaggacatcctgtggtgtaccgagatggagagagtgttcgggttcccagtccactacacagatgtcagcaacatgtctagactggccagacagagactgctgggaagaagctggtccgtccctgtgatcagacacctgttcgcccctctgaaggagtacttcgcctgcgtgagcagcggcaacagcaacgccaacagccggggccccagcttctctagcggcctggtgccactgtccctgagagggagccacatgggccccatggagatctacaaaaccgtgagcgcctggaagcggcagcctgtgcgcgtgctgagcctgtttcggaatatcgataaagtcctgaaaagcctgggattcctggagagcggctctggctccggcggtggcaccctgaagtacgtggaggatgtgacaaacgtggtcagacgggatgtggagaagtggggccccttcgatctggtgtacggcagcacccaacccctgggcagctcttgtgaccggtgccctggctggtacatgtttcagttccaccggatcctgcagtacgccctgccgagacaggagtcccagcggccattcttttggattttcatggacaacttgctgctgaccgaggatgaccaggaaactaccactcggttcctgcagaccgaagccgtgaccctgcaggacgtgagaggccgggactaccagaacgccatgcgggtgtggtccaacatccctggactgaaaagcaagcacgcacctctgacccctaaagaagaggagtacctgcaggcccaggtgcggagcagaagcaagctggacgcccctaaggtggatctgctggtgaagaattgcctcctgcccctgagagagtacttcaagtatttcagccagaatagtctgcccctgggaggcagcggcggcggcatgctgatgatgttcagggacgtggccgtggacttcagccaggaggagtgggagtgcctggacctggagcagaggggcctgtacagggacgtgatgctggagaactacagcaacatggtgagcctgggcctgtgcatctaccagcccgaggccttcagcctgctggagaagggcaaggagccctggaagatcctgagggacgagaccaggggcccctgccccgacatgcagagcaggtgccagggcggcccaagcagcggcgcccctcctcccagcggcggcagcccagccggctccccaacctctaccgaggagggcacctctgagtccgccacccccgagagcggccctggcacctccaccgagcccagcgagggcagcgcacccggcagccctgccggcagccccacctccacagaggagggaaccagcaccgagcccagcgaaggcagcgccccaggcaccagcaccgagcctagtgagcaggagattaaacggatcaacaagatcagaagaagacttgtgaaagacagcaacaccaagaaggccggcaagacaggccccatgaaaaccctgctggttagagtgatgacacccgatctgagagagcggctggaaaacctgagaaagaagcctgaaaatatcccccagcccatcagcaatacatctagagccaacctgaataagctgctgaccgattacaccgaaatgaagaaggcgatcctgcatgtgtactgggaagagttccagaaggaccctgtgggcctgatgagccgggtggcccagcctgccagcaagaagatcgatcagaacaagctgaaacctgagatggacgagaagggcaacctgaccaccgccggctttgcctgctctcagtgtggccagcccctgttcgtgtacaagctggagcaggtgtctgagaagggcaaggcttacaccaactacttcggacggtgcaatgtggccgagcacgaaaagctgatcctgctggcccagctgaagcccgagaaggatagcgacgaagccgtgacatatagcctgggaaagtttgggcagagggccctggatttctacagcattcatgtgaccaaggagtccacccaccccgtgaagcccctggcccagatcgccggaaacagatacgcctccggacctgtgggaaaggccctgagcgacgcatgtatgggcacaatcgcctccttcctgtctaagtaccaggacatcatcatcgaacaccagaaggtggtgaagggcaaccagaagagactggagagcctgcgggagctggccggcaaggaaaacctggaataccctagcgtgaccctgccacctcagcctcacaccaaggagggcgttgatgcctacaacgaagtgatcgcccgggtgcgaatgtgggtgaacctgaacctgtggcagaagctgaagctaagcagagatgatgccaagcctctgctgagactgaagggattcccttcctttcctctggtcgagagacaggccaacgaagtggactggtgggacatggtgtgtaacgtgaagaagctgatcaacgagaaaaaggaggatggcaaggtgttttggcagaatctggctggctacaagagacaggaagccctgagaccatacctgagcagcgaggaagatcggaagaagggaaagaaattcgctcggtaccagctgggcgacctgctgctgcacctggaaaagaagcacggcgaggactggggaaaggtgtacgacgaggcctgggagcggattgacaagaaagtggaaggcctgagcaagcacatcaagctggaagaggaacggagaagcgaggacgcccagagcaaggccgccctgaccgactggctgcgggctaaggccagcttcgtgatcgagggcctgaaggaggccgacaaggacgagttctgcagatgcgagctgaagctgcagaagtggtacggggacctgcggggaaagcccttcgccatcgaagccgagaacagcatcctggacatcagcggcttcagcaagcagtacaactgtgccttcatctggcagaaggacggcgtgaagaagctgaacctgtacctgatcatcaactacttcaagggcggcaagctgcggttcaagaagatcaaacctgaagccttcgaagccaacagattctacaccgtgatcaacaaaaagagcggcgagatcgtgcccatggaggtgaacttcaacttcgacgaccccaacctgatcatcctgcctctggcctttggcaagagacagggcagagaattcatctggaacgacctgctgtccctggaaaccggcagcctgaagctggccaacggaagagtgatcgagaagacactgtacaacagaagaacccggcaggatgagcctgccctgttcgtggccctgaccttcgagcggcgggaggtcctggactcctccaatatcaaaccaatgaacctgatcggcgtggcaagaggcgaaaacatccccgccgtgatcgccctgaccgaccccgagggctgcccactgagccggtttaaggatagcctgggaaacccaacccacatcctgagaatcggcgagagctataaggagaagcagcggaccatccaggccaagaaggaggtggagcagcggagagccggcggctacagccggaagtacgccagcaaagccaagaatctggcagacgatatggtgagaaacaccgctagagatctgctgtactacgccgtgacccaggatgccatgctgatcttcgccaacctgagccggggcttcggccggcagggcaagcggaccttcatggccgagagacagtacacacggatggaggactggctgaccgccaagctggcctacgagggcctgagcaagacctacctgtccaagacactggcccagtacacctccaagacatgcagcaactgtgggtttaccatcaccagcgccgactacgacagggtgctggagaagctgaagaagacagcaacaggctggatgaccacaattaacggcaaggagctgaaggtggagggccagattacctactacaacagatacaagagacagaacgtagtcaaggacctgtccgtcgagctggatagactgagcgaagaatctgtgaacaacgacatctcctcctggacaaagggcagaagcggagaagctctgagcctcctgaagaaaagattctcccatagacccgtgcaggagaagttcgtgtgcctgaactgcggcttcgagacacacgcagccgagcaagccgccctgaacatcgccagatcctggctgttcctgcggagccaggagtacaagaaataccagacaaacaagacaaccggcaacaccgataagagagccttcgtcgagacctggcagtccttttaccggaagaagcttaaggaggtgtggaaacctgccgtgcggtctggcggatctggcggaggctccaccagccccaagaaaaagagaaaagtctaagctgccttctgcggggcttgccttctggccatgcccttcttctctcccttgcacctgtacctcttggtctttgaataaagcctgagtaggaaggctagcaaaaaaaaaaaaaaaaaaaaaaaaaaaaaaaaaaaaaaaaaaaaaaaaaaaaaaaaaaaaaaaaaaaaaaaaaaaaaaaa

SEQ ID NO: 13592 - RNA, 5785 nt, synthetic construct
  source 1..5785: mol_type = other RNA
aggaaataagagagaaaagaagagtaagaagaaatataagagccaccatggcccctaagaagaagcgtaaagtgagccggatggaacgcctcgtctacgaggtgcggcagaagtgcagaaacatcgaggacatctgcatctcctgcggatctctgaacgtgaccctggagcacccactgttcatcggcggcatgtgccagaactgtaaaaactgttttctggagtgtgcctatcaatacgacgatgacggctaccagagctactgcaccatctgttgcggcggaagagaggtgctgatgtgtggaaataacaactgctgccggtgcttctgcgtggaatgcgtggacctgctggtgggccccggcgccgcccaggccgctattaaggaagatccttggaactgctacatgtgcggccacaagggcacatacggcctgctgagacggagagaggactggcctagcagactgcagatgttcttcgccaataaccacgaccaggagttcgacccccctaaggtgtaccctcccgtccccgccgagaagagaaagcccatccgggtcctgagcctgttcgatggcatcgccaccggtctgctggtgctgaaggacctgggcatccaggtggataggtacattgcctccgaggtgtgcgaggactccatcaccgtgggaatggtgcgtcatcagggcaagatcatgtacgtgggcgacgtgcggagcgtgacacagaagcatatccaggagtggggccctttcgacctggtgatcggcggcagcccttgcaatgacctgagcatcgtgaacccagcccggaagggcctgtacgagggaaccggcagactgttcttcgagttttacagactgctgcacgacgcccggcctaaggaaggcgacgaccggcccttcttttggctgttcgagaatgtggtggccatgggagtcagcgacaagcgggatattagccggttcctggagagcaaccccgtgatgatcgatgccaaggaagtgagcgccgcccaccgggccagatacttctggggcaatctgcctggcatgaacagacccctggccagcaccgtgaacgacaagctggagctgcaggagtgcctggagcacggccggatcgccaagttcagcaaggtgagaaccatcaccacccgaagcaacagcatcaaacaaggcaaggaccagcactttcctgtgttcatgaacgagaaggaggacatcctgtggtgtaccgagatggagagagtgttcgggttcccagtccactacacagatgtcagcaacatgtctagactggccagacagagactgctgggaagaagctggtccgtccctgtgatcagacacctgttcgcccctctgaaggagtacttcgcctgcgtgagcagcggcaacagcaacgccaacagccggggccccagcttctctagcggcctggtgccactgtccctgagagggagccacatgggccccatggagatctacaaaaccgtgagcgcctggaagcggcagcctgtgcgcgtgctgagcctgtttcggaatatcgataaagtcctgaaaagcctgggattcctggagagcggctctggctccggcggtggcaccctgaagtacgtggaggatgtgacaaacgtggtcagacgggatgtggagaagtggggccccttcgatctggtgtacggcagcacccaacccctgggcagctcttgtgaccggtgccctggctggtacatgtttcagttccaccggatcctgcagtacgccctgccgagacaggagtcccagcggccattcttttggattttcatggacaacttgctgctgaccgaggatgaccaggaaactaccactcggttcctgcagaccgaagccgtgaccctgcaggacgtgagaggccgggactaccagaacgccatgcgggtgtggtccaacatccctggactgaaaagcaagcacgcacctctgacccctaaagaagaggagtacctgcaggcccaggtgcggagcagaagcaagctggacgcccctaaggtggatctgctggtgaagaattgcctcctgcccctgagagagtacttcaagtatttcagccagaatagtctgcccctgggaggcagcggcggcggcgagcccggcgccgtgaccttcggcgacgtggccgtgtacttcagcagggaggagtggggctgcctgaggcccgcccagagggccctgtacagggacgtgaccagggagacctacagccacctgggcgccctgggcgtgggcggcagcaagcccgccctgatcagctggatggaggaggaggccgagctgtggggccccgccgcccaggaccccgaggtggccaagtgccccaccgaggccgacggcggcccaagcagcggcgcccctcctcccagcggcggcagcccagccggctccccaacctctaccgaggagggcacctctgagtccgccacccccgagagcggccctggcacctccaccgagcccagcgagggcagcgcacccggcagccctgccggcagccccacctccacagaggagggaaccagcaccgagcccagcgaaggcagcgccccaggcaccagcaccgagcctagtgagcaggagattaaacggatcaacaagatcagaagaagacttgtgaaagacagcaacaccaagaaggccggcaagacaggccccatgaaaaccctgctggttagagtgatgacacccgatctgagagagcggctggaaaacctgagaaagaagcctgaaaatatcccccagcccatcagcaatacatctagagccaacctgaataagctgctgaccgattacaccgaaatgaagaaggcgatcctgcatgtgtactgggaagagttccagaaggaccctgtgggcctgatgagccgggtggcccagcctgccagcaagaagatcgatcagaacaagctgaaacctgagatggacgagaagggcaacctgaccaccgccggctttgcctgctctcagtgtggccagcccctgttcgtgtacaagctggagcaggtgtctgagaagggcaaggcttacaccaactacttcggacggtgcaatgtggccgagcacgaaaagctgatcctgctggcccagctgaagcccgagaaggatagcgacgaagccgtgacatatagcctgggaaagtttgggcagagggccctggatttctacagcattcatgtgaccaaggagtccacccaccccgtgaagcccctggcccagatcgccggaaacagatacgcctccggacctgtgggaaaggccctgagcgacgcatgtatgggcacaatcgcctccttcctgtctaagtaccaggacatcatcatcgaacaccagaaggtggtgaagggcaaccagaagagactggagagcctgcgggagctggccggcaaggaaaacctggaataccctagcgtgaccctgccacctcagcctcacaccaaggagggcgttgatgcctacaacgaagtgatcgcccgggtgcgaatgtgggtgaacctgaacctgtggcagaagctgaagctaagcagagatgatgccaagcctctgctgagactgaagggattcccttcctttcctctggtcgagagacaggccaacgaagtggactggtgggacatggtgtgtaacgtgaagaagctgatcaacgagaaaaaggaggatggcaaggtgttttggcagaatctggctggctacaagagacaggaagccctgagaccatacctgagcagcgaggaagatcggaagaagggaaagaaattcgctcggtaccagctgggcgacctgctgctgcacctggaaaagaagcacggcgaggactggggaaaggtgtacgacgaggcctgggagcggattgacaagaaagtggaaggcctgagcaagcacatcaagctggaagaggaacggagaagcgaggacgcccagagcaaggccgccctgaccgactggctgcgggctaaggccagcttcgtgatcgagggcctgaaggaggccgacaaggacgagttctgcagatgcgagctgaagctgcagaagtggtacggggacctgcggggaaagcccttcgccatcgaagccgagaacagcatcctggacatcagcggcttcagcaagcagtacaactgtgccttcatctggcagaaggacggcgtgaagaagctgaacctgtacctgatcatcaactacttcaagggcggcaagctgcggttcaagaagatcaaacctgaagccttcgaagccaacagattctacaccgtgatcaacaaaaagagcggcgagatcgtgcccatggaggtgaacttcaacttcgacgaccccaacctgatcatcctgcctctggcctttggcaagagacagggcagagaattcatctggaacgacctgctgtccctggaaaccggcagcctgaagctggccaacggaagagtgatcgagaagacactgtacaacagaagaacccggcaggatgagcctgccctgttcgtggccctgaccttcgagcggcgggaggtcctggactcctccaatatcaaaccaatgaacctgatcggcgtggcaagaggcgaaaacatccccgccgtgatcgccctgaccgaccccgagggctgcccactgagccggtttaaggatagcctgggaaacccaacccacatcctgagaatcggcgagagctataaggagaagcagcggaccatccaggccaagaaggaggtggagcagcggagagccggcggctacagccggaagtacgccagcaaagccaagaatctggcagacgatatggtgagaaacaccgctagagatctgctgtactacgccgtgacccaggatgccatgctgatcttcgccaacctgagccggggcttcggccggcagggcaagcggaccttcatggccgagagacagtacacacggatggaggactggctgaccgccaagctggcctacgagggcctgagcaagacctacctgtccaagacactggcccagtacacctccaagacatgcagcaactgtgggtttaccatcaccagcgccgactacgacagggtgctggagaagctgaagaagacagcaacaggctggatgaccacaattaacggcaaggagctgaaggtggagggccagattacctactacaacagatacaagagacagaacgtagtcaaggacctgtccgtcgagctggatagactgagcgaagaatctgtgaacaacgacatctcctcctggacaaagggcagaagcggagaagctctgagcctcctgaagaaaagattctcccatagacccgtgcaggagaagttcgtgtgcctgaactgcggcttcgagacacacgcagccgagcaagccgccctgaacatcgccagatcctggctgttcctgcggagccaggagtacaagaaataccagacaaacaagacaaccggcaacaccgataagagagccttcgtcgagacctggcagtccttttaccggaagaagcttaaggaggtgtggaaacctgccgtgcggtctggcggatctggcggaggctccaccagccccaagaaaaagagaaaagtctaagctgccttctgcggggcttgccttctggccatgcccttcttctctcccttgcacctgtacctcttggtctttgaataaagcctgagtaggaaggctagcaaaaaaaaaaaaaaaaaaaaaaaaaaaaaaaaaaaaaaaaaaaaaaaaaaaaaaaaaaaaaaaaaaaaaaaaaaaaaaaa

SEQ ID NO: 13593 - RNA, 5785 nt, synthetic construct
  source 1..5785: mol_type = other RNA
aggaaataagagagaaaagaagagtaagaagaaatataagagccaccatggcccctaagaagaagcgtaaagtgagccggatggaacgcctcgtctacgaggtgcggcagaagtgcagaaacatcgaggacatctgcatctcctgcggatctctgaacgtgaccctggagcacccactgttcatcggcggcatgtgccagaactgtaaaaactgttttctggagtgtgcctatcaatacgacgatgacggctaccagagctactgcaccatctgttgcggcggaagagaggtgctgatgtgtggaaataacaactgctgccggtgcttctgcgtggaatgcgtggacctgctggtgggccccggcgccgcccaggccgctattaaggaagatccttggaactgctacatgtgcggccacaagggcacatacggcctgctgagacggagagaggactggcctagcagactgcagatgttcttcgccaataaccacgaccaggagttcgacccccctaaggtgtaccctcccgtccccgccgagaagagaaagcccatccgggtcctgagcctgttcgatggcatcgccaccggtctgctggtgctgaaggacctgggcatccaggtggataggtacattgcctccgaggtgtgcgaggactccatcaccgtgggaatggtgcgtcatcagggcaagatcatgtacgtgggcgacgtgcggagcgtgacacagaagcatatccaggagtggggccctttcgacctggtgatcggcggcagcccttgcaatgacctgagcatcgtgaacccagcccggaagggcctgtacgagggaaccggcagactgttcttcgagttttacagactgctgcacgacgcccggcctaaggaaggcgacgaccggcccttcttttggctgttcgagaatgtggtggccatgggagtcagcgacaagcgggatattagccggttcctggagagcaaccccgtgatgatcgatgccaaggaagtgagcgccgcccaccgggccagatacttctggggcaatctgcctggcatgaacagacccctggccagcaccgtgaacgacaagctggagctgcaggagtgcctggagcacggccggatcgccaagttcagcaaggtgagaaccatcaccacccgaagcaacagcatcaaacaaggcaaggaccagcactttcctgtgttcatgaacgagaaggaggacatcctgtggtgtaccgagatggagagagtgttcgggttcccagtccactacacagatgtcagcaacatgtctagactggccagacagagactgctgggaagaagctggtccgtccctgtgatcagacacctgttcgcccctctgaaggagtacttcgcctgcgtgagcagcggcaacagcaacgccaacagccggggccccagcttctctagcggcctggtgccactgtccctgagagggagccacatgggccccatggagatctacaaaaccgtgagcgcctggaagcggcagcctgtgcgcgtgctgagcctgtttcggaatatcgataaagtcctgaaaagcctgggattcctggagagcggctctggctccggcggtggcaccctgaagtacgtggaggatgtgacaaacgtggtcagacgggatgtggagaagtggggccccttcgatctggtgtacggcagcacccaacccctgggcagctcttgtgaccggtgccctggctggtacatgtttcagttccaccggatcctgcagtacgccctgccgagacaggagtcccagcggccattcttttggattttcatggacaacttgctgctgaccgaggatgaccaggaaactaccactcggttcctgcagaccgaagccgtgaccctgcaggacgtgagaggccgggactaccagaacgccatgcgggtgtggtccaacatccctggactgaaaagcaagcacgcacctctgacccctaaagaagaggagtacctgcaggcccaggtgcggagcagaagcaagctggacgcccctaaggtggatctgctggtgaagaattgcctcctgcccctgagagagtacttcaagtatttcagccagaatagtctgcccctgggaggcagcggcggcggcttccaggacagcgtgaccttcgaggacgtggccgtgaggttcagcagcggcgagtggcagtgcctgaccagggcccagaggcacctgtacgccgacgtgatgctggagaactacggcaacatgatcagcgtgggcttcgccgtgcccaagccccccctgatcagccacctggagcagggcgccgagccctgcgtgcaggacctgcaggacggcggcttcctgagctgcagcttccccgtgagcggcggcccaagcagcggcgcccctcctcccagcggcggcagcccagccggctccccaacctctaccgaggagggcacctctgagtccgccacccccgagagcggccctggcacctccaccgagcccagcgagggcagcgcacccggcagccctgccggcagccccacctccacagaggagggaaccagcaccgagcccagcgaaggcagcgccccaggcaccagcaccgagcctagtgagcaggagattaaacggatcaacaagatcagaagaagacttgtgaaagacagcaacaccaagaaggccggcaagacaggccccatgaaaaccctgctggttagagtgatgacacccgatctgagagagcggctggaaaacctgagaaagaagcctgaaaatatcccccagcccatcagcaatacatctagagccaacctgaataagctgctgaccgattacaccgaaatgaagaaggcgatcctgcatgtgtactgggaagagttccagaaggaccctgtgggcctgatgagccgggtggcccagcctgccagcaagaagatcgatcagaacaagctgaaacctgagatggacgagaagggcaacctgaccaccgccggctttgcctgctctcagtgtggccagcccctgttcgtgtacaagctggagcaggtgtctgagaagggcaaggcttacaccaactacttcggacggtgcaatgtggccgagcacgaaaagctgatcctgctggcccagctgaagcccgagaaggatagcgacgaagccgtgacatatagcctgggaaagtttgggcagagggccctggatttctacagcattcatgtgaccaaggagtccacccaccccgtgaagcccctggcccagatcgccggaaacagatacgcctccggacctgtgggaaaggccctgagcgacgcatgtatgggcacaatcgcctccttcctgtctaagtaccaggacatcatcatcgaacaccagaaggtggtgaagggcaaccagaagagactggagagcctgcgggagctggccggcaaggaaaacctggaataccctagcgtgaccctgccacctcagcctcacaccaaggagggcgttgatgcctacaacgaagtgatcgcccgggtgcgaatgtgggtgaacctgaacctgtggcagaagctgaagctaagcagagatgatgccaagcctctgctgagactgaagggattcccttcctttcctctggtcgagagacaggccaacgaagtggactggtgggacatggtgtgtaacgtgaagaagctgatcaacgagaaaaaggaggatggcaaggtgttttggcagaatctggctggctacaagagacaggaagccctgagaccatacctgagcagcgaggaagatcggaagaagggaaagaaattcgctcggtaccagctgggcgacctgctgctgcacctggaaaagaagcacggcgaggactggggaaaggtgtacgacgaggcctgggagcggattgacaagaaagtggaaggcctgagcaagcacatcaagctggaagaggaacggagaagcgaggacgcccagagcaaggccgccctgaccgactggctgcgggctaaggccagcttcgtgatcgagggcctgaaggaggccgacaaggacgagttctgcagatgcgagctgaagctgcagaagtggtacggggacctgcggggaaagcccttcgccatcgaagccgagaacagcatcctggacatcagcggcttcagcaagcagtacaactgtgccttcatctggcagaaggacggcgtgaagaagctgaacctgtacctgatcatcaactacttcaagggcggcaagctgcggttcaagaagatcaaacctgaagccttcgaagccaacagattctacaccgtgatcaacaaaaagagcggcgagatcgtgcccatggaggtgaacttcaacttcgacgaccccaacctgatcatcctgcctctggcctttggcaagagacagggcagagaattcatctggaacgacctgctgtccctggaaaccggcagcctgaagctggccaacggaagagtgatcgagaagacactgtacaacagaagaacccggcaggatgagcctgccctgttcgtggccctgaccttcgagcggcgggaggtcctggactcctccaatatcaaaccaatgaacctgatcggcgtggcaagaggcgaaaacatccccgccgtgatcgccctgaccgaccccgagggctgcccactgagccggtttaaggatagcctgggaaacccaacccacatcctgagaatcggcgagagctataaggagaagcagcggaccatccaggccaagaaggaggtggagcagcggagagccggcggctacagccggaagtacgccagcaaagccaagaatctggcagacgatatggtgagaaacaccgctagagatctgctgtactacgccgtgacccaggatgccatgctgatcttcgccaacctgagccggggcttcggccggcagggcaagcggaccttcatggccgagagacagtacacacggatggaggactggctgaccgccaagctggcctacgagggcctgagcaagacctacctgtccaagacactggcccagtacacctccaagacatgcagcaactgtgggtttaccatcaccagcgccgactacgacagggtgctggagaagctgaagaagacagcaacaggctggatgaccacaattaacggcaaggagctgaaggtggagggccagattacctactacaacagatacaagagacagaacgtagtcaaggacctgtccgtcgagctggatagactgagcgaagaatctgtgaacaacgacatctcctcctggacaaagggcagaagcggagaagctctgagcctcctgaagaaaagattctcccatagacccgtgcaggagaagttcgtgtgcctgaactgcggcttcgagacacacgcagccgagcaagccgccctgaacatcgccagatcctggctgttcctgcggagccaggagtacaagaaataccagacaaacaagacaaccggcaacaccgataagagagccttcgtcgagacctggcagtccttttaccggaagaagcttaaggaggtgtggaaacctgccgtgcggtctggcggatctggcggaggctccaccagccccaagaaaaagagaaaagtctaagctgccttctgcggggcttgccttctggccatgcccttcttctctcccttgcacctgtacctcttggtctttgaataaagcctgagtaggaaggctagcaaaaaaaaaaaaaaaaaaaaaaaaaaaaaaaaaaaaaaaaaaaaaaaaaaaaaaaaaaaaaaaaaaaaaaaaaaaaaaaa

SEQ ID NO: 13594 - RNA, 5785 nt, synthetic construct
  source 1..5785: mol_type = other RNA
aggaaataagagagaaaagaagagtaagaagaaatataagagccaccatggcccctaagaagaagcgtaaagtgagccggatggaacgcctcgtctacgaggtgcggcagaagtgcagaaacatcgaggacatctgcatctcctgcggatctctgaacgtgaccctggagcacccactgttcatcggcggcatgtgccagaactgtaaaaactgttttctggagtgtgcctatcaatacgacgatgacggctaccagagctactgcaccatctgttgcggcggaagagaggtgctgatgtgtggaaataacaactgctgccggtgcttctgcgtggaatgcgtggacctgctggtgggccccggcgccgcccaggccgctattaaggaagatccttggaactgctacatgtgcggccacaagggcacatacggcctgctgagacggagagaggactggcctagcagactgcagatgttcttcgccaataaccacgaccaggagttcgacccccctaaggtgtaccctcccgtccccgccgagaagagaaagcccatccgggtcctgagcctgttcgatggcatcgccaccggtctgctggtgctgaaggacctgggcatccaggtggataggtacattgcctccgaggtgtgcgaggactccatcaccgtgggaatggtgcgtcatcagggcaagatcatgtacgtgggcgacgtgcggagcgtgacacagaagcatatccaggagtggggccctttcgacctggtgatcggcggcagcccttgcaatgacctgagcatcgtgaacccagcccggaagggcctgtacgagggaaccggcagactgttcttcgagttttacagactgctgcacgacgcccggcctaaggaaggcgacgaccggcccttcttttggctgttcgagaatgtggtggccatgggagtcagcgacaagcgggatattagccggttcctggagagcaaccccgtgatgatcgatgccaaggaagtgagcgccgcccaccgggccagatacttctggggcaatctgcctggcatgaacagacccctggccagcaccgtgaacgacaagctggagctgcaggagtgcctggagcacggccggatcgccaagttcagcaaggtgagaaccatcaccacccgaagcaacagcatcaaacaaggcaaggaccagcactttcctgtgttcatgaacgagaaggaggacatcctgtggtgtaccgagatggagagagtgttcgggttcccagtccactacacagatgtcagcaacatgtctagactggccagacagagactgctgggaagaagctggtccgtccctgtgatcagacacctgttcgcccctctgaaggagtacttcgcctgcgtgagcagcggcaacagcaacgccaacagccggggccccagcttctctagcggcctggtgccactgtccctgagagggagccacatgggccccatggagatctacaaaaccgtgagcgcctggaagcggcagcctgtgcgcgtgctgagcctgtttcggaatatcgataaagtcctgaaaagcctgggattcctggagagcggctctggctccggcggtggcaccctgaagtacgtggaggatgtgacaaacgtggtcagacgggatgtggagaagtggggccccttcgatctggtgtacggcagcacccaacccctgggcagctcttgtgaccggtgccctggctggtacatgtttcagttccaccggatcctgcagtacgccctgccgagacaggagtcccagcggccattcttttggattttcatggacaacttgctgctgaccgaggatgaccaggaaactaccactcggttcctgcagaccgaagccgtgaccctgcaggacgtgagaggccgggactaccagaacgccatgcgggtgtggtccaacatccctggactgaaaagcaagcacgcacctctgacccctaaagaagaggagtacctgcaggcccaggtgcggagcagaagcaagctggacgcccctaaggtggatctgctggtgaagaattgcctcctgcccctgagagagtacttcaagtatttcagccagaatagtctgcccctgggaggcagcggcggcggcatgaccttcgaggacgtggccgtggagttcacccagtgggagtggggccagctggaccccgcccagcaggacctgtacagggaggtgatgctggagaacttcaagaacctggccagcctgggcctgcccgtgagcaagccctacgtgatcacccagctggaggagggcaaggacccctgcgtgctggacggcgagatcagcaccgagtacctgagccccccccccgactgggagaagaggcccggcggcccaagcagcggcgcccctcctcccagcggcggcagcccagccggctccccaacctctaccgaggagggcacctctgagtccgccacccccgagagcggccctggcacctccaccgagcccagcgagggcagcgcacccggcagccctgccggcagccccacctccacagaggagggaaccagcaccgagcccagcgaaggcagcgccccaggcaccagcaccgagcctagtgagcaggagattaaacggatcaacaagatcagaagaagacttgtgaaagacagcaacaccaagaaggccggcaagacaggccccatgaaaaccctgctggttagagtgatgacacccgatctgagagagcggctggaaaacctgagaaagaagcctgaaaatatcccccagcccatcagcaatacatctagagccaacctgaataagctgctgaccgattacaccgaaatgaagaaggcgatcctgcatgtgtactgggaagagttccagaaggaccctgtgggcctgatgagccgggtggcccagcctgccagcaagaagatcgatcagaacaagctgaaacctgagatggacgagaagggcaacctgaccaccgccggctttgcctgctctcagtgtggccagcccctgttcgtgtacaagctggagcaggtgtctgagaagggcaaggcttacaccaactacttcggacggtgcaatgtggccgagcacgaaaagctgatcctgctggcccagctgaagcccgagaaggatagcgacgaagccgtgacatatagcctgggaaagtttgggcagagggccctggatttctacagcattcatgtgaccaaggagtccacccaccccgtgaagcccctggcccagatcgccggaaacagatacgcctccggacctgtgggaaaggccctgagcgacgcatgtatgggcacaatcgcctccttcctgtctaagtaccaggacatcatcatcgaacaccagaaggtggtgaagggcaaccagaagagactggagagcctgcgggagctggccggcaaggaaaacctggaataccctagcgtgaccctgccacctcagcctcacaccaaggagggcgttgatgcctacaacgaagtgatcgcccgggtgcgaatgtgggtgaacctgaacctgtggcagaagctgaagctaagcagagatgatgccaagcctctgctgagactgaagggattcccttcctttcctctggtcgagagacaggccaacgaagtggactggtgggacatggtgtgtaacgtgaagaagctgatcaacgagaaaaaggaggatggcaaggtgttttggcagaatctggctggctacaagagacaggaagccctgagaccatacctgagcagcgaggaagatcggaagaagggaaagaaattcgctcggtaccagctgggcgacctgctgctgcacctggaaaagaagcacggcgaggactggggaaaggtgtacgacgaggcctgggagcggattgacaagaaagtggaaggcctgagcaagcacatcaagctggaagaggaacggagaagcgaggacgcccagagcaaggccgccctgaccgactggctgcgggctaaggccagcttcgtgatcgagggcctgaaggaggccgacaaggacgagttctgcagatgcgagctgaagctgcagaagtggtacggggacctgcggggaaagcccttcgccatcgaagccgagaacagcatcctggacatcagcggcttcagcaagcagtacaactgtgccttcatctggcagaaggacggcgtgaagaagctgaacctgtacctgatcatcaactacttcaagggcggcaagctgcggttcaagaagatcaaacctgaagccttcgaagccaacagattctacaccgtgatcaacaaaaagagcggcgagatcgtgcccatggaggtgaacttcaacttcgacgaccccaacctgatcatcctgcctctggcctttggcaagagacagggcagagaattcatctggaacgacctgctgtccctggaaaccggcagcctgaagctggccaacggaagagtgatcgagaagacactgtacaacagaagaacccggcaggatgagcctgccctgttcgtggccctgaccttcgagcggcgggaggtcctggactcctccaatatcaaaccaatgaacctgatcggcgtggcaagaggcgaaaacatccccgccgtgatcgccctgaccgaccccgagggctgcccactgagccggtttaaggatagcctgggaaacccaacccacatcctgagaatcggcgagagctataaggagaagcagcggaccatccaggccaagaaggaggtggagcagcggagagccggcggctacagccggaagtacgccagcaaagccaagaatctggcagacgatatggtgagaaacaccgctagagatctgctgtactacgccgtgacccaggatgccatgctgatcttcgccaacctgagccggggcttcggccggcagggcaagcggaccttcatggccgagagacagtacacacggatggaggactggctgaccgccaagctggcctacgagggcctgagcaagacctacctgtccaagacactggcccagtacacctccaagacatgcagcaactgtgggtttaccatcaccagcgccgactacgacagggtgctggagaagctgaagaagacagcaacaggctggatgaccacaattaacggcaaggagctgaaggtggagggccagattacctactacaacagatacaagagacagaacgtagtcaaggacctgtccgtcgagctggatagactgagcgaagaatctgtgaacaacgacatctcctcctggacaaagggcagaagcggagaagctctgagcctcctgaagaaaagattctcccatagacccgtgcaggagaagttcgtgtgcctgaactgcggcttcgagacacacgcagccgagcaagccgccctgaacatcgccagatcctggctgttcctgcggagccaggagtacaagaaataccagacaaacaagacaaccggcaacaccgataagagagccttcgtcgagacctggcagtccttttaccggaagaagcttaaggaggtgtggaaacctgccgtgcggtctggcggatctggcggaggctccaccagccccaagaaaaagagaaaagtctaagctgccttctgcggggcttgccttctggccatgcccttcttctctcccttgcacctgtacctcttggtctttgaataaagcctgagtaggaaggctagcaaaaaaaaaaaaaaaaaaaaaaaaaaaaaaaaaaaaaaaaaaaaaaaaaaaaaaaaaaaaaaaaaaaaaaaaaaaaaaaa

SEQ ID NO: 13595 - RNA, 5785 nt, synthetic construct
  source 1..5785: mol_type = other RNA
aggaaataagagagaaaagaagagtaagaagaaatataagagccaccatggcccctaagaagaagcgtaaagtgagccggatggaacgcctcgtctacgaggtgcggcagaagtgcagaaacatcgaggacatctgcatctcctgcggatctctgaacgtgaccctggagcacccactgttcatcggcggcatgtgccagaactgtaaaaactgttttctggagtgtgcctatcaatacgacgatgacggctaccagagctactgcaccatctgttgcggcggaagagaggtgctgatgtgtggaaataacaactgctgccggtgcttctgcgtggaatgcgtggacctgctggtgggccccggcgccgcccaggccgctattaaggaagatccttggaactgctacatgtgcggccacaagggcacatacggcctgctgagacggagagaggactggcctagcagactgcagatgttcttcgccaataaccacgaccaggagttcgacccccctaaggtgtaccctcccgtccccgccgagaagagaaagcccatccgggtcctgagcctgttcgatggcatcgccaccggtctgctggtgctgaaggacctgggcatccaggtggataggtacattgcctccgaggtgtgcgaggactccatcaccgtgggaatggtgcgtcatcagggcaagatcatgtacgtgggcgacgtgcggagcgtgacacagaagcatatccaggagtggggccctttcgacctggtgatcggcggcagcccttgcaatgacctgagcatcgtgaacccagcccggaagggcctgtacgagggaaccggcagactgttcttcgagttttacagactgctgcacgacgcccggcctaaggaaggcgacgaccggcccttcttttggctgttcgagaatgtggtggccatgggagtcagcgacaagcgggatattagccggttcctggagagcaaccccgtgatgatcgatgccaaggaagtgagcgccgcccaccgggccagatacttctggggcaatctgcctggcatgaacagacccctggccagcaccgtgaacgacaagctggagctgcaggagtgcctggagcacggccggatcgccaagttcagcaaggtgagaaccatcaccacccgaagcaacagcatcaaacaaggcaaggaccagcactttcctgtgttcatgaacgagaaggaggacatcctgtggtgtaccgagatggagagagtgttcgggttcccagtccactacacagatgtcagcaacatgtctagactggccagacagagactgctgggaagaagctggtccgtccctgtgatcagacacctgttcgcccctctgaaggagtacttcgcctgcgtgagcagcggcaacagcaacgccaacagccggggccccagcttctctagcggcctggtgccactgtccctgagagggagccacatgggccccatggagatctacaaaaccgtgagcgcctggaagcggcagcctgtgcgcgtgctgagcctgtttcggaatatcgataaagtcctgaaaagcctgggattcctggagagcggctctggctccggcggtggcaccctgaagtacgtggaggatgtgacaaacgtggtcagacgggatgtggagaagtggggccccttcgatctggtgtacggcagcacccaacccctgggcagctcttgtgaccggtgccctggctggtacatgtttcagttccaccggatcctgcagtacgccctgccgagacaggagtcccagcggccattcttttggattttcatggacaacttgctgctgaccgaggatgaccaggaaactaccactcggttcctgcagaccgaagccgtgaccctgcaggacgtgagaggccgggactaccagaacgccatgcgggtgtggtccaacatccctggactgaaaagcaagcacgcacctctgacccctaaagaagaggagtacctgcaggcccaggtgcggagcagaagcaagctggacgcccctaaggtggatctgctggtgaagaattgcctcctgcccctgagagagtacttcaagtatttcagccagaatagtctgcccctgggaggcagcggcggcggcatgctgcagaccgcctggccccagaggctgagcaggaacctgtggttccaggagagcgtggccttcgaggacgtggccgtgtacttcacccagaaccagtgggccagcctggaccccgcccagagggccctgtacagggaggtgatgctggagaactacgccaacgtgaccagcctggtggccttccccttccccaagcccgccctgatcagccacctggagaagggcgaggccccctggggcggcggcccaagcagcggcgcccctcctcccagcggcggcagcccagccggctccccaacctctaccgaggagggcacctctgagtccgccacccccgagagcggccctggcacctccaccgagcccagcgagggcagcgcacccggcagccctgccggcagccccacctccacagaggagggaaccagcaccgagcccagcgaaggcagcgccccaggcaccagcaccgagcctagtgagcaggagattaaacggatcaacaagatcagaagaagacttgtgaaagacagcaacaccaagaaggccggcaagacaggccccatgaaaaccctgctggttagagtgatgacacccgatctgagagagcggctggaaaacctgagaaagaagcctgaaaatatcccccagcccatcagcaatacatctagagccaacctgaataagctgctgaccgattacaccgaaatgaagaaggcgatcctgcatgtgtactgggaagagttccagaaggaccctgtgggcctgatgagccgggtggcccagcctgccagcaagaagatcgatcagaacaagctgaaacctgagatggacgagaagggcaacctgaccaccgccggctttgcctgctctcagtgtggccagcccctgttcgtgtacaagctggagcaggtgtctgagaagggcaaggcttacaccaactacttcggacggtgcaatgtggccgagcacgaaaagctgatcctgctggcccagctgaagcccgagaaggatagcgacgaagccgtgacatatagcctgggaaagtttgggcagagggccctggatttctacagcattcatgtgaccaaggagtccacccaccccgtgaagcccctggcccagatcgccggaaacagatacgcctccggacctgtgggaaaggccctgagcgacgcatgtatgggcacaatcgcctccttcctgtctaagtaccaggacatcatcatcgaacaccagaaggtggtgaagggcaaccagaagagactggagagcctgcgggagctggccggcaaggaaaacctggaataccctagcgtgaccctgccacctcagcctcacaccaaggagggcgttgatgcctacaacgaagtgatcgcccgggtgcgaatgtgggtgaacctgaacctgtggcagaagctgaagctaagcagagatgatgccaagcctctgctgagactgaagggattcccttcctttcctctggtcgagagacaggccaacgaagtggactggtgggacatggtgtgtaacgtgaagaagctgatcaacgagaaaaaggaggatggcaaggtgttttggcagaatctggctggctacaagagacaggaagccctgagaccatacctgagcagcgaggaagatcggaagaagggaaagaaattcgctcggtaccagctgggcgacctgctgctgcacctggaaaagaagcacggcgaggactggggaaaggtgtacgacgaggcctgggagcggattgacaagaaagtggaaggcctgagcaagcacatcaagctggaagaggaacggagaagcgaggacgcccagagcaaggccgccctgaccgactggctgcgggctaaggccagcttcgtgatcgagggcctgaaggaggccgacaaggacgagttctgcagatgcgagctgaagctgcagaagtggtacggggacctgcggggaaagcccttcgccatcgaagccgagaacagcatcctggacatcagcggcttcagcaagcagtacaactgtgccttcatctggcagaaggacggcgtgaagaagctgaacctgtacctgatcatcaactacttcaagggcggcaagctgcggttcaagaagatcaaacctgaagccttcgaagccaacagattctacaccgtgatcaacaaaaagagcggcgagatcgtgcccatggaggtgaacttcaacttcgacgaccccaacctgatcatcctgcctctggcctttggcaagagacagggcagagaattcatctggaacgacctgctgtccctggaaaccggcagcctgaagctggccaacggaagagtgatcgagaagacactgtacaacagaagaacccggcaggatgagcctgccctgttcgtggccctgaccttcgagcggcgggaggtcctggactcctccaatatcaaaccaatgaacctgatcggcgtggcaagaggcgaaaacatccccgccgtgatcgccctgaccgaccccgagggctgcccactgagccggtttaaggatagcctgggaaacccaacccacatcctgagaatcggcgagagctataaggagaagcagcggaccatccaggccaagaaggaggtggagcagcggagagccggcggctacagccggaagtacgccagcaaagccaagaatctggcagacgatatggtgagaaacaccgctagagatctgctgtactacgccgtgacccaggatgccatgctgatcttcgccaacctgagccggggcttcggccggcagggcaagcggaccttcatggccgagagacagtacacacggatggaggactggctgaccgccaagctggcctacgagggcctgagcaagacctacctgtccaagacactggcccagtacacctccaagacatgcagcaactgtgggtttaccatcaccagcgccgactacgacagggtgctggagaagctgaagaagacagcaacaggctggatgaccacaattaacggcaaggagctgaaggtggagggccagattacctactacaacagatacaagagacagaacgtagtcaaggacctgtccgtcgagctggatagactgagcgaagaatctgtgaacaacgacatctcctcctggacaaagggcagaagcggagaagctctgagcctcctgaagaaaagattctcccatagacccgtgcaggagaagttcgtgtgcctgaactgcggcttcgagacacacgcagccgagcaagccgccctgaacatcgccagatcctggctgttcctgcggagccaggagtacaagaaataccagacaaacaagacaaccggcaacaccgataagagagccttcgtcgagacctggcagtccttttaccggaagaagcttaaggaggtgtggaaacctgccgtgcggtctggcggatctggcggaggctccaccagccccaagaaaaagagaaaagtctaagctgccttctgcggggcttgccttctggccatgcccttcttctctcccttgcacctgtacctcttggtctttgaataaagcctgagtaggaaggctagcaaaaaaaaaaaaaaaaaaaaaaaaaaaaaaaaaaaaaaaaaaaaaaaaaaaaaaaaaaaaaaaaaaaaaaaaaaaaaaaa

SEQ ID NO: 13596 - RNA, 5785 nt, synthetic construct
  source 1..5785: mol_type = other RNA
aggaaataagagagaaaagaagagtaagaagaaatataagagccaccatggcccctaagaagaagcgtaaagtgagccggatggaacgcctcgtctacgaggtgcggcagaagtgcagaaacatcgaggacatctgcatctcctgcggatctctgaacgtgaccctggagcacccactgttcatcggcggcatgtgccagaactgtaaaaactgttttctggagtgtgcctatcaatacgacgatgacggctaccagagctactgcaccatctgttgcggcggaagagaggtgctgatgtgtggaaataacaactgctgccggtgcttctgcgtggaatgcgtggacctgctggtgggccccggcgccgcccaggccgctattaaggaagatccttggaactgctacatgtgcggccacaagggcacatacggcctgctgagacggagagaggactggcctagcagactgcagatgttcttcgccaataaccacgaccaggagttcgacccccctaaggtgtaccctcccgtccccgccgagaagagaaagcccatccgggtcctgagcctgttcgatggcatcgccaccggtctgctggtgctgaaggacctgggcatccaggtggataggtacattgcctccgaggtgtgcgaggactccatcaccgtgggaatggtgcgtcatcagggcaagatcatgtacgtgggcgacgtgcggagcgtgacacagaagcatatccaggagtggggccctttcgacctggtgatcggcggcagcccttgcaatgacctgagcatcgtgaacccagcccggaagggcctgtacgagggaaccggcagactgttcttcgagttttacagactgctgcacgacgcccggcctaaggaaggcgacgaccggcccttcttttggctgttcgagaatgtggtggccatgggagtcagcgacaagcgggatattagccggttcctggagagcaaccccgtgatgatcgatgccaaggaagtgagcgccgcccaccgggccagatacttctggggcaatctgcctggcatgaacagacccctggccagcaccgtgaacgacaagctggagctgcaggagtgcctggagcacggccggatcgccaagttcagcaaggtgagaaccatcaccacccgaagcaacagcatcaaacaaggcaaggaccagcactttcctgtgttcatgaacgagaaggaggacatcctgtggtgtaccgagatggagagagtgttcgggttcccagtccactacacagatgtcagcaacatgtctagactggccagacagagactgctgggaagaagctggtccgtccctgtgatcagacacctgttcgcccctctgaaggagtacttcgcctgcgtgagcagcggcaacagcaacgccaacagccggggccccagcttctctagcggcctggtgccactgtccctgagagggagccacatgggccccatggagatctacaaaaccgtgagcgcctggaagcggcagcctgtgcgcgtgctgagcctgtttcggaatatcgataaagtcctgaaaagcctgggattcctggagagcggctctggctccggcggtggcaccctgaagtacgtggaggatgtgacaaacgtggtcagacgggatgtggagaagtggggccccttcgatctggtgtacggcagcacccaacccctgggcagctcttgtgaccggtgccctggctggtacatgtttcagttccaccggatcctgcagtacgccctgccgagacaggagtcccagcggccattcttttggattttcatggacaacttgctgctgaccgaggatgaccaggaaactaccactcggttcctgcagaccgaagccgtgaccctgcaggacgtgagaggccgggactaccagaacgccatgcgggtgtggtccaacatccctggactgaaaagcaagcacgcacctctgacccctaaagaagaggagtacctgcaggcccaggtgcggagcagaagcaagctggacgcccctaaggtggatctgctggtgaagaattgcctcctgcccctgagagagtacttcaagtatttcagccagaatagtctgcccctgggaggcagcggcggcggcatggagcccctgaagttcagggacgtggccatcgagttcagcctggaggagtggcagtgcctggacagcatccagcagaacctgtacaggaacgtgatgctggagaactacaggaacctggtgttcctgggcatcgccgccagcaagcccgacctgatcatctgcctggagcaggagaaggagccctggagcaggaagaggaggaggatggtggccgagctgcccgtgatctgcagccacttcggcggcccaagcagcggcgcccctcctcccagcggcggcagcccagccggctccccaacctctaccgaggagggcacctctgagtccgccacccccgagagcggccctggcacctccaccgagcccagcgagggcagcgcacccggcagccctgccggcagccccacctccacagaggagggaaccagcaccgagcccagcgaaggcagcgccccaggcaccagcaccgagcctagtgagcaggagattaaacggatcaacaagatcagaagaagacttgtgaaagacagcaacaccaagaaggccggcaagacaggccccatgaaaaccctgctggttagagtgatgacacccgatctgagagagcggctggaaaacctgagaaagaagcctgaaaatatcccccagcccatcagcaatacatctagagccaacctgaataagctgctgaccgattacaccgaaatgaagaaggcgatcctgcatgtgtactgggaagagttccagaaggaccctgtgggcctgatgagccgggtggcccagcctgccagcaagaagatcgatcagaacaagctgaaacctgagatggacgagaagggcaacctgaccaccgccggctttgcctgctctcagtgtggccagcccctgttcgtgtacaagctggagcaggtgtctgagaagggcaaggcttacaccaactacttcggacggtgcaatgtggccgagcacgaaaagctgatcctgctggcccagctgaagcccgagaaggatagcgacgaagccgtgacatatagcctgggaaagtttgggcagagggccctggatttctacagcattcatgtgaccaaggagtccacccaccccgtgaagcccctggcccagatcgccggaaacagatacgcctccggacctgtgggaaaggccctgagcgacgcatgtatgggcacaatcgcctccttcctgtctaagtaccaggacatcatcatcgaacaccagaaggtggtgaagggcaaccagaagagactggagagcctgcgggagctggccggcaaggaaaacctggaataccctagcgtgaccctgccacctcagcctcacaccaaggagggcgttgatgcctacaacgaagtgatcgcccgggtgcgaatgtgggtgaacctgaacctgtggcagaagctgaagctaagcagagatgatgccaagcctctgctgagactgaagggattcccttcctttcctctggtcgagagacaggccaacgaagtggactggtgggacatggtgtgtaacgtgaagaagctgatcaacgagaaaaaggaggatggcaaggtgttttggcagaatctggctggctacaagagacaggaagccctgagaccatacctgagcagcgaggaagatcggaagaagggaaagaaattcgctcggtaccagctgggcgacctgctgctgcacctggaaaagaagcacggcgaggactggggaaaggtgtacgacgaggcctgggagcggattgacaagaaagtggaaggcctgagcaagcacatcaagctggaagaggaacggagaagcgaggacgcccagagcaaggccgccctgaccgactggctgcgggctaaggccagcttcgtgatcgagggcctgaaggaggccgacaaggacgagttctgcagatgcgagctgaagctgcagaagtggtacggggacctgcggggaaagcccttcgccatcgaagccgagaacagcatcctggacatcagcggcttcagcaagcagtacaactgtgccttcatctggcagaaggacggcgtgaagaagctgaacctgtacctgatcatcaactacttcaagggcggcaagctgcggttcaagaagatcaaacctgaagccttcgaagccaacagattctacaccgtgatcaacaaaaagagcggcgagatcgtgcccatggaggtgaacttcaacttcgacgaccccaacctgatcatcctgcctctggcctttggcaagagacagggcagagaattcatctggaacgacctgctgtccctggaaaccggcagcctgaagctggccaacggaagagtgatcgagaagacactgtacaacagaagaacccggcaggatgagcctgccctgttcgtggccctgaccttcgagcggcgggaggtcctggactcctccaatatcaaaccaatgaacctgatcggcgtggcaagaggcgaaaacatccccgccgtgatcgccctgaccgaccccgagggctgcccactgagccggtttaaggatagcctgggaaacccaacccacatcctgagaatcggcgagagctataaggagaagcagcggaccatccaggccaagaaggaggtggagcagcggagagccggcggctacagccggaagtacgccagcaaagccaagaatctggcagacgatatggtgagaaacaccgctagagatctgctgtactacgccgtgacccaggatgccatgctgatcttcgccaacctgagccggggcttcggccggcagggcaagcggaccttcatggccgagagacagtacacacggatggaggactggctgaccgccaagctggcctacgagggcctgagcaagacctacctgtccaagacactggcccagtacacctccaagacatgcagcaactgtgggtttaccatcaccagcgccgactacgacagggtgctggagaagctgaagaagacagcaacaggctggatgaccacaattaacggcaaggagctgaaggtggagggccagattacctactacaacagatacaagagacagaacgtagtcaaggacctgtccgtcgagctggatagactgagcgaagaatctgtgaacaacgacatctcctcctggacaaagggcagaagcggagaagctctgagcctcctgaagaaaagattctcccatagacccgtgcaggagaagttcgtgtgcctgaactgcggcttcgagacacacgcagccgagcaagccgccctgaacatcgccagatcctggctgttcctgcggagccaggagtacaagaaataccagacaaacaagacaaccggcaacaccgataagagagccttcgtcgagacctggcagtccttttaccggaagaagcttaaggaggtgtggaaacctgccgtgcggtctggcggatctggcggaggctccaccagccccaagaaaaagagaaaagtctaagctgccttctgcggggcttgccttctggccatgcccttcttctctcccttgcacctgtacctcttggtctttgaataaagcctgagtaggaaggctagcaaaaaaaaaaaaaaaaaaaaaaaaaaaaaaaaaaaaaaaaaaaaaaaaaaaaaaaaaaaaaaaaaaaaaaaaaaaaaaaa

SEQ ID NO: 13597 - RNA, 5785 nt, synthetic construct
  source 1..5785: mol_type = other RNA
aggaaataagagagaaaagaagagtaagaagaaatataagagccaccatggcccctaagaagaagcgtaaagtgagccggatggaacgcctcgtctacgaggtgcggcagaagtgcagaaacatcgaggacatctgcatctcctgcggatctctgaacgtgaccctggagcacccactgttcatcggcggcatgtgccagaactgtaaaaactgttttctggagtgtgcctatcaatacgacgatgacggctaccagagctactgcaccatctgttgcggcggaagagaggtgctgatgtgtggaaataacaactgctgccggtgcttctgcgtggaatgcgtggacctgctggtgggccccggcgccgcccaggccgctattaaggaagatccttggaactgctacatgtgcggccacaagggcacatacggcctgctgagacggagagaggactggcctagcagactgcagatgttcttcgccaataaccacgaccaggagttcgacccccctaaggtgtaccctcccgtccccgccgagaagagaaagcccatccgggtcctgagcctgttcgatggcatcgccaccggtctgctggtgctgaaggacctgggcatccaggtggataggtacattgcctccgaggtgtgcgaggactccatcaccgtgggaatggtgcgtcatcagggcaagatcatgtacgtgggcgacgtgcggagcgtgacacagaagcatatccaggagtggggccctttcgacctggtgatcggcggcagcccttgcaatgacctgagcatcgtgaacccagcccggaagggcctgtacgagggaaccggcagactgttcttcgagttttacagactgctgcacgacgcccggcctaaggaaggcgacgaccggcccttcttttggctgttcgagaatgtggtggccatgggagtcagcgacaagcgggatattagccggttcctggagagcaaccccgtgatgatcgatgccaaggaagtgagcgccgcccaccgggccagatacttctggggcaatctgcctggcatgaacagacccctggccagcaccgtgaacgacaagctggagctgcaggagtgcctggagcacggccggatcgccaagttcagcaaggtgagaaccatcaccacccgaagcaacagcatcaaacaaggcaaggaccagcactttcctgtgttcatgaacgagaaggaggacatcctgtggtgtaccgagatggagagagtgttcgggttcccagtccactacacagatgtcagcaacatgtctagactggccagacagagactgctgggaagaagctggtccgtccctgtgatcagacacctgttcgcccctctgaaggagtacttcgcctgcgtgagcagcggcaacagcaacgccaacagccggggccccagcttctctagcggcctggtgccactgtccctgagagggagccacatgggccccatggagatctacaaaaccgtgagcgcctggaagcggcagcctgtgcgcgtgctgagcctgtttcggaatatcgataaagtcctgaaaagcctgggattcctggagagcggctctggctccggcggtggcaccctgaagtacgtggaggatgtgacaaacgtggtcagacgggatgtggagaagtggggccccttcgatctggtgtacggcagcacccaacccctgggcagctcttgtgaccggtgccctggctggtacatgtttcagttccaccggatcctgcagtacgccctgccgagacaggagtcccagcggccattcttttggattttcatggacaacttgctgctgaccgaggatgaccaggaaactaccactcggttcctgcagaccgaagccgtgaccctgcaggacgtgagaggccgggactaccagaacgccatgcgggtgtggtccaacatccctggactgaaaagcaagcacgcacctctgacccctaaagaagaggagtacctgcaggcccaggtgcggagcagaagcaagctggacgcccctaaggtggatctgctggtgaagaattgcctcctgcccctgagagagtacttcaagtatttcagccagaatagtctgcccctgggaggcagcggcggcggcatggagagcgtgagcttcgaggacgtggccgtgaacttcacccccgaggagtgggccctgctgaacagcagccagaagaggctgcacagggacgtgatgcaggagaacttcaggaacctggccgccatcgccaagaaccaggaggaccccaccctggaggacgactacgagtacctgaggaagatcctgcccttcgccgtgcagaccggctacaggctgtgcgagaaccaggactacgccgagggcggcccaagcagcggcgcccctcctcccagcggcggcagcccagccggctccccaacctctaccgaggagggcacctctgagtccgccacccccgagagcggccctggcacctccaccgagcccagcgagggcagcgcacccggcagccctgccggcagccccacctccacagaggagggaaccagcaccgagcccagcgaaggcagcgccccaggcaccagcaccgagcctagtgagcaggagattaaacggatcaacaagatcagaagaagacttgtgaaagacagcaacaccaagaaggccggcaagacaggccccatgaaaaccctgctggttagagtgatgacacccgatctgagagagcggctggaaaacctgagaaagaagcctgaaaatatcccccagcccatcagcaatacatctagagccaacctgaataagctgctgaccgattacaccgaaatgaagaaggcgatcctgcatgtgtactgggaagagttccagaaggaccctgtgggcctgatgagccgggtggcccagcctgccagcaagaagatcgatcagaacaagctgaaacctgagatggacgagaagggcaacctgaccaccgccggctttgcctgctctcagtgtggccagcccctgttcgtgtacaagctggagcaggtgtctgagaagggcaaggcttacaccaactacttcggacggtgcaatgtggccgagcacgaaaagctgatcctgctggcccagctgaagcccgagaaggatagcgacgaagccgtgacatatagcctgggaaagtttgggcagagggccctggatttctacagcattcatgtgaccaaggagtccacccaccccgtgaagcccctggcccagatcgccggaaacagatacgcctccggacctgtgggaaaggccctgagcgacgcatgtatgggcacaatcgcctccttcctgtctaagtaccaggacatcatcatcgaacaccagaaggtggtgaagggcaaccagaagagactggagagcctgcgggagctggccggcaaggaaaacctggaataccctagcgtgaccctgccacctcagcctcacaccaaggagggcgttgatgcctacaacgaagtgatcgcccgggtgcgaatgtgggtgaacctgaacctgtggcagaagctgaagctaagcagagatgatgccaagcctctgctgagactgaagggattcccttcctttcctctggtcgagagacaggccaacgaagtggactggtgggacatggtgtgtaacgtgaagaagctgatcaacgagaaaaaggaggatggcaaggtgttttggcagaatctggctggctacaagagacaggaagccctgagaccatacctgagcagcgaggaagatcggaagaagggaaagaaattcgctcggtaccagctgggcgacctgctgctgcacctggaaaagaagcacggcgaggactggggaaaggtgtacgacgaggcctgggagcggattgacaagaaagtggaaggcctgagcaagcacatcaagctggaagaggaacggagaagcgaggacgcccagagcaaggccgccctgaccgactggctgcgggctaaggccagcttcgtgatcgagggcctgaaggaggccgacaaggacgagttctgcagatgcgagctgaagctgcagaagtggtacggggacctgcggggaaagcccttcgccatcgaagccgagaacagcatcctggacatcagcggcttcagcaagcagtacaactgtgccttcatctggcagaaggacggcgtgaagaagctgaacctgtacctgatcatcaactacttcaagggcggcaagctgcggttcaagaagatcaaacctgaagccttcgaagccaacagattctacaccgtgatcaacaaaaagagcggcgagatcgtgcccatggaggtgaacttcaacttcgacgaccccaacctgatcatcctgcctctggcctttggcaagagacagggcagagaattcatctggaacgacctgctgtccctggaaaccggcagcctgaagctggccaacggaagagtgatcgagaagacactgtacaacagaagaacccggcaggatgagcctgccctgttcgtggccctgaccttcgagcggcgggaggtcctggactcctccaatatcaaaccaatgaacctgatcggcgtggcaagaggcgaaaacatccccgccgtgatcgccctgaccgaccccgagggctgcccactgagccggtttaaggatagcctgggaaacccaacccacatcctgagaatcggcgagagctataaggagaagcagcggaccatccaggccaagaaggaggtggagcagcggagagccggcggctacagccggaagtacgccagcaaagccaagaatctggcagacgatatggtgagaaacaccgctagagatctgctgtactacgccgtgacccaggatgccatgctgatcttcgccaacctgagccggggcttcggccggcagggcaagcggaccttcatggccgagagacagtacacacggatggaggactggctgaccgccaagctggcctacgagggcctgagcaagacctacctgtccaagacactggcccagtacacctccaagacatgcagcaactgtgggtttaccatcaccagcgccgactacgacagggtgctggagaagctgaagaagacagcaacaggctggatgaccacaattaacggcaaggagctgaaggtggagggccagattacctactacaacagatacaagagacagaacgtagtcaaggacctgtccgtcgagctggatagactgagcgaagaatctgtgaacaacgacatctcctcctggacaaagggcagaagcggagaagctctgagcctcctgaagaaaagattctcccatagacccgtgcaggagaagttcgtgtgcctgaactgcggcttcgagacacacgcagccgagcaagccgccctgaacatcgccagatcctggctgttcctgcggagccaggagtacaagaaataccagacaaacaagacaaccggcaacaccgataagagagccttcgtcgagacctggcagtccttttaccggaagaagcttaaggaggtgtggaaacctgccgtgcggtctggcggatctggcggaggctccaccagccccaagaaaaagagaaaagtctaagctgccttctgcggggcttgccttctggccatgcccttcttctctcccttgcacctgtacctcttggtctttgaataaagcctgagtaggaaggctagcaaaaaaaaaaaaaaaaaaaaaaaaaaaaaaaaaaaaaaaaaaaaaaaaaaaaaaaaaaaaaaaaaaaaaaaaaaaaaaaa

SEQ ID NO: 13598 - RNA, 5785 nt, synthetic construct
  source 1..5785: mol_type = other RNA
aggaaataagagagaaaagaagagtaagaagaaatataagagccaccatggcccctaagaagaagcgtaaagtgagccggatggaacgcctcgtctacgaggtgcggcagaagtgcagaaacatcgaggacatctgcatctcctgcggatctctgaacgtgaccctggagcacccactgttcatcggcggcatgtgccagaactgtaaaaactgttttctggagtgtgcctatcaatacgacgatgacggctaccagagctactgcaccatctgttgcggcggaagagaggtgctgatgtgtggaaataacaactgctgccggtgcttctgcgtggaatgcgtggacctgctggtgggccccggcgccgcccaggccgctattaaggaagatccttggaactgctacatgtgcggccacaagggcacatacggcctgctgagacggagagaggactggcctagcagactgcagatgttcttcgccaataaccacgaccaggagttcgacccccctaaggtgtaccctcccgtccccgccgagaagagaaagcccatccgggtcctgagcctgttcgatggcatcgccaccggtctgctggtgctgaaggacctgggcatccaggtggataggtacattgcctccgaggtgtgcgaggactccatcaccgtgggaatggtgcgtcatcagggcaagatcatgtacgtgggcgacgtgcggagcgtgacacagaagcatatccaggagtggggccctttcgacctggtgatcggcggcagcccttgcaatgacctgagcatcgtgaacccagcccggaagggcctgtacgagggaaccggcagactgttcttcgagttttacagactgctgcacgacgcccggcctaaggaaggcgacgaccggcccttcttttggctgttcgagaatgtggtggccatgggagtcagcgacaagcgggatattagccggttcctggagagcaaccccgtgatgatcgatgccaaggaagtgagcgccgcccaccgggccagatacttctggggcaatctgcctggcatgaacagacccctggccagcaccgtgaacgacaagctggagctgcaggagtgcctggagcacggccggatcgccaagttcagcaaggtgagaaccatcaccacccgaagcaacagcatcaaacaaggcaaggaccagcactttcctgtgttcatgaacgagaaggaggacatcctgtggtgtaccgagatggagagagtgttcgggttcccagtccactacacagatgtcagcaacatgtctagactggccagacagagactgctgggaagaagctggtccgtccctgtgatcagacacctgttcgcccctctgaaggagtacttcgcctgcgtgagcagcggcaacagcaacgccaacagccggggccccagcttctctagcggcctggtgccactgtccctgagagggagccacatgggccccatggagatctacaaaaccgtgagcgcctggaagcggcagcctgtgcgcgtgctgagcctgtttcggaatatcgataaagtcctgaaaagcctgggattcctggagagcggctctggctccggcggtggcaccctgaagtacgtggaggatgtgacaaacgtggtcagacgggatgtggagaagtggggccccttcgatctggtgtacggcagcacccaacccctgggcagctcttgtgaccggtgccctggctggtacatgtttcagttccaccggatcctgcagtacgccctgccgagacaggagtcccagcggccattcttttggattttcatggacaacttgctgctgaccgaggatgaccaggaaactaccactcggttcctgcagaccgaagccgtgaccctgcaggacgtgagaggccgggactaccagaacgccatgcgggtgtggtccaacatccctggactgaaaagcaagcacgcacctctgacccctaaagaagaggagtacctgcaggcccaggtgcggagcagaagcaagctggacgcccctaaggtggatctgctggtgaagaattgcctcctgcccctgagagagtacttcaagtatttcagccagaatagtctgcccctgggaggcagcggcggcggcaccccccagaccctgaagcccagggcccccggcgcctgcagcagggccaggagccccggccccggcatccaggacagcgacgccgtgggcagcgtgaccttcgaggacgtggccgtgtacttcagctgggaggagtgggccctgctggacgaggcccagaggtgcctgtaccacgacgtgatgctggagaacttcgccctgaccagcagcctgggcggccccaccggcggcggcagggtggtgggcggcccaagcagcggcgcccctcctcccagcggcggcagcccagccggctccccaacctctaccgaggagggcacctctgagtccgccacccccgagagcggccctggcacctccaccgagcccagcgagggcagcgcacccggcagccctgccggcagccccacctccacagaggagggaaccagcaccgagcccagcgaaggcagcgccccaggcaccagcaccgagcctagtgagcaggagattaaacggatcaacaagatcagaagaagacttgtgaaagacagcaacaccaagaaggccggcaagacaggccccatgaaaaccctgctggttagagtgatgacacccgatctgagagagcggctggaaaacctgagaaagaagcctgaaaatatcccccagcccatcagcaatacatctagagccaacctgaataagctgctgaccgattacaccgaaatgaagaaggcgatcctgcatgtgtactgggaagagttccagaaggaccctgtgggcctgatgagccgggtggcccagcctgccagcaagaagatcgatcagaacaagctgaaacctgagatggacgagaagggcaacctgaccaccgccggctttgcctgctctcagtgtggccagcccctgttcgtgtacaagctggagcaggtgtctgagaagggcaaggcttacaccaactacttcggacggtgcaatgtggccgagcacgaaaagctgatcctgctggcccagctgaagcccgagaaggatagcgacgaagccgtgacatatagcctgggaaagtttgggcagagggccctggatttctacagcattcatgtgaccaaggagtccacccaccccgtgaagcccctggcccagatcgccggaaacagatacgcctccggacctgtgggaaaggccctgagcgacgcatgtatgggcacaatcgcctccttcctgtctaagtaccaggacatcatcatcgaacaccagaaggtggtgaagggcaaccagaagagactggagagcctgcgggagctggccggcaaggaaaacctggaataccctagcgtgaccctgccacctcagcctcacaccaaggagggcgttgatgcctacaacgaagtgatcgcccgggtgcgaatgtgggtgaacctgaacctgtggcagaagctgaagctaagcagagatgatgccaagcctctgctgagactgaagggattcccttcctttcctctggtcgagagacaggccaacgaagtggactggtgggacatggtgtgtaacgtgaagaagctgatcaacgagaaaaaggaggatggcaaggtgttttggcagaatctggctggctacaagagacaggaagccctgagaccatacctgagcagcgaggaagatcggaagaagggaaagaaattcgctcggtaccagctgggcgacctgctgctgcacctggaaaagaagcacggcgaggactggggaaaggtgtacgacgaggcctgggagcggattgacaagaaagtggaaggcctgagcaagcacatcaagctggaagaggaacggagaagcgaggacgcccagagcaaggccgccctgaccgactggctgcgggctaaggccagcttcgtgatcgagggcctgaaggaggccgacaaggacgagttctgcagatgcgagctgaagctgcagaagtggtacggggacctgcggggaaagcccttcgccatcgaagccgagaacagcatcctggacatcagcggcttcagcaagcagtacaactgtgccttcatctggcagaaggacggcgtgaagaagctgaacctgtacctgatcatcaactacttcaagggcggcaagctgcggttcaagaagatcaaacctgaagccttcgaagccaacagattctacaccgtgatcaacaaaaagagcggcgagatcgtgcccatggaggtgaacttcaacttcgacgaccccaacctgatcatcctgcctctggcctttggcaagagacagggcagagaattcatctggaacgacctgctgtccctggaaaccggcagcctgaagctggccaacggaagagtgatcgagaagacactgtacaacagaagaacccggcaggatgagcctgccctgttcgtggccctgaccttcgagcggcgggaggtcctggactcctccaatatcaaaccaatgaacctgatcggcgtggcaagaggcgaaaacatccccgccgtgatcgccctgaccgaccccgagggctgcccactgagccggtttaaggatagcctgggaaacccaacccacatcctgagaatcggcgagagctataaggagaagcagcggaccatccaggccaagaaggaggtggagcagcggagagccggcggctacagccggaagtacgccagcaaagccaagaatctggcagacgatatggtgagaaacaccgctagagatctgctgtactacgccgtgacccaggatgccatgctgatcttcgccaacctgagccggggcttcggccggcagggcaagcggaccttcatggccgagagacagtacacacggatggaggactggctgaccgccaagctggcctacgagggcctgagcaagacctacctgtccaagacactggcccagtacacctccaagacatgcagcaactgtgggtttaccatcaccagcgccgactacgacagggtgctggagaagctgaagaagacagcaacaggctggatgaccacaattaacggcaaggagctgaaggtggagggccagattacctactacaacagatacaagagacagaacgtagtcaaggacctgtccgtcgagctggatagactgagcgaagaatctgtgaacaacgacatctcctcctggacaaagggcagaagcggagaagctctgagcctcctgaagaaaagattctcccatagacccgtgcaggagaagttcgtgtgcctgaactgcggcttcgagacacacgcagccgagcaagccgccctgaacatcgccagatcctggctgttcctgcggagccaggagtacaagaaataccagacaaacaagacaaccggcaacaccgataagagagccttcgtcgagacctggcagtccttttaccggaagaagcttaaggaggtgtggaaacctgccgtgcggtctggcggatctggcggaggctccaccagccccaagaaaaagagaaaagtctaagctgccttctgcggggcttgccttctggccatgcccttcttctctcccttgcacctgtacctcttggtctttgaataaagcctgagtaggaaggctagcaaaaaaaaaaaaaaaaaaaaaaaaaaaaaaaaaaaaaaaaaaaaaaaaaaaaaaaaaaaaaaaaaaaaaaaaaaaaaaaa

SEQ ID NO: 13599 - RNA, 5785 nt, synthetic construct
  source 1..5785: mol_type = other RNA
aggaaataagagagaaaagaagagtaagaagaaatataagagccaccatggcccctaagaagaagcgtaaagtgagccggatggaacgcctcgtctacgaggtgcggcagaagtgcagaaacatcgaggacatctgcatctcctgcggatctctgaacgtgaccctggagcacccactgttcatcggcggcatgtgccagaactgtaaaaactgttttctggagtgtgcctatcaatacgacgatgacggctaccagagctactgcaccatctgttgcggcggaagagaggtgctgatgtgtggaaataacaactgctgccggtgcttctgcgtggaatgcgtggacctgctggtgggccccggcgccgcccaggccgctattaaggaagatccttggaactgctacatgtgcggccacaagggcacatacggcctgctgagacggagagaggactggcctagcagactgcagatgttcttcgccaataaccacgaccaggagttcgacccccctaaggtgtaccctcccgtccccgccgagaagagaaagcccatccgggtcctgagcctgttcgatggcatcgccaccggtctgctggtgctgaaggacctgggcatccaggtggataggtacattgcctccgaggtgtgcgaggactccatcaccgtgggaatggtgcgtcatcagggcaagatcatgtacgtgggcgacgtgcggagcgtgacacagaagcatatccaggagtggggccctttcgacctggtgatcggcggcagcccttgcaatgacctgagcatcgtgaacccagcccggaagggcctgtacgagggaaccggcagactgttcttcgagttttacagactgctgcacgacgcccggcctaaggaaggcgacgaccggcccttcttttggctgttcgagaatgtggtggccatgggagtcagcgacaagcgggatattagccggttcctggagagcaaccccgtgatgatcgatgccaaggaagtgagcgccgcccaccgggccagatacttctggggcaatctgcctggcatgaacagacccctggccagcaccgtgaacgacaagctggagctgcaggagtgcctggagcacggccggatcgccaagttcagcaaggtgagaaccatcaccacccgaagcaacagcatcaaacaaggcaaggaccagcactttcctgtgttcatgaacgagaaggaggacatcctgtggtgtaccgagatggagagagtgttcgggttcccagtccactacacagatgtcagcaacatgtctagactggccagacagagactgctgggaagaagctggtccgtccctgtgatcagacacctgttcgcccctctgaaggagtacttcgcctgcgtgagcagcggcaacagcaacgccaacagccggggccccagcttctctagcggcctggtgccactgtccctgagagggagccacatgggccccatggagatctacaaaaccgtgagcgcctggaagcggcagcctgtgcgcgtgctgagcctgtttcggaatatcgataaagtcctgaaaagcctgggattcctggagagcggctctggctccggcggtggcaccctgaagtacgtggaggatgtgacaaacgtggtcagacgggatgtggagaagtggggccccttcgatctggtgtacggcagcacccaacccctgggcagctcttgtgaccggtgccctggctggtacatgtttcagttccaccggatcctgcagtacgccctgccgagacaggagtcccagcggccattcttttggattttcatggacaacttgctgctgaccgaggatgaccaggaaactaccactcggttcctgcagaccgaagccgtgaccctgcaggacgtgagaggccgggactaccagaacgccatgcgggtgtggtccaacatccctggactgaaaagcaagcacgcacctctgacccctaaagaagaggagtacctgcaggcccaggtgcggagcagaagcaagctggacgcccctaaggtggatctgctggtgaagaattgcctcctgcccctgagagagtacttcaagtatttcagccagaatagtctgcccctgggaggcagcggcggcggccagggcagcgtgaccttcagggacgtggccatcgacttcagccaggaggagtgggagtggctgcagcccgcccagagggacctgtacaggcacgtgatgctggagaactacggccacctggtgagcctgggcctgaacatcagcaagccctacgtggtgagcctgctggagcagggcagggacccctggctggagaaggacgtgaggagggacctgttcagcgagagcagcggcgagatcaggggcggcccaagcagcggcgcccctcctcccagcggcggcagcccagccggctccccaacctctaccgaggagggcacctctgagtccgccacccccgagagcggccctggcacctccaccgagcccagcgagggcagcgcacccggcagccctgccggcagccccacctccacagaggagggaaccagcaccgagcccagcgaaggcagcgccccaggcaccagcaccgagcctagtgagcaggagattaaacggatcaacaagatcagaagaagacttgtgaaagacagcaacaccaagaaggccggcaagacaggccccatgaaaaccctgctggttagagtgatgacacccgatctgagagagcggctggaaaacctgagaaagaagcctgaaaatatcccccagcccatcagcaatacatctagagccaacctgaataagctgctgaccgattacaccgaaatgaagaaggcgatcctgcatgtgtactgggaagagttccagaaggaccctgtgggcctgatgagccgggtggcccagcctgccagcaagaagatcgatcagaacaagctgaaacctgagatggacgagaagggcaacctgaccaccgccggctttgcctgctctcagtgtggccagcccctgttcgtgtacaagctggagcaggtgtctgagaagggcaaggcttacaccaactacttcggacggtgcaatgtggccgagcacgaaaagctgatcctgctggcccagctgaagcccgagaaggatagcgacgaagccgtgacatatagcctgggaaagtttgggcagagggccctggatttctacagcattcatgtgaccaaggagtccacccaccccgtgaagcccctggcccagatcgccggaaacagatacgcctccggacctgtgggaaaggccctgagcgacgcatgtatgggcacaatcgcctccttcctgtctaagtaccaggacatcatcatcgaacaccagaaggtggtgaagggcaaccagaagagactggagagcctgcgggagctggccggcaaggaaaacctggaataccctagcgtgaccctgccacctcagcctcacaccaaggagggcgttgatgcctacaacgaagtgatcgcccgggtgcgaatgtgggtgaacctgaacctgtggcagaagctgaagctaagcagagatgatgccaagcctctgctgagactgaagggattcccttcctttcctctggtcgagagacaggccaacgaagtggactggtgggacatggtgtgtaacgtgaagaagctgatcaacgagaaaaaggaggatggcaaggtgttttggcagaatctggctggctacaagagacaggaagccctgagaccatacctgagcagcgaggaagatcggaagaagggaaagaaattcgctcggtaccagctgggcgacctgctgctgcacctggaaaagaagcacggcgaggactggggaaaggtgtacgacgaggcctgggagcggattgacaagaaagtggaaggcctgagcaagcacatcaagctggaagaggaacggagaagcgaggacgcccagagcaaggccgccctgaccgactggctgcgggctaaggccagcttcgtgatcgagggcctgaaggaggccgacaaggacgagttctgcagatgcgagctgaagctgcagaagtggtacggggacctgcggggaaagcccttcgccatcgaagccgagaacagcatcctggacatcagcggcttcagcaagcagtacaactgtgccttcatctggcagaaggacggcgtgaagaagctgaacctgtacctgatcatcaactacttcaagggcggcaagctgcggttcaagaagatcaaacctgaagccttcgaagccaacagattctacaccgtgatcaacaaaaagagcggcgagatcgtgcccatggaggtgaacttcaacttcgacgaccccaacctgatcatcctgcctctggcctttggcaagagacagggcagagaattcatctggaacgacctgctgtccctggaaaccggcagcctgaagctggccaacggaagagtgatcgagaagacactgtacaacagaagaacccggcaggatgagcctgccctgttcgtggccctgaccttcgagcggcgggaggtcctggactcctccaatatcaaaccaatgaacctgatcggcgtggcaagaggcgaaaacatccccgccgtgatcgccctgaccgaccccgagggctgcccactgagccggtttaaggatagcctgggaaacccaacccacatcctgagaatcggcgagagctataaggagaagcagcggaccatccaggccaagaaggaggtggagcagcggagagccggcggctacagccggaagtacgccagcaaagccaagaatctggcagacgatatggtgagaaacaccgctagagatctgctgtactacgccgtgacccaggatgccatgctgatcttcgccaacctgagccggggcttcggccggcagggcaagcggaccttcatggccgagagacagtacacacggatggaggactggctgaccgccaagctggcctacgagggcctgagcaagacctacctgtccaagacactggcccagtacacctccaagacatgcagcaactgtgggtttaccatcaccagcgccgactacgacagggtgctggagaagctgaagaagacagcaacaggctggatgaccacaattaacggcaaggagctgaaggtggagggccagattacctactacaacagatacaagagacagaacgtagtcaaggacctgtccgtcgagctggatagactgagcgaagaatctgtgaacaacgacatctcctcctggacaaagggcagaagcggagaagctctgagcctcctgaagaaaagattctcccatagacccgtgcaggagaagttcgtgtgcctgaactgcggcttcgagacacacgcagccgagcaagccgccctgaacatcgccagatcctggctgttcctgcggagccaggagtacaagaaataccagacaaacaagacaaccggcaacaccgataagagagccttcgtcgagacctggcagtccttttaccggaagaagcttaaggaggtgtggaaacctgccgtgcggtctggcggatctggcggaggctccaccagccccaagaaaaagagaaaagtctaagctgccttctgcggggcttgccttctggccatgcccttcttctctcccttgcacctgtacctcttggtctttgaataaagcctgagtaggaaggctagcaaaaaaaaaaaaaaaaaaaaaaaaaaaaaaaaaaaaaaaaaaaaaaaaaaaaaaaaaaaaaaaaaaaaaaaaaaaaaaaa

SEQ ID NO: 13600 - RNA, 5785 nt, synthetic construct
  source 1..5785: mol_type = other RNA
aggaaataagagagaaaagaagagtaagaagaaatataagagccaccatggcccctaagaagaagcgtaaagtgagccggatggaacgcctcgtctacgaggtgcggcagaagtgcagaaacatcgaggacatctgcatctcctgcggatctctgaacgtgaccctggagcacccactgttcatcggcggcatgtgccagaactgtaaaaactgttttctggagtgtgcctatcaatacgacgatgacggctaccagagctactgcaccatctgttgcggcggaagagaggtgctgatgtgtggaaataacaactgctgccggtgcttctgcgtggaatgcgtggacctgctggtgggccccggcgccgcccaggccgctattaaggaagatccttggaactgctacatgtgcggccacaagggcacatacggcctgctgagacggagagaggactggcctagcagactgcagatgttcttcgccaataaccacgaccaggagttcgacccccctaaggtgtaccctcccgtccccgccgagaagagaaagcccatccgggtcctgagcctgttcgatggcatcgccaccggtctgctggtgctgaaggacctgggcatccaggtggataggtacattgcctccgaggtgtgcgaggactccatcaccgtgggaatggtgcgtcatcagggcaagatcatgtacgtgggcgacgtgcggagcgtgacacagaagcatatccaggagtggggccctttcgacctggtgatcggcggcagcccttgcaatgacctgagcatcgtgaacccagcccggaagggcctgtacgagggaaccggcagactgttcttcgagttttacagactgctgcacgacgcccggcctaaggaaggcgacgaccggcccttcttttggctgttcgagaatgtggtggccatgggagtcagcgacaagcgggatattagccggttcctggagagcaaccccgtgatgatcgatgccaaggaagtgagcgccgcccaccgggccagatacttctggggcaatctgcctggcatgaacagacccctggccagcaccgtgaacgacaagctggagctgcaggagtgcctggagcacggccggatcgccaagttcagcaaggtgagaaccatcaccacccgaagcaacagcatcaaacaaggcaaggaccagcactttcctgtgttcatgaacgagaaggaggacatcctgtggtgtaccgagatggagagagtgttcgggttcccagtccactacacagatgtcagcaacatgtctagactggccagacagagactgctgggaagaagctggtccgtccctgtgatcagacacctgttcgcccctctgaaggagtacttcgcctgcgtgagcagcggcaacagcaacgccaacagccggggccccagcttctctagcggcctggtgccactgtccctgagagggagccacatgggccccatggagatctacaaaaccgtgagcgcctggaagcggcagcctgtgcgcgtgctgagcctgtttcggaatatcgataaagtcctgaaaagcctgggattcctggagagcggctctggctccggcggtggcaccctgaagtacgtggaggatgtgacaaacgtggtcagacgggatgtggagaagtggggccccttcgatctggtgtacggcagcacccaacccctgggcagctcttgtgaccggtgccctggctggtacatgtttcagttccaccggatcctgcagtacgccctgccgagacaggagtcccagcggccattcttttggattttcatggacaacttgctgctgaccgaggatgaccaggaaactaccactcggttcctgcagaccgaagccgtgaccctgcaggacgtgagaggccgggactaccagaacgccatgcgggtgtggtccaacatccctggactgaaaagcaagcacgcacctctgacccctaaagaagaggagtacctgcaggcccaggtgcggagcagaagcaagctggacgcccctaaggtggatctgctggtgaagaattgcctcctgcccctgagagagtacttcaagtatttcagccagaatagtctgcccctgggaggcagcggcggcggcatgaccaccctgaaggagaccgtgaccttcaaggacgtggccgtggtgttcaccgaggaggagctgcagctgctggaccccgcccagaagaagctgtaccaggacgtgatgctggagaacttcaggaacctgctgagcgtgggccaccagcccttccacggcgacaccttccacttccccagggaggagaagttctggatggtggagaccgccacccagaaggagggcaacctggacggcgtgggcggcccaagcagcggcgcccctcctcccagcggcggcagcccagccggctccccaacctctaccgaggagggcacctctgagtccgccacccccgagagcggccctggcacctccaccgagcccagcgagggcagcgcacccggcagccctgccggcagccccacctccacagaggagggaaccagcaccgagcccagcgaaggcagcgccccaggcaccagcaccgagcctagtgagcaggagattaaacggatcaacaagatcagaagaagacttgtgaaagacagcaacaccaagaaggccggcaagacaggccccatgaaaaccctgctggttagagtgatgacacccgatctgagagagcggctggaaaacctgagaaagaagcctgaaaatatcccccagcccatcagcaatacatctagagccaacctgaataagctgctgaccgattacaccgaaatgaagaaggcgatcctgcatgtgtactgggaagagttccagaaggaccctgtgggcctgatgagccgggtggcccagcctgccagcaagaagatcgatcagaacaagctgaaacctgagatggacgagaagggcaacctgaccaccgccggctttgcctgctctcagtgtggccagcccctgttcgtgtacaagctggagcaggtgtctgagaagggcaaggcttacaccaactacttcggacggtgcaatgtggccgagcacgaaaagctgatcctgctggcccagctgaagcccgagaaggatagcgacgaagccgtgacatatagcctgggaaagtttgggcagagggccctggatttctacagcattcatgtgaccaaggagtccacccaccccgtgaagcccctggcccagatcgccggaaacagatacgcctccggacctgtgggaaaggccctgagcgacgcatgtatgggcacaatcgcctccttcctgtctaagtaccaggacatcatcatcgaacaccagaaggtggtgaagggcaaccagaagagactggagagcctgcgggagctggccggcaaggaaaacctggaataccctagcgtgaccctgccacctcagcctcacaccaaggagggcgttgatgcctacaacgaagtgatcgcccgggtgcgaatgtgggtgaacctgaacctgtggcagaagctgaagctaagcagagatgatgccaagcctctgctgagactgaagggattcccttcctttcctctggtcgagagacaggccaacgaagtggactggtgggacatggtgtgtaacgtgaagaagctgatcaacgagaaaaaggaggatggcaaggtgttttggcagaatctggctggctacaagagacaggaagccctgagaccatacctgagcagcgaggaagatcggaagaagggaaagaaattcgctcggtaccagctgggcgacctgctgctgcacctggaaaagaagcacggcgaggactggggaaaggtgtacgacgaggcctgggagcggattgacaagaaagtggaaggcctgagcaagcacatcaagctggaagaggaacggagaagcgaggacgcccagagcaaggccgccctgaccgactggctgcgggctaaggccagcttcgtgatcgagggcctgaaggaggccgacaaggacgagttctgcagatgcgagctgaagctgcagaagtggtacggggacctgcggggaaagcccttcgccatcgaagccgagaacagcatcctggacatcagcggcttcagcaagcagtacaactgtgccttcatctggcagaaggacggcgtgaagaagctgaacctgtacctgatcatcaactacttcaagggcggcaagctgcggttcaagaagatcaaacctgaagccttcgaagccaacagattctacaccgtgatcaacaaaaagagcggcgagatcgtgcccatggaggtgaacttcaacttcgacgaccccaacctgatcatcctgcctctggcctttggcaagagacagggcagagaattcatctggaacgacctgctgtccctggaaaccggcagcctgaagctggccaacggaagagtgatcgagaagacactgtacaacagaagaacccggcaggatgagcctgccctgttcgtggccctgaccttcgagcggcgggaggtcctggactcctccaatatcaaaccaatgaacctgatcggcgtggcaagaggcgaaaacatccccgccgtgatcgccctgaccgaccccgagggctgcccactgagccggtttaaggatagcctgggaaacccaacccacatcctgagaatcggcgagagctataaggagaagcagcggaccatccaggccaagaaggaggtggagcagcggagagccggcggctacagccggaagtacgccagcaaagccaagaatctggcagacgatatggtgagaaacaccgctagagatctgctgtactacgccgtgacccaggatgccatgctgatcttcgccaacctgagccggggcttcggccggcagggcaagcggaccttcatggccgagagacagtacacacggatggaggactggctgaccgccaagctggcctacgagggcctgagcaagacctacctgtccaagacactggcccagtacacctccaagacatgcagcaactgtgggtttaccatcaccagcgccgactacgacagggtgctggagaagctgaagaagacagcaacaggctggatgaccacaattaacggcaaggagctgaaggtggagggccagattacctactacaacagatacaagagacagaacgtagtcaaggacctgtccgtcgagctggatagactgagcgaagaatctgtgaacaacgacatctcctcctggacaaagggcagaagcggagaagctctgagcctcctgaagaaaagattctcccatagacccgtgcaggagaagttcgtgtgcctgaactgcggcttcgagacacacgcagccgagcaagccgccctgaacatcgccagatcctggctgttcctgcggagccaggagtacaagaaataccagacaaacaagacaaccggcaacaccgataagagagccttcgtcgagacctggcagtccttttaccggaagaagcttaaggaggtgtggaaacctgccgtgcggtctggcggatctggcggaggctccaccagccccaagaaaaagagaaaagtctaagctgccttctgcggggcttgccttctggccatgcccttcttctctcccttgcacctgtacctcttggtctttgaataaagcctgagtaggaaggctagcaaaaaaaaaaaaaaaaaaaaaaaaaaaaaaaaaaaaaaaaaaaaaaaaaaaaaaaaaaaaaaaaaaaaaaaaaaaaaaaa

SEQ ID NO: 13601 - RNA, 5785 nt, synthetic construct
  source 1..5785: mol_type = other RNA
aggaaataagagagaaaagaagagtaagaagaaatataagagccaccatggcccctaagaagaagcgtaaagtgagccggatggaacgcctcgtctacgaggtgcggcagaagtgcagaaacatcgaggacatctgcatctcctgcggatctctgaacgtgaccctggagcacccactgttcatcggcggcatgtgccagaactgtaaaaactgttttctggagtgtgcctatcaatacgacgatgacggctaccagagctactgcaccatctgttgcggcggaagagaggtgctgatgtgtggaaataacaactgctgccggtgcttctgcgtggaatgcgtggacctgctggtgggccccggcgccgcccaggccgctattaaggaagatccttggaactgctacatgtgcggccacaagggcacatacggcctgctgagacggagagaggactggcctagcagactgcagatgttcttcgccaataaccacgaccaggagttcgacccccctaaggtgtaccctcccgtccccgccgagaagagaaagcccatccgggtcctgagcctgttcgatggcatcgccaccggtctgctggtgctgaaggacctgggcatccaggtggataggtacattgcctccgaggtgtgcgaggactccatcaccgtgggaatggtgcgtcatcagggcaagatcatgtacgtgggcgacgtgcggagcgtgacacagaagcatatccaggagtggggccctttcgacctggtgatcggcggcagcccttgcaatgacctgagcatcgtgaacccagcccggaagggcctgtacgagggaaccggcagactgttcttcgagttttacagactgctgcacgacgcccggcctaaggaaggcgacgaccggcccttcttttggctgttcgagaatgtggtggccatgggagtcagcgacaagcgggatattagccggttcctggagagcaaccccgtgatgatcgatgccaaggaagtgagcgccgcccaccgggccagatacttctggggcaatctgcctggcatgaacagacccctggccagcaccgtgaacgacaagctggagctgcaggagtgcctggagcacggccggatcgccaagttcagcaaggtgagaaccatcaccacccgaagcaacagcatcaaacaaggcaaggaccagcactttcctgtgttcatgaacgagaaggaggacatcctgtggtgtaccgagatggagagagtgttcgggttcccagtccactacacagatgtcagcaacatgtctagactggccagacagagactgctgggaagaagctggtccgtccctgtgatcagacacctgttcgcccctctgaaggagtacttcgcctgcgtgagcagcggcaacagcaacgccaacagccggggccccagcttctctagcggcctggtgccactgtccctgagagggagccacatgggccccatggagatctacaaaaccgtgagcgcctggaagcggcagcctgtgcgcgtgctgagcctgtttcggaatatcgataaagtcctgaaaagcctgggattcctggagagcggctctggctccggcggtggcaccctgaagtacgtggaggatgtgacaaacgtggtcagacgggatgtggagaagtggggccccttcgatctggtgtacggcagcacccaacccctgggcagctcttgtgaccggtgccctggctggtacatgtttcagttccaccggatcctgcagtacgccctgccgagacaggagtcccagcggccattcttttggattttcatggacaacttgctgctgaccgaggatgaccaggaaactaccactcggttcctgcagaccgaagccgtgaccctgcaggacgtgagaggccgggactaccagaacgccatgcgggtgtggtccaacatccctggactgaaaagcaagcacgcacctctgacccctaaagaagaggagtacctgcaggcccaggtgcggagcagaagcaagctggacgcccctaaggtggatctgctggtgaagaattgcctcctgcccctgagagagtacttcaagtatttcagccagaatagtctgcccctgggaggcagcggcggcggcatgaccttcagcgacgtggccgtggacttcagccagcaggagtgggagtgcctggaccccgtgcagaagaccctgtacagggacgtgatgatggagaactacggcaacctggtgagcctgggccacagcatcagcaagcccgacgtgatcgccctgctggagcagggcaaggagccctgggtggtgaccaaggaggagaccaggaggtgctgcaccgacctggagagcaggtacgagatcatcggcggcccaagcagcggcgcccctcctcccagcggcggcagcccagccggctccccaacctctaccgaggagggcacctctgagtccgccacccccgagagcggccctggcacctccaccgagcccagcgagggcagcgcacccggcagccctgccggcagccccacctccacagaggagggaaccagcaccgagcccagcgaaggcagcgccccaggcaccagcaccgagcctagtgagcaggagattaaacggatcaacaagatcagaagaagacttgtgaaagacagcaacaccaagaaggccggcaagacaggccccatgaaaaccctgctggttagagtgatgacacccgatctgagagagcggctggaaaacctgagaaagaagcctgaaaatatcccccagcccatcagcaatacatctagagccaacctgaataagctgctgaccgattacaccgaaatgaagaaggcgatcctgcatgtgtactgggaagagttccagaaggaccctgtgggcctgatgagccgggtggcccagcctgccagcaagaagatcgatcagaacaagctgaaacctgagatggacgagaagggcaacctgaccaccgccggctttgcctgctctcagtgtggccagcccctgttcgtgtacaagctggagcaggtgtctgagaagggcaaggcttacaccaactacttcggacggtgcaatgtggccgagcacgaaaagctgatcctgctggcccagctgaagcccgagaaggatagcgacgaagccgtgacatatagcctgggaaagtttgggcagagggccctggatttctacagcattcatgtgaccaaggagtccacccaccccgtgaagcccctggcccagatcgccggaaacagatacgcctccggacctgtgggaaaggccctgagcgacgcatgtatgggcacaatcgcctccttcctgtctaagtaccaggacatcatcatcgaacaccagaaggtggtgaagggcaaccagaagagactggagagcctgcgggagctggccggcaaggaaaacctggaataccctagcgtgaccctgccacctcagcctcacaccaaggagggcgttgatgcctacaacgaagtgatcgcccgggtgcgaatgtgggtgaacctgaacctgtggcagaagctgaagctaagcagagatgatgccaagcctctgctgagactgaagggattcccttcctttcctctggtcgagagacaggccaacgaagtggactggtgggacatggtgtgtaacgtgaagaagctgatcaacgagaaaaaggaggatggcaaggtgttttggcagaatctggctggctacaagagacaggaagccctgagaccatacctgagcagcgaggaagatcggaagaagggaaagaaattcgctcggtaccagctgggcgacctgctgctgcacctggaaaagaagcacggcgaggactggggaaaggtgtacgacgaggcctgggagcggattgacaagaaagtggaaggcctgagcaagcacatcaagctggaagaggaacggagaagcgaggacgcccagagcaaggccgccctgaccgactggctgcgggctaaggccagcttcgtgatcgagggcctgaaggaggccgacaaggacgagttctgcagatgcgagctgaagctgcagaagtggtacggggacctgcggggaaagcccttcgccatcgaagccgagaacagcatcctggacatcagcggcttcagcaagcagtacaactgtgccttcatctggcagaaggacggcgtgaagaagctgaacctgtacctgatcatcaactacttcaagggcggcaagctgcggttcaagaagatcaaacctgaagccttcgaagccaacagattctacaccgtgatcaacaaaaagagcggcgagatcgtgcccatggaggtgaacttcaacttcgacgaccccaacctgatcatcctgcctctggcctttggcaagagacagggcagagaattcatctggaacgacctgctgtccctggaaaccggcagcctgaagctggccaacggaagagtgatcgagaagacactgtacaacagaagaacccggcaggatgagcctgccctgttcgtggccctgaccttcgagcggcgggaggtcctggactcctccaatatcaaaccaatgaacctgatcggcgtggcaagaggcgaaaacatccccgccgtgatcgccctgaccgaccccgagggctgcccactgagccggtttaaggatagcctgggaaacccaacccacatcctgagaatcggcgagagctataaggagaagcagcggaccatccaggccaagaaggaggtggagcagcggagagccggcggctacagccggaagtacgccagcaaagccaagaatctggcagacgatatggtgagaaacaccgctagagatctgctgtactacgccgtgacccaggatgccatgctgatcttcgccaacctgagccggggcttcggccggcagggcaagcggaccttcatggccgagagacagtacacacggatggaggactggctgaccgccaagctggcctacgagggcctgagcaagacctacctgtccaagacactggcccagtacacctccaagacatgcagcaactgtgggtttaccatcaccagcgccgactacgacagggtgctggagaagctgaagaagacagcaacaggctggatgaccacaattaacggcaaggagctgaaggtggagggccagattacctactacaacagatacaagagacagaacgtagtcaaggacctgtccgtcgagctggatagactgagcgaagaatctgtgaacaacgacatctcctcctggacaaagggcagaagcggagaagctctgagcctcctgaagaaaagattctcccatagacccgtgcaggagaagttcgtgtgcctgaactgcggcttcgagacacacgcagccgagcaagccgccctgaacatcgccagatcctggctgttcctgcggagccaggagtacaagaaataccagacaaacaagacaaccggcaacaccgataagagagccttcgtcgagacctggcagtccttttaccggaagaagcttaaggaggtgtggaaacctgccgtgcggtctggcggatctggcggaggctccaccagccccaagaaaaagagaaaagtctaagctgccttctgcggggcttgccttctggccatgcccttcttctctcccttgcacctgtacctcttggtctttgaataaagcctgagtaggaaggctagcaaaaaaaaaaaaaaaaaaaaaaaaaaaaaaaaaaaaaaaaaaaaaaaaaaaaaaaaaaaaaaaaaaaaaaaaaaaaaaaa

SEQ ID NO: 13602 - RNA, 5785 nt, synthetic construct
  source 1..5785: mol_type = other RNA
aggaaataagagagaaaagaagagtaagaagaaatataagagccaccatggcccctaagaagaagcgtaaagtgagccggatggaacgcctcgtctacgaggtgcggcagaagtgcagaaacatcgaggacatctgcatctcctgcggatctctgaacgtgaccctggagcacccactgttcatcggcggcatgtgccagaactgtaaaaactgttttctggagtgtgcctatcaatacgacgatgacggctaccagagctactgcaccatctgttgcggcggaagagaggtgctgatgtgtggaaataacaactgctgccggtgcttctgcgtggaatgcgtggacctgctggtgggccccggcgccgcccaggccgctattaaggaagatccttggaactgctacatgtgcggccacaagggcacatacggcctgctgagacggagagaggactggcctagcagactgcagatgttcttcgccaataaccacgaccaggagttcgacccccctaaggtgtaccctcccgtccccgccgagaagagaaagcccatccgggtcctgagcctgttcgatggcatcgccaccggtctgctggtgctgaaggacctgggcatccaggtggataggtacattgcctccgaggtgtgcgaggactccatcaccgtgggaatggtgcgtcatcagggcaagatcatgtacgtgggcgacgtgcggagcgtgacacagaagcatatccaggagtggggccctttcgacctggtgatcggcggcagcccttgcaatgacctgagcatcgtgaacccagcccggaagggcctgtacgagggaaccggcagactgttcttcgagttttacagactgctgcacgacgcccggcctaaggaaggcgacgaccggcccttcttttggctgttcgagaatgtggtggccatgggagtcagcgacaagcgggatattagccggttcctggagagcaaccccgtgatgatcgatgccaaggaagtgagcgccgcccaccgggccagatacttctggggcaatctgcctggcatgaacagacccctggccagcaccgtgaacgacaagctggagctgcaggagtgcctggagcacggccggatcgccaagttcagcaaggtgagaaccatcaccacccgaagcaacagcatcaaacaaggcaaggaccagcactttcctgtgttcatgaacgagaaggaggacatcctgtggtgtaccgagatggagagagtgttcgggttcccagtccactacacagatgtcagcaacatgtctagactggccagacagagactgctgggaagaagctggtccgtccctgtgatcagacacctgttcgcccctctgaaggagtacttcgcctgcgtgagcagcggcaacagcaacgccaacagccggggccccagcttctctagcggcctggtgccactgtccctgagagggagccacatgggccccatggagatctacaaaaccgtgagcgcctggaagcggcagcctgtgcgcgtgctgagcctgtttcggaatatcgataaagtcctgaaaagcctgggattcctggagagcggctctggctccggcggtggcaccctgaagtacgtggaggatgtgacaaacgtggtcagacgggatgtggagaagtggggccccttcgatctggtgtacggcagcacccaacccctgggcagctcttgtgaccggtgccctggctggtacatgtttcagttccaccggatcctgcagtacgccctgccgagacaggagtcccagcggccattcttttggattttcatggacaacttgctgctgaccgaggatgaccaggaaactaccactcggttcctgcagaccgaagccgtgaccctgcaggacgtgagaggccgggactaccagaacgccatgcgggtgtggtccaacatccctggactgaaaagcaagcacgcacctctgacccctaaagaagaggagtacctgcaggcccaggtgcggagcagaagcaagctggacgcccctaaggtggatctgctggtgaagaattgcctcctgcccctgagagagtacttcaagtatttcagccagaatagtctgcccctgggaggcagcggcggcggcacccaggtgagcctgaccttcgacgacgtggccgtgaagctgacctgggaggagtggcagctgctggaccccgcccagaaggacctgtacagggacgtgatgctggagaactacagcaacctggtgagcgtgggctaccaggtgagcaagcccgacgccctgagcaggctggagaggggcgagcccccctggagcatcgaggacaagatccacaccaggaccttcagcggcgagaggccctacggcggcccaagcagcggcgcccctcctcccagcggcggcagcccagccggctccccaacctctaccgaggagggcacctctgagtccgccacccccgagagcggccctggcacctccaccgagcccagcgagggcagcgcacccggcagccctgccggcagccccacctccacagaggagggaaccagcaccgagcccagcgaaggcagcgccccaggcaccagcaccgagcctagtgagcaggagattaaacggatcaacaagatcagaagaagacttgtgaaagacagcaacaccaagaaggccggcaagacaggccccatgaaaaccctgctggttagagtgatgacacccgatctgagagagcggctggaaaacctgagaaagaagcctgaaaatatcccccagcccatcagcaatacatctagagccaacctgaataagctgctgaccgattacaccgaaatgaagaaggcgatcctgcatgtgtactgggaagagttccagaaggaccctgtgggcctgatgagccgggtggcccagcctgccagcaagaagatcgatcagaacaagctgaaacctgagatggacgagaagggcaacctgaccaccgccggctttgcctgctctcagtgtggccagcccctgttcgtgtacaagctggagcaggtgtctgagaagggcaaggcttacaccaactacttcggacggtgcaatgtggccgagcacgaaaagctgatcctgctggcccagctgaagcccgagaaggatagcgacgaagccgtgacatatagcctgggaaagtttgggcagagggccctggatttctacagcattcatgtgaccaaggagtccacccaccccgtgaagcccctggcccagatcgccggaaacagatacgcctccggacctgtgggaaaggccctgagcgacgcatgtatgggcacaatcgcctccttcctgtctaagtaccaggacatcatcatcgaacaccagaaggtggtgaagggcaaccagaagagactggagagcctgcgggagctggccggcaaggaaaacctggaataccctagcgtgaccctgccacctcagcctcacaccaaggagggcgttgatgcctacaacgaagtgatcgcccgggtgcgaatgtgggtgaacctgaacctgtggcagaagctgaagctaagcagagatgatgccaagcctctgctgagactgaagggattcccttcctttcctctggtcgagagacaggccaacgaagtggactggtgggacatggtgtgtaacgtgaagaagctgatcaacgagaaaaaggaggatggcaaggtgttttggcagaatctggctggctacaagagacaggaagccctgagaccatacctgagcagcgaggaagatcggaagaagggaaagaaattcgctcggtaccagctgggcgacctgctgctgcacctggaaaagaagcacggcgaggactggggaaaggtgtacgacgaggcctgggagcggattgacaagaaagtggaaggcctgagcaagcacatcaagctggaagaggaacggagaagcgaggacgcccagagcaaggccgccctgaccgactggctgcgggctaaggccagcttcgtgatcgagggcctgaaggaggccgacaaggacgagttctgcagatgcgagctgaagctgcagaagtggtacggggacctgcggggaaagcccttcgccatcgaagccgagaacagcatcctggacatcagcggcttcagcaagcagtacaactgtgccttcatctggcagaaggacggcgtgaagaagctgaacctgtacctgatcatcaactacttcaagggcggcaagctgcggttcaagaagatcaaacctgaagccttcgaagccaacagattctacaccgtgatcaacaaaaagagcggcgagatcgtgcccatggaggtgaacttcaacttcgacgaccccaacctgatcatcctgcctctggcctttggcaagagacagggcagagaattcatctggaacgacctgctgtccctggaaaccggcagcctgaagctggccaacggaagagtgatcgagaagacactgtacaacagaagaacccggcaggatgagcctgccctgttcgtggccctgaccttcgagcggcgggaggtcctggactcctccaatatcaaaccaatgaacctgatcggcgtggcaagaggcgaaaacatccccgccgtgatcgccctgaccgaccccgagggctgcccactgagccggtttaaggatagcctgggaaacccaacccacatcctgagaatcggcgagagctataaggagaagcagcggaccatccaggccaagaaggaggtggagcagcggagagccggcggctacagccggaagtacgccagcaaagccaagaatctggcagacgatatggtgagaaacaccgctagagatctgctgtactacgccgtgacccaggatgccatgctgatcttcgccaacctgagccggggcttcggccggcagggcaagcggaccttcatggccgagagacagtacacacggatggaggactggctgaccgccaagctggcctacgagggcctgagcaagacctacctgtccaagacactggcccagtacacctccaagacatgcagcaactgtgggtttaccatcaccagcgccgactacgacagggtgctggagaagctgaagaagacagcaacaggctggatgaccacaattaacggcaaggagctgaaggtggagggccagattacctactacaacagatacaagagacagaacgtagtcaaggacctgtccgtcgagctggatagactgagcgaagaatctgtgaacaacgacatctcctcctggacaaagggcagaagcggagaagctctgagcctcctgaagaaaagattctcccatagacccgtgcaggagaagttcgtgtgcctgaactgcggcttcgagacacacgcagccgagcaagccgccctgaacatcgccagatcctggctgttcctgcggagccaggagtacaagaaataccagacaaacaagacaaccggcaacaccgataagagagccttcgtcgagacctggcagtccttttaccggaagaagcttaaggaggtgtggaaacctgccgtgcggtctggcggatctggcggaggctccaccagccccaagaaaaagagaaaagtctaagctgccttctgcggggcttgccttctggccatgcccttcttctctcccttgcacctgtacctcttggtctttgaataaagcctgagtaggaaggctagcaaaaaaaaaaaaaaaaaaaaaaaaaaaaaaaaaaaaaaaaaaaaaaaaaaaaaaaaaaaaaaaaaaaaaaaaaaaaaaaa

SEQ ID NO: 13603 - RNA, 5785 nt, synthetic construct
  source 1..5785: mol_type = other RNA
aggaaataagagagaaaagaagagtaagaagaaatataagagccaccatggcccctaagaagaagcgtaaagtgagccggatggaacgcctcgtctacgaggtgcggcagaagtgcagaaacatcgaggacatctgcatctcctgcggatctctgaacgtgaccctggagcacccactgttcatcggcggcatgtgccagaactgtaaaaactgttttctggagtgtgcctatcaatacgacgatgacggctaccagagctactgcaccatctgttgcggcggaagagaggtgctgatgtgtggaaataacaactgctgccggtgcttctgcgtggaatgcgtggacctgctggtgggccccggcgccgcccaggccgctattaaggaagatccttggaactgctacatgtgcggccacaagggcacatacggcctgctgagacggagagaggactggcctagcagactgcagatgttcttcgccaataaccacgaccaggagttcgacccccctaaggtgtaccctcccgtccccgccgagaagagaaagcccatccgggtcctgagcctgttcgatggcatcgccaccggtctgctggtgctgaaggacctgggcatccaggtggataggtacattgcctccgaggtgtgcgaggactccatcaccgtgggaatggtgcgtcatcagggcaagatcatgtacgtgggcgacgtgcggagcgtgacacagaagcatatccaggagtggggccctttcgacctggtgatcggcggcagcccttgcaatgacctgagcatcgtgaacccagcccggaagggcctgtacgagggaaccggcagactgttcttcgagttttacagactgctgcacgacgcccggcctaaggaaggcgacgaccggcccttcttttggctgttcgagaatgtggtggccatgggagtcagcgacaagcgggatattagccggttcctggagagcaaccccgtgatgatcgatgccaaggaagtgagcgccgcccaccgggccagatacttctggggcaatctgcctggcatgaacagacccctggccagcaccgtgaacgacaagctggagctgcaggagtgcctggagcacggccggatcgccaagttcagcaaggtgagaaccatcaccacccgaagcaacagcatcaaacaaggcaaggaccagcactttcctgtgttcatgaacgagaaggaggacatcctgtggtgtaccgagatggagagagtgttcgggttcccagtccactacacagatgtcagcaacatgtctagactggccagacagagactgctgggaagaagctggtccgtccctgtgatcagacacctgttcgcccctctgaaggagtacttcgcctgcgtgagcagcggcaacagcaacgccaacagccggggccccagcttctctagcggcctggtgccactgtccctgagagggagccacatgggccccatggagatctacaaaaccgtgagcgcctggaagcggcagcctgtgcgcgtgctgagcctgtttcggaatatcgataaagtcctgaaaagcctgggattcctggagagcggctctggctccggcggtggcaccctgaagtacgtggaggatgtgacaaacgtggtcagacgggatgtggagaagtggggccccttcgatctggtgtacggcagcacccaacccctgggcagctcttgtgaccggtgccctggctggtacatgtttcagttccaccggatcctgcagtacgccctgccgagacaggagtcccagcggccattcttttggattttcatggacaacttgctgctgaccgaggatgaccaggaaactaccactcggttcctgcagaccgaagccgtgaccctgcaggacgtgagaggccgggactaccagaacgccatgcgggtgtggtccaacatccctggactgaaaagcaagcacgcacctctgacccctaaagaagaggagtacctgcaggcccaggtgcggagcagaagcaagctggacgcccctaaggtggatctgctggtgaagaattgcctcctgcccctgagagagtacttcaagtatttcagccagaatagtctgcccctgggaggcagcggcggcggcatggccgccgccgccctggtgaacaccccccagggccacgtgaccttcgaggacatcgccgtgtacttcagccaggaggagtggggcctgctggacgaggcccagaggtgcctgtaccacgacgtgatgctggagaacttcagcctgatggccagcgtgggctgcctgcacggcatcgaggccgaggaggcccccagcgagcagaccgtgagcgcccagggcgccagccaggccaggacccccggcggcccaagcagcggcgcccctcctcccagcggcggcagcccagccggctccccaacctctaccgaggagggcacctctgagtccgccacccccgagagcggccctggcacctccaccgagcccagcgagggcagcgcacccggcagccctgccggcagccccacctccacagaggagggaaccagcaccgagcccagcgaaggcagcgccccaggcaccagcaccgagcctagtgagcaggagattaaacggatcaacaagatcagaagaagacttgtgaaagacagcaacaccaagaaggccggcaagacaggccccatgaaaaccctgctggttagagtgatgacacccgatctgagagagcggctggaaaacctgagaaagaagcctgaaaatatcccccagcccatcagcaatacatctagagccaacctgaataagctgctgaccgattacaccgaaatgaagaaggcgatcctgcatgtgtactgggaagagttccagaaggaccctgtgggcctgatgagccgggtggcccagcctgccagcaagaagatcgatcagaacaagctgaaacctgagatggacgagaagggcaacctgaccaccgccggctttgcctgctctcagtgtggccagcccctgttcgtgtacaagctggagcaggtgtctgagaagggcaaggcttacaccaactacttcggacggtgcaatgtggccgagcacgaaaagctgatcctgctggcccagctgaagcccgagaaggatagcgacgaagccgtgacatatagcctgggaaagtttgggcagagggccctggatttctacagcattcatgtgaccaaggagtccacccaccccgtgaagcccctggcccagatcgccggaaacagatacgcctccggacctgtgggaaaggccctgagcgacgcatgtatgggcacaatcgcctccttcctgtctaagtaccaggacatcatcatcgaacaccagaaggtggtgaagggcaaccagaagagactggagagcctgcgggagctggccggcaaggaaaacctggaataccctagcgtgaccctgccacctcagcctcacaccaaggagggcgttgatgcctacaacgaagtgatcgcccgggtgcgaatgtgggtgaacctgaacctgtggcagaagctgaagctaagcagagatgatgccaagcctctgctgagactgaagggattcccttcctttcctctggtcgagagacaggccaacgaagtggactggtgggacatggtgtgtaacgtgaagaagctgatcaacgagaaaaaggaggatggcaaggtgttttggcagaatctggctggctacaagagacaggaagccctgagaccatacctgagcagcgaggaagatcggaagaagggaaagaaattcgctcggtaccagctgggcgacctgctgctgcacctggaaaagaagcacggcgaggactggggaaaggtgtacgacgaggcctgggagcggattgacaagaaagtggaaggcctgagcaagcacatcaagctggaagaggaacggagaagcgaggacgcccagagcaaggccgccctgaccgactggctgcgggctaaggccagcttcgtgatcgagggcctgaaggaggccgacaaggacgagttctgcagatgcgagctgaagctgcagaagtggtacggggacctgcggggaaagcccttcgccatcgaagccgagaacagcatcctggacatcagcggcttcagcaagcagtacaactgtgccttcatctggcagaaggacggcgtgaagaagctgaacctgtacctgatcatcaactacttcaagggcggcaagctgcggttcaagaagatcaaacctgaagccttcgaagccaacagattctacaccgtgatcaacaaaaagagcggcgagatcgtgcccatggaggtgaacttcaacttcgacgaccccaacctgatcatcctgcctctggcctttggcaagagacagggcagagaattcatctggaacgacctgctgtccctggaaaccggcagcctgaagctggccaacggaagagtgatcgagaagacactgtacaacagaagaacccggcaggatgagcctgccctgttcgtggccctgaccttcgagcggcgggaggtcctggactcctccaatatcaaaccaatgaacctgatcggcgtggcaagaggcgaaaacatccccgccgtgatcgccctgaccgaccccgagggctgcccactgagccggtttaaggatagcctgggaaacccaacccacatcctgagaatcggcgagagctataaggagaagcagcggaccatccaggccaagaaggaggtggagcagcggagagccggcggctacagccggaagtacgccagcaaagccaagaatctggcagacgatatggtgagaaacaccgctagagatctgctgtactacgccgtgacccaggatgccatgctgatcttcgccaacctgagccggggcttcggccggcagggcaagcggaccttcatggccgagagacagtacacacggatggaggactggctgaccgccaagctggcctacgagggcctgagcaagacctacctgtccaagacactggcccagtacacctccaagacatgcagcaactgtgggtttaccatcaccagcgccgactacgacagggtgctggagaagctgaagaagacagcaacaggctggatgaccacaattaacggcaaggagctgaaggtggagggccagattacctactacaacagatacaagagacagaacgtagtcaaggacctgtccgtcgagctggatagactgagcgaagaatctgtgaacaacgacatctcctcctggacaaagggcagaagcggagaagctctgagcctcctgaagaaaagattctcccatagacccgtgcaggagaagttcgtgtgcctgaactgcggcttcgagacacacgcagccgagcaagccgccctgaacatcgccagatcctggctgttcctgcggagccaggagtacaagaaataccagacaaacaagacaaccggcaacaccgataagagagccttcgtcgagacctggcagtccttttaccggaagaagcttaaggaggtgtggaaacctgccgtgcggtctggcggatctggcggaggctccaccagccccaagaaaaagagaaaagtctaagctgccttctgcggggcttgccttctggccatgcccttcttctctcccttgcacctgtacctcttggtctttgaataaagcctgagtaggaaggctagcaaaaaaaaaaaaaaaaaaaaaaaaaaaaaaaaaaaaaaaaaaaaaaaaaaaaaaaaaaaaaaaaaaaaaaaaaaaaaaaa

SEQ ID NO: 13604 - RNA, 5785 nt, synthetic construct
  source 1..5785: mol_type = other RNA
aggaaataagagagaaaagaagagtaagaagaaatataagagccaccatggcccctaagaagaagcgtaaagtgagccggatggaacgcctcgtctacgaggtgcggcagaagtgcagaaacatcgaggacatctgcatctcctgcggatctctgaacgtgaccctggagcacccactgttcatcggcggcatgtgccagaactgtaaaaactgttttctggagtgtgcctatcaatacgacgatgacggctaccagagctactgcaccatctgttgcggcggaagagaggtgctgatgtgtggaaataacaactgctgccggtgcttctgcgtggaatgcgtggacctgctggtgggccccggcgccgcccaggccgctattaaggaagatccttggaactgctacatgtgcggccacaagggcacatacggcctgctgagacggagagaggactggcctagcagactgcagatgttcttcgccaataaccacgaccaggagttcgacccccctaaggtgtaccctcccgtccccgccgagaagagaaagcccatccgggtcctgagcctgttcgatggcatcgccaccggtctgctggtgctgaaggacctgggcatccaggtggataggtacattgcctccgaggtgtgcgaggactccatcaccgtgggaatggtgcgtcatcagggcaagatcatgtacgtgggcgacgtgcggagcgtgacacagaagcatatccaggagtggggccctttcgacctggtgatcggcggcagcccttgcaatgacctgagcatcgtgaacccagcccggaagggcctgtacgagggaaccggcagactgttcttcgagttttacagactgctgcacgacgcccggcctaaggaaggcgacgaccggcccttcttttggctgttcgagaatgtggtggccatgggagtcagcgacaagcgggatattagccggttcctggagagcaaccccgtgatgatcgatgccaaggaagtgagcgccgcccaccgggccagatacttctggggcaatctgcctggcatgaacagacccctggccagcaccgtgaacgacaagctggagctgcaggagtgcctggagcacggccggatcgccaagttcagcaaggtgagaaccatcaccacccgaagcaacagcatcaaacaaggcaaggaccagcactttcctgtgttcatgaacgagaaggaggacatcctgtggtgtaccgagatggagagagtgttcgggttcccagtccactacacagatgtcagcaacatgtctagactggccagacagagactgctgggaagaagctggtccgtccctgtgatcagacacctgttcgcccctctgaaggagtacttcgcctgcgtgagcagcggcaacagcaacgccaacagccggggccccagcttctctagcggcctggtgccactgtccctgagagggagccacatgggccccatggagatctacaaaaccgtgagcgcctggaagcggcagcctgtgcgcgtgctgagcctgtttcggaatatcgataaagtcctgaaaagcctgggattcctggagagcggctctggctccggcggtggcaccctgaagtacgtggaggatgtgacaaacgtggtcagacgggatgtggagaagtggggccccttcgatctggtgtacggcagcacccaacccctgggcagctcttgtgaccggtgccctggctggtacatgtttcagttccaccggatcctgcagtacgccctgccgagacaggagtcccagcggccattcttttggattttcatggacaacttgctgctgaccgaggatgaccaggaaactaccactcggttcctgcagaccgaagccgtgaccctgcaggacgtgagaggccgggactaccagaacgccatgcgggtgtggtccaacatccctggactgaaaagcaagcacgcacctctgacccctaaagaagaggagtacctgcaggcccaggtgcggagcagaagcaagctggacgcccctaaggtggatctgctggtgaagaattgcctcctgcccctgagagagtacttcaagtatttcagccagaatagtctgcccctgggaggcagcggcggcggcatggagctgctgaccttcaaggacgtggccatcgagttcagccccgaggagtggaagtgcctggacaccagccagcagaacctgtacagggacgtgatgctggagaactacaggaacctggtgagcctgggcgtgaccatcagcaaccccgacctggtgacctgcctggagcagaggaaggagccctacaacctgaagatccacgagaccgccgccaggccccccggccactacaggaagaggggcggcccaagcagcggcgcccctcctcccagcggcggcagcccagccggctccccaacctctaccgaggagggcacctctgagtccgccacccccgagagcggccctggcacctccaccgagcccagcgagggcagcgcacccggcagccctgccggcagccccacctccacagaggagggaaccagcaccgagcccagcgaaggcagcgccccaggcaccagcaccgagcctagtgagcaggagattaaacggatcaacaagatcagaagaagacttgtgaaagacagcaacaccaagaaggccggcaagacaggccccatgaaaaccctgctggttagagtgatgacacccgatctgagagagcggctggaaaacctgagaaagaagcctgaaaatatcccccagcccatcagcaatacatctagagccaacctgaataagctgctgaccgattacaccgaaatgaagaaggcgatcctgcatgtgtactgggaagagttccagaaggaccctgtgggcctgatgagccgggtggcccagcctgccagcaagaagatcgatcagaacaagctgaaacctgagatggacgagaagggcaacctgaccaccgccggctttgcctgctctcagtgtggccagcccctgttcgtgtacaagctggagcaggtgtctgagaagggcaaggcttacaccaactacttcggacggtgcaatgtggccgagcacgaaaagctgatcctgctggcccagctgaagcccgagaaggatagcgacgaagccgtgacatatagcctgggaaagtttgggcagagggccctggatttctacagcattcatgtgaccaaggagtccacccaccccgtgaagcccctggcccagatcgccggaaacagatacgcctccggacctgtgggaaaggccctgagcgacgcatgtatgggcacaatcgcctccttcctgtctaagtaccaggacatcatcatcgaacaccagaaggtggtgaagggcaaccagaagagactggagagcctgcgggagctggccggcaaggaaaacctggaataccctagcgtgaccctgccacctcagcctcacaccaaggagggcgttgatgcctacaacgaagtgatcgcccgggtgcgaatgtgggtgaacctgaacctgtggcagaagctgaagctaagcagagatgatgccaagcctctgctgagactgaagggattcccttcctttcctctggtcgagagacaggccaacgaagtggactggtgggacatggtgtgtaacgtgaagaagctgatcaacgagaaaaaggaggatggcaaggtgttttggcagaatctggctggctacaagagacaggaagccctgagaccatacctgagcagcgaggaagatcggaagaagggaaagaaattcgctcggtaccagctgggcgacctgctgctgcacctggaaaagaagcacggcgaggactggggaaaggtgtacgacgaggcctgggagcggattgacaagaaagtggaaggcctgagcaagcacatcaagctggaagaggaacggagaagcgaggacgcccagagcaaggccgccctgaccgactggctgcgggctaaggccagcttcgtgatcgagggcctgaaggaggccgacaaggacgagttctgcagatgcgagctgaagctgcagaagtggtacggggacctgcggggaaagcccttcgccatcgaagccgagaacagcatcctggacatcagcggcttcagcaagcagtacaactgtgccttcatctggcagaaggacggcgtgaagaagctgaacctgtacctgatcatcaactacttcaagggcggcaagctgcggttcaagaagatcaaacctgaagccttcgaagccaacagattctacaccgtgatcaacaaaaagagcggcgagatcgtgcccatggaggtgaacttcaacttcgacgaccccaacctgatcatcctgcctctggcctttggcaagagacagggcagagaattcatctggaacgacctgctgtccctggaaaccggcagcctgaagctggccaacggaagagtgatcgagaagacactgtacaacagaagaacccggcaggatgagcctgccctgttcgtggccctgaccttcgagcggcgggaggtcctggactcctccaatatcaaaccaatgaacctgatcggcgtggcaagaggcgaaaacatccccgccgtgatcgccctgaccgaccccgagggctgcccactgagccggtttaaggatagcctgggaaacccaacccacatcctgagaatcggcgagagctataaggagaagcagcggaccatccaggccaagaaggaggtggagcagcggagagccggcggctacagccggaagtacgccagcaaagccaagaatctggcagacgatatggtgagaaacaccgctagagatctgctgtactacgccgtgacccaggatgccatgctgatcttcgccaacctgagccggggcttcggccggcagggcaagcggaccttcatggccgagagacagtacacacggatggaggactggctgaccgccaagctggcctacgagggcctgagcaagacctacctgtccaagacactggcccagtacacctccaagacatgcagcaactgtgggtttaccatcaccagcgccgactacgacagggtgctggagaagctgaagaagacagcaacaggctggatgaccacaattaacggcaaggagctgaaggtggagggccagattacctactacaacagatacaagagacagaacgtagtcaaggacctgtccgtcgagctggatagactgagcgaagaatctgtgaacaacgacatctcctcctggacaaagggcagaagcggagaagctctgagcctcctgaagaaaagattctcccatagacccgtgcaggagaagttcgtgtgcctgaactgcggcttcgagacacacgcagccgagcaagccgccctgaacatcgccagatcctggctgttcctgcggagccaggagtacaagaaataccagacaaacaagacaaccggcaacaccgataagagagccttcgtcgagacctggcagtccttttaccggaagaagcttaaggaggtgtggaaacctgccgtgcggtctggcggatctggcggaggctccaccagccccaagaaaaagagaaaagtctaagctgccttctgcggggcttgccttctggccatgcccttcttctctcccttgcacctgtacctcttggtctttgaataaagcctgagtaggaaggctagcaaaaaaaaaaaaaaaaaaaaaaaaaaaaaaaaaaaaaaaaaaaaaaaaaaaaaaaaaaaaaaaaaaaaaaaaaaaaaaaa

SEQ ID NO: 13605 - RNA, 5785 nt, synthetic construct
  source 1..5785: mol_type = other RNA
aggaaataagagagaaaagaagagtaagaagaaatataagagccaccatggcccctaagaagaagcgtaaagtgagccggatggaacgcctcgtctacgaggtgcggcagaagtgcagaaacatcgaggacatctgcatctcctgcggatctctgaacgtgaccctggagcacccactgttcatcggcggcatgtgccagaactgtaaaaactgttttctggagtgtgcctatcaatacgacgatgacggctaccagagctactgcaccatctgttgcggcggaagagaggtgctgatgtgtggaaataacaactgctgccggtgcttctgcgtggaatgcgtggacctgctggtgggccccggcgccgcccaggccgctattaaggaagatccttggaactgctacatgtgcggccacaagggcacatacggcctgctgagacggagagaggactggcctagcagactgcagatgttcttcgccaataaccacgaccaggagttcgacccccctaaggtgtaccctcccgtccccgccgagaagagaaagcccatccgggtcctgagcctgttcgatggcatcgccaccggtctgctggtgctgaaggacctgggcatccaggtggataggtacattgcctccgaggtgtgcgaggactccatcaccgtgggaatggtgcgtcatcagggcaagatcatgtacgtgggcgacgtgcggagcgtgacacagaagcatatccaggagtggggccctttcgacctggtgatcggcggcagcccttgcaatgacctgagcatcgtgaacccagcccggaagggcctgtacgagggaaccggcagactgttcttcgagttttacagactgctgcacgacgcccggcctaaggaaggcgacgaccggcccttcttttggctgttcgagaatgtggtggccatgggagtcagcgacaagcgggatattagccggttcctggagagcaaccccgtgatgatcgatgccaaggaagtgagcgccgcccaccgggccagatacttctggggcaatctgcctggcatgaacagacccctggccagcaccgtgaacgacaagctggagctgcaggagtgcctggagcacggccggatcgccaagttcagcaaggtgagaaccatcaccacccgaagcaacagcatcaaacaaggcaaggaccagcactttcctgtgttcatgaacgagaaggaggacatcctgtggtgtaccgagatggagagagtgttcgggttcccagtccactacacagatgtcagcaacatgtctagactggccagacagagactgctgggaagaagctggtccgtccctgtgatcagacacctgttcgcccctctgaaggagtacttcgcctgcgtgagcagcggcaacagcaacgccaacagccggggccccagcttctctagcggcctggtgccactgtccctgagagggagccacatgggccccatggagatctacaaaaccgtgagcgcctggaagcggcagcctgtgcgcgtgctgagcctgtttcggaatatcgataaagtcctgaaaagcctgggattcctggagagcggctctggctccggcggtggcaccctgaagtacgtggaggatgtgacaaacgtggtcagacgggatgtggagaagtggggccccttcgatctggtgtacggcagcacccaacccctgggcagctcttgtgaccggtgccctggctggtacatgtttcagttccaccggatcctgcagtacgccctgccgagacaggagtcccagcggccattcttttggattttcatggacaacttgctgctgaccgaggatgaccaggaaactaccactcggttcctgcagaccgaagccgtgaccctgcaggacgtgagaggccgggactaccagaacgccatgcgggtgtggtccaacatccctggactgaaaagcaagcacgcacctctgacccctaaagaagaggagtacctgcaggcccaggtgcggagcagaagcaagctggacgcccctaaggtggatctgctggtgaagaattgcctcctgcccctgagagagtacttcaagtatttcagccagaatagtctgcccctgggaggcagcggcggcggcagccagggcagcgtgaccttcagggacgtggccatcgacttcagccaggaggagtggaagtggctgcagcccgcccagagggacctgtacaggtgcgtgatgctggagaactacggccacctggtgagcctgggcctgagcatcagcaagcccgacgtggtgagcctgctggagcagggcaaggagccctggctgggcaagaggaacgtgaacagggacctgttcagcgtgagcgagagcagcggcggcccaagcagcggcgcccctcctcccagcggcggcagcccagccggctccccaacctctaccgaggagggcacctctgagtccgccacccccgagagcggccctggcacctccaccgagcccagcgagggcagcgcacccggcagccctgccggcagccccacctccacagaggagggaaccagcaccgagcccagcgaaggcagcgccccaggcaccagcaccgagcctagtgagcaggagattaaacggatcaacaagatcagaagaagacttgtgaaagacagcaacaccaagaaggccggcaagacaggccccatgaaaaccctgctggttagagtgatgacacccgatctgagagagcggctggaaaacctgagaaagaagcctgaaaatatcccccagcccatcagcaatacatctagagccaacctgaataagctgctgaccgattacaccgaaatgaagaaggcgatcctgcatgtgtactgggaagagttccagaaggaccctgtgggcctgatgagccgggtggcccagcctgccagcaagaagatcgatcagaacaagctgaaacctgagatggacgagaagggcaacctgaccaccgccggctttgcctgctctcagtgtggccagcccctgttcgtgtacaagctggagcaggtgtctgagaagggcaaggcttacaccaactacttcggacggtgcaatgtggccgagcacgaaaagctgatcctgctggcccagctgaagcccgagaaggatagcgacgaagccgtgacatatagcctgggaaagtttgggcagagggccctggatttctacagcattcatgtgaccaaggagtccacccaccccgtgaagcccctggcccagatcgccggaaacagatacgcctccggacctgtgggaaaggccctgagcgacgcatgtatgggcacaatcgcctccttcctgtctaagtaccaggacatcatcatcgaacaccagaaggtggtgaagggcaaccagaagagactggagagcctgcgggagctggccggcaaggaaaacctggaataccctagcgtgaccctgccacctcagcctcacaccaaggagggcgttgatgcctacaacgaagtgatcgcccgggtgcgaatgtgggtgaacctgaacctgtggcagaagctgaagctaagcagagatgatgccaagcctctgctgagactgaagggattcccttcctttcctctggtcgagagacaggccaacgaagtggactggtgggacatggtgtgtaacgtgaagaagctgatcaacgagaaaaaggaggatggcaaggtgttttggcagaatctggctggctacaagagacaggaagccctgagaccatacctgagcagcgaggaagatcggaagaagggaaagaaattcgctcggtaccagctgggcgacctgctgctgcacctggaaaagaagcacggcgaggactggggaaaggtgtacgacgaggcctgggagcggattgacaagaaagtggaaggcctgagcaagcacatcaagctggaagaggaacggagaagcgaggacgcccagagcaaggccgccctgaccgactggctgcgggctaaggccagcttcgtgatcgagggcctgaaggaggccgacaaggacgagttctgcagatgcgagctgaagctgcagaagtggtacggggacctgcggggaaagcccttcgccatcgaagccgagaacagcatcctggacatcagcggcttcagcaagcagtacaactgtgccttcatctggcagaaggacggcgtgaagaagctgaacctgtacctgatcatcaactacttcaagggcggcaagctgcggttcaagaagatcaaacctgaagccttcgaagccaacagattctacaccgtgatcaacaaaaagagcggcgagatcgtgcccatggaggtgaacttcaacttcgacgaccccaacctgatcatcctgcctctggcctttggcaagagacagggcagagaattcatctggaacgacctgctgtccctggaaaccggcagcctgaagctggccaacggaagagtgatcgagaagacactgtacaacagaagaacccggcaggatgagcctgccctgttcgtggccctgaccttcgagcggcgggaggtcctggactcctccaatatcaaaccaatgaacctgatcggcgtggcaagaggcgaaaacatccccgccgtgatcgccctgaccgaccccgagggctgcccactgagccggtttaaggatagcctgggaaacccaacccacatcctgagaatcggcgagagctataaggagaagcagcggaccatccaggccaagaaggaggtggagcagcggagagccggcggctacagccggaagtacgccagcaaagccaagaatctggcagacgatatggtgagaaacaccgctagagatctgctgtactacgccgtgacccaggatgccatgctgatcttcgccaacctgagccggggcttcggccggcagggcaagcggaccttcatggccgagagacagtacacacggatggaggactggctgaccgccaagctggcctacgagggcctgagcaagacctacctgtccaagacactggcccagtacacctccaagacatgcagcaactgtgggtttaccatcaccagcgccgactacgacagggtgctggagaagctgaagaagacagcaacaggctggatgaccacaattaacggcaaggagctgaaggtggagggccagattacctactacaacagatacaagagacagaacgtagtcaaggacctgtccgtcgagctggatagactgagcgaagaatctgtgaacaacgacatctcctcctggacaaagggcagaagcggagaagctctgagcctcctgaagaaaagattctcccatagacccgtgcaggagaagttcgtgtgcctgaactgcggcttcgagacacacgcagccgagcaagccgccctgaacatcgccagatcctggctgttcctgcggagccaggagtacaagaaataccagacaaacaagacaaccggcaacaccgataagagagccttcgtcgagacctggcagtccttttaccggaagaagcttaaggaggtgtggaaacctgccgtgcggtctggcggatctggcggaggctccaccagccccaagaaaaagagaaaagtctaagctgccttctgcggggcttgccttctggccatgcccttcttctctcccttgcacctgtacctcttggtctttgaataaagcctgagtaggaaggctagcaaaaaaaaaaaaaaaaaaaaaaaaaaaaaaaaaaaaaaaaaaaaaaaaaaaaaaaaaaaaaaaaaaaaaaaaaaaaaaaa

SEQ ID NO: 13606 - RNA, 5785 nt, synthetic construct
  source 1..5785: mol_type = other RNA
aggaaataagagagaaaagaagagtaagaagaaatataagagccaccatggcccctaagaagaagcgtaaagtgagccggatggaacgcctcgtctacgaggtgcggcagaagtgcagaaacatcgaggacatctgcatctcctgcggatctctgaacgtgaccctggagcacccactgttcatcggcggcatgtgccagaactgtaaaaactgttttctggagtgtgcctatcaatacgacgatgacggctaccagagctactgcaccatctgttgcggcggaagagaggtgctgatgtgtggaaataacaactgctgccggtgcttctgcgtggaatgcgtggacctgctggtgggccccggcgccgcccaggccgctattaaggaagatccttggaactgctacatgtgcggccacaagggcacatacggcctgctgagacggagagaggactggcctagcagactgcagatgttcttcgccaataaccacgaccaggagttcgacccccctaaggtgtaccctcccgtccccgccgagaagagaaagcccatccgggtcctgagcctgttcgatggcatcgccaccggtctgctggtgctgaaggacctgggcatccaggtggataggtacattgcctccgaggtgtgcgaggactccatcaccgtgggaatggtgcgtcatcagggcaagatcatgtacgtgggcgacgtgcggagcgtgacacagaagcatatccaggagtggggccctttcgacctggtgatcggcggcagcccttgcaatgacctgagcatcgtgaacccagcccggaagggcctgtacgagggaaccggcagactgttcttcgagttttacagactgctgcacgacgcccggcctaaggaaggcgacgaccggcccttcttttggctgttcgagaatgtggtggccatgggagtcagcgacaagcgggatattagccggttcctggagagcaaccccgtgatgatcgatgccaaggaagtgagcgccgcccaccgggccagatacttctggggcaatctgcctggcatgaacagacccctggccagcaccgtgaacgacaagctggagctgcaggagtgcctggagcacggccggatcgccaagttcagcaaggtgagaaccatcaccacccgaagcaacagcatcaaacaaggcaaggaccagcactttcctgtgttcatgaacgagaaggaggacatcctgtggtgtaccgagatggagagagtgttcgggttcccagtccactacacagatgtcagcaacatgtctagactggccagacagagactgctgggaagaagctggtccgtccctgtgatcagacacctgttcgcccctctgaaggagtacttcgcctgcgtgagcagcggcaacagcaacgccaacagccggggccccagcttctctagcggcctggtgccactgtccctgagagggagccacatgggccccatggagatctacaaaaccgtgagcgcctggaagcggcagcctgtgcgcgtgctgagcctgtttcggaatatcgataaagtcctgaaaagcctgggattcctggagagcggctctggctccggcggtggcaccctgaagtacgtggaggatgtgacaaacgtggtcagacgggatgtggagaagtggggccccttcgatctggtgtacggcagcacccaacccctgggcagctcttgtgaccggtgccctggctggtacatgtttcagttccaccggatcctgcagtacgccctgccgagacaggagtcccagcggccattcttttggattttcatggacaacttgctgctgaccgaggatgaccaggaaactaccactcggttcctgcagaccgaagccgtgaccctgcaggacgtgagaggccgggactaccagaacgccatgcgggtgtggtccaacatccctggactgaaaagcaagcacgcacctctgacccctaaagaagaggagtacctgcaggcccaggtgcggagcagaagcaagctggacgcccctaaggtggatctgctggtgaagaattgcctcctgcccctgagagagtacttcaagtatttcagccagaatagtctgcccctgggaggcagcggcggcggcatgaacatggagggcctggtgatgttccaggacctgttcatccacttcagccaggaggagtgggagtgcctggacgccgcccagaaggacctgtacagggacgtgatgatggagaactacagcagcctggtgagcctgggcctgtgcatccccaagcccgacgtgatcagcctgctggagcagggcaaggagccctggatggtgagcagggacgtgctgggcggctggtgccccgacagcgagggcggcccaagcagcggcgcccctcctcccagcggcggcagcccagccggctccccaacctctaccgaggagggcacctctgagtccgccacccccgagagcggccctggcacctccaccgagcccagcgagggcagcgcacccggcagccctgccggcagccccacctccacagaggagggaaccagcaccgagcccagcgaaggcagcgccccaggcaccagcaccgagcctagtgagcaggagattaaacggatcaacaagatcagaagaagacttgtgaaagacagcaacaccaagaaggccggcaagacaggccccatgaaaaccctgctggttagagtgatgacacccgatctgagagagcggctggaaaacctgagaaagaagcctgaaaatatcccccagcccatcagcaatacatctagagccaacctgaataagctgctgaccgattacaccgaaatgaagaaggcgatcctgcatgtgtactgggaagagttccagaaggaccctgtgggcctgatgagccgggtggcccagcctgccagcaagaagatcgatcagaacaagctgaaacctgagatggacgagaagggcaacctgaccaccgccggctttgcctgctctcagtgtggccagcccctgttcgtgtacaagctggagcaggtgtctgagaagggcaaggcttacaccaactacttcggacggtgcaatgtggccgagcacgaaaagctgatcctgctggcccagctgaagcccgagaaggatagcgacgaagccgtgacatatagcctgggaaagtttgggcagagggccctggatttctacagcattcatgtgaccaaggagtccacccaccccgtgaagcccctggcccagatcgccggaaacagatacgcctccggacctgtgggaaaggccctgagcgacgcatgtatgggcacaatcgcctccttcctgtctaagtaccaggacatcatcatcgaacaccagaaggtggtgaagggcaaccagaagagactggagagcctgcgggagctggccggcaaggaaaacctggaataccctagcgtgaccctgccacctcagcctcacaccaaggagggcgttgatgcctacaacgaagtgatcgcccgggtgcgaatgtgggtgaacctgaacctgtggcagaagctgaagctaagcagagatgatgccaagcctctgctgagactgaagggattcccttcctttcctctggtcgagagacaggccaacgaagtggactggtgggacatggtgtgtaacgtgaagaagctgatcaacgagaaaaaggaggatggcaaggtgttttggcagaatctggctggctacaagagacaggaagccctgagaccatacctgagcagcgaggaagatcggaagaagggaaagaaattcgctcggtaccagctgggcgacctgctgctgcacctggaaaagaagcacggcgaggactggggaaaggtgtacgacgaggcctgggagcggattgacaagaaagtggaaggcctgagcaagcacatcaagctggaagaggaacggagaagcgaggacgcccagagcaaggccgccctgaccgactggctgcgggctaaggccagcttcgtgatcgagggcctgaaggaggccgacaaggacgagttctgcagatgcgagctgaagctgcagaagtggtacggggacctgcggggaaagcccttcgccatcgaagccgagaacagcatcctggacatcagcggcttcagcaagcagtacaactgtgccttcatctggcagaaggacggcgtgaagaagctgaacctgtacctgatcatcaactacttcaagggcggcaagctgcggttcaagaagatcaaacctgaagccttcgaagccaacagattctacaccgtgatcaacaaaaagagcggcgagatcgtgcccatggaggtgaacttcaacttcgacgaccccaacctgatcatcctgcctctggcctttggcaagagacagggcagagaattcatctggaacgacctgctgtccctggaaaccggcagcctgaagctggccaacggaagagtgatcgagaagacactgtacaacagaagaacccggcaggatgagcctgccctgttcgtggccctgaccttcgagcggcgggaggtcctggactcctccaatatcaaaccaatgaacctgatcggcgtggcaagaggcgaaaacatccccgccgtgatcgccctgaccgaccccgagggctgcccactgagccggtttaaggatagcctgggaaacccaacccacatcctgagaatcggcgagagctataaggagaagcagcggaccatccaggccaagaaggaggtggagcagcggagagccggcggctacagccggaagtacgccagcaaagccaagaatctggcagacgatatggtgagaaacaccgctagagatctgctgtactacgccgtgacccaggatgccatgctgatcttcgccaacctgagccggggcttcggccggcagggcaagcggaccttcatggccgagagacagtacacacggatggaggactggctgaccgccaagctggcctacgagggcctgagcaagacctacctgtccaagacactggcccagtacacctccaagacatgcagcaactgtgggtttaccatcaccagcgccgactacgacagggtgctggagaagctgaagaagacagcaacaggctggatgaccacaattaacggcaaggagctgaaggtggagggccagattacctactacaacagatacaagagacagaacgtagtcaaggacctgtccgtcgagctggatagactgagcgaagaatctgtgaacaacgacatctcctcctggacaaagggcagaagcggagaagctctgagcctcctgaagaaaagattctcccatagacccgtgcaggagaagttcgtgtgcctgaactgcggcttcgagacacacgcagccgagcaagccgccctgaacatcgccagatcctggctgttcctgcggagccaggagtacaagaaataccagacaaacaagacaaccggcaacaccgataagagagccttcgtcgagacctggcagtccttttaccggaagaagcttaaggaggtgtggaaacctgccgtgcggtctggcggatctggcggaggctccaccagccccaagaaaaagagaaaagtctaagctgccttctgcggggcttgccttctggccatgcccttcttctctcccttgcacctgtacctcttggtctttgaataaagcctgagtaggaaggctagcaaaaaaaaaaaaaaaaaaaaaaaaaaaaaaaaaaaaaaaaaaaaaaaaaaaaaaaaaaaaaaaaaaaaaaaaaaaaaaaa

SEQ ID NO: 13607 - RNA, 5785 nt, synthetic construct
  source 1..5785: mol_type = other RNA
aggaaataagagagaaaagaagagtaagaagaaatataagagccaccatggcccctaagaagaagcgtaaagtgagccggatggaacgcctcgtctacgaggtgcggcagaagtgcagaaacatcgaggacatctgcatctcctgcggatctctgaacgtgaccctggagcacccactgttcatcggcggcatgtgccagaactgtaaaaactgttttctggagtgtgcctatcaatacgacgatgacggctaccagagctactgcaccatctgttgcggcggaagagaggtgctgatgtgtggaaataacaactgctgccggtgcttctgcgtggaatgcgtggacctgctggtgggccccggcgccgcccaggccgctattaaggaagatccttggaactgctacatgtgcggccacaagggcacatacggcctgctgagacggagagaggactggcctagcagactgcagatgttcttcgccaataaccacgaccaggagttcgacccccctaaggtgtaccctcccgtccccgccgagaagagaaagcccatccgggtcctgagcctgttcgatggcatcgccaccggtctgctggtgctgaaggacctgggcatccaggtggataggtacattgcctccgaggtgtgcgaggactccatcaccgtgggaatggtgcgtcatcagggcaagatcatgtacgtgggcgacgtgcggagcgtgacacagaagcatatccaggagtggggccctttcgacctggtgatcggcggcagcccttgcaatgacctgagcatcgtgaacccagcccggaagggcctgtacgagggaaccggcagactgttcttcgagttttacagactgctgcacgacgcccggcctaaggaaggcgacgaccggcccttcttttggctgttcgagaatgtggtggccatgggagtcagcgacaagcgggatattagccggttcctggagagcaaccccgtgatgatcgatgccaaggaagtgagcgccgcccaccgggccagatacttctggggcaatctgcctggcatgaacagacccctggccagcaccgtgaacgacaagctggagctgcaggagtgcctggagcacggccggatcgccaagttcagcaaggtgagaaccatcaccacccgaagcaacagcatcaaacaaggcaaggaccagcactttcctgtgttcatgaacgagaaggaggacatcctgtggtgtaccgagatggagagagtgttcgggttcccagtccactacacagatgtcagcaacatgtctagactggccagacagagactgctgggaagaagctggtccgtccctgtgatcagacacctgttcgcccctctgaaggagtacttcgcctgcgtgagcagcggcaacagcaacgccaacagccggggccccagcttctctagcggcctggtgccactgtccctgagagggagccacatgggccccatggagatctacaaaaccgtgagcgcctggaagcggcagcctgtgcgcgtgctgagcctgtttcggaatatcgataaagtcctgaaaagcctgggattcctggagagcggctctggctccggcggtggcaccctgaagtacgtggaggatgtgacaaacgtggtcagacgggatgtggagaagtggggccccttcgatctggtgtacggcagcacccaacccctgggcagctcttgtgaccggtgccctggctggtacatgtttcagttccaccggatcctgcagtacgccctgccgagacaggagtcccagcggccattcttttggattttcatggacaacttgctgctgaccgaggatgaccaggaaactaccactcggttcctgcagaccgaagccgtgaccctgcaggacgtgagaggccgggactaccagaacgccatgcgggtgtggtccaacatccctggactgaaaagcaagcacgcacctctgacccctaaagaagaggagtacctgcaggcccaggtgcggagcagaagcaagctggacgcccctaaggtggatctgctggtgaagaattgcctcctgcccctgagagagtacttcaagtatttcagccagaatagtctgcccctgggaggcagcggcggcggccagcagatgcaggtgaccttcgaggacgtggccgtgagcttcagccaggaggagtgggagtacctggacgagggccagaaggagctgtacagggaggtgatgaaggagaactacgagaccgtggtgagcctgggcagccccgccagcacccccaagatcatcagctgcatcgagtgcggcgaggaggcctacatcaggggcgagcccggcagcgagggcagggagaccggcaagagcagctgcggcggcccaagcagcggcgcccctcctcccagcggcggcagcccagccggctccccaacctctaccgaggagggcacctctgagtccgccacccccgagagcggccctggcacctccaccgagcccagcgagggcagcgcacccggcagccctgccggcagccccacctccacagaggagggaaccagcaccgagcccagcgaaggcagcgccccaggcaccagcaccgagcctagtgagcaggagattaaacggatcaacaagatcagaagaagacttgtgaaagacagcaacaccaagaaggccggcaagacaggccccatgaaaaccctgctggttagagtgatgacacccgatctgagagagcggctggaaaacctgagaaagaagcctgaaaatatcccccagcccatcagcaatacatctagagccaacctgaataagctgctgaccgattacaccgaaatgaagaaggcgatcctgcatgtgtactgggaagagttccagaaggaccctgtgggcctgatgagccgggtggcccagcctgccagcaagaagatcgatcagaacaagctgaaacctgagatggacgagaagggcaacctgaccaccgccggctttgcctgctctcagtgtggccagcccctgttcgtgtacaagctggagcaggtgtctgagaagggcaaggcttacaccaactacttcggacggtgcaatgtggccgagcacgaaaagctgatcctgctggcccagctgaagcccgagaaggatagcgacgaagccgtgacatatagcctgggaaagtttgggcagagggccctggatttctacagcattcatgtgaccaaggagtccacccaccccgtgaagcccctggcccagatcgccggaaacagatacgcctccggacctgtgggaaaggccctgagcgacgcatgtatgggcacaatcgcctccttcctgtctaagtaccaggacatcatcatcgaacaccagaaggtggtgaagggcaaccagaagagactggagagcctgcgggagctggccggcaaggaaaacctggaataccctagcgtgaccctgccacctcagcctcacaccaaggagggcgttgatgcctacaacgaagtgatcgcccgggtgcgaatgtgggtgaacctgaacctgtggcagaagctgaagctaagcagagatgatgccaagcctctgctgagactgaagggattcccttcctttcctctggtcgagagacaggccaacgaagtggactggtgggacatggtgtgtaacgtgaagaagctgatcaacgagaaaaaggaggatggcaaggtgttttggcagaatctggctggctacaagagacaggaagccctgagaccatacctgagcagcgaggaagatcggaagaagggaaagaaattcgctcggtaccagctgggcgacctgctgctgcacctggaaaagaagcacggcgaggactggggaaaggtgtacgacgaggcctgggagcggattgacaagaaagtggaaggcctgagcaagcacatcaagctggaagaggaacggagaagcgaggacgcccagagcaaggccgccctgaccgactggctgcgggctaaggccagcttcgtgatcgagggcctgaaggaggccgacaaggacgagttctgcagatgcgagctgaagctgcagaagtggtacggggacctgcggggaaagcccttcgccatcgaagccgagaacagcatcctggacatcagcggcttcagcaagcagtacaactgtgccttcatctggcagaaggacggcgtgaagaagctgaacctgtacctgatcatcaactacttcaagggcggcaagctgcggttcaagaagatcaaacctgaagccttcgaagccaacagattctacaccgtgatcaacaaaaagagcggcgagatcgtgcccatggaggtgaacttcaacttcgacgaccccaacctgatcatcctgcctctggcctttggcaagagacagggcagagaattcatctggaacgacctgctgtccctggaaaccggcagcctgaagctggccaacggaagagtgatcgagaagacactgtacaacagaagaacccggcaggatgagcctgccctgttcgtggccctgaccttcgagcggcgggaggtcctggactcctccaatatcaaaccaatgaacctgatcggcgtggcaagaggcgaaaacatccccgccgtgatcgccctgaccgaccccgagggctgcccactgagccggtttaaggatagcctgggaaacccaacccacatcctgagaatcggcgagagctataaggagaagcagcggaccatccaggccaagaaggaggtggagcagcggagagccggcggctacagccggaagtacgccagcaaagccaagaatctggcagacgatatggtgagaaacaccgctagagatctgctgtactacgccgtgacccaggatgccatgctgatcttcgccaacctgagccggggcttcggccggcagggcaagcggaccttcatggccgagagacagtacacacggatggaggactggctgaccgccaagctggcctacgagggcctgagcaagacctacctgtccaagacactggcccagtacacctccaagacatgcagcaactgtgggtttaccatcaccagcgccgactacgacagggtgctggagaagctgaagaagacagcaacaggctggatgaccacaattaacggcaaggagctgaaggtggagggccagattacctactacaacagatacaagagacagaacgtagtcaaggacctgtccgtcgagctggatagactgagcgaagaatctgtgaacaacgacatctcctcctggacaaagggcagaagcggagaagctctgagcctcctgaagaaaagattctcccatagacccgtgcaggagaagttcgtgtgcctgaactgcggcttcgagacacacgcagccgagcaagccgccctgaacatcgccagatcctggctgttcctgcggagccaggagtacaagaaataccagacaaacaagacaaccggcaacaccgataagagagccttcgtcgagacctggcagtccttttaccggaagaagcttaaggaggtgtggaaacctgccgtgcggtctggcggatctggcggaggctccaccagccccaagaaaaagagaaaagtctaagctgccttctgcggggcttgccttctggccatgcccttcttctctcccttgcacctgtacctcttggtctttgaataaagcctgagtaggaaggctagcaaaaaaaaaaaaaaaaaaaaaaaaaaaaaaaaaaaaaaaaaaaaaaaaaaaaaaaaaaaaaaaaaaaaaaaaaaaaaaaa

SEQ ID NO: 13608 - RNA, 5785 nt, synthetic construct
  source 1..5785: mol_type = other RNA
aggaaataagagagaaaagaagagtaagaagaaatataagagccaccatggcccctaagaagaagcgtaaagtgagccggatggaacgcctcgtctacgaggtgcggcagaagtgcagaaacatcgaggacatctgcatctcctgcggatctctgaacgtgaccctggagcacccactgttcatcggcggcatgtgccagaactgtaaaaactgttttctggagtgtgcctatcaatacgacgatgacggctaccagagctactgcaccatctgttgcggcggaagagaggtgctgatgtgtggaaataacaactgctgccggtgcttctgcgtggaatgcgtggacctgctggtgggccccggcgccgcccaggccgctattaaggaagatccttggaactgctacatgtgcggccacaagggcacatacggcctgctgagacggagagaggactggcctagcagactgcagatgttcttcgccaataaccacgaccaggagttcgacccccctaaggtgtaccctcccgtccccgccgagaagagaaagcccatccgggtcctgagcctgttcgatggcatcgccaccggtctgctggtgctgaaggacctgggcatccaggtggataggtacattgcctccgaggtgtgcgaggactccatcaccgtgggaatggtgcgtcatcagggcaagatcatgtacgtgggcgacgtgcggagcgtgacacagaagcatatccaggagtggggccctttcgacctggtgatcggcggcagcccttgcaatgacctgagcatcgtgaacccagcccggaagggcctgtacgagggaaccggcagactgttcttcgagttttacagactgctgcacgacgcccggcctaaggaaggcgacgaccggcccttcttttggctgttcgagaatgtggtggccatgggagtcagcgacaagcgggatattagccggttcctggagagcaaccccgtgatgatcgatgccaaggaagtgagcgccgcccaccgggccagatacttctggggcaatctgcctggcatgaacagacccctggccagcaccgtgaacgacaagctggagctgcaggagtgcctggagcacggccggatcgccaagttcagcaaggtgagaaccatcaccacccgaagcaacagcatcaaacaaggcaaggaccagcactttcctgtgttcatgaacgagaaggaggacatcctgtggtgtaccgagatggagagagtgttcgggttcccagtccactacacagatgtcagcaacatgtctagactggccagacagagactgctgggaagaagctggtccgtccctgtgatcagacacctgttcgcccctctgaaggagtacttcgcctgcgtgagcagcggcaacagcaacgccaacagccggggccccagcttctctagcggcctggtgccactgtccctgagagggagccacatgggccccatggagatctacaaaaccgtgagcgcctggaagcggcagcctgtgcgcgtgctgagcctgtttcggaatatcgataaagtcctgaaaagcctgggattcctggagagcggctctggctccggcggtggcaccctgaagtacgtggaggatgtgacaaacgtggtcagacgggatgtggagaagtggggccccttcgatctggtgtacggcagcacccaacccctgggcagctcttgtgaccggtgccctggctggtacatgtttcagttccaccggatcctgcagtacgccctgccgagacaggagtcccagcggccattcttttggattttcatggacaacttgctgctgaccgaggatgaccaggaaactaccactcggttcctgcagaccgaagccgtgaccctgcaggacgtgagaggccgggactaccagaacgccatgcgggtgtggtccaacatccctggactgaaaagcaagcacgcacctctgacccctaaagaagaggagtacctgcaggcccaggtgcggagcagaagcaagctggacgcccctaaggtggatctgctggtgaagaattgcctcctgcccctgagagagtacttcaagtatttcagccagaatagtctgcccctgggaggcagcggcggcggcagccagggccccgtgctgttcgaggacgtgagcgtggacttcacccagaaggagtggcagctgctggaccccgcccagaggaggctgtacagggacgtgatgctggagaactacaggcacctggagagcctgggccactgcgtgaccaagcccgagctgatcaggaggctggagcagggcgaggagccctggatcctgaagagggaggtgcccagccacagccacgccgaggtgcagagggccggcggcccaagcagcggcgcccctcctcccagcggcggcagcccagccggctccccaacctctaccgaggagggcacctctgagtccgccacccccgagagcggccctggcacctccaccgagcccagcgagggcagcgcacccggcagccctgccggcagccccacctccacagaggagggaaccagcaccgagcccagcgaaggcagcgccccaggcaccagcaccgagcctagtgagcaggagattaaacggatcaacaagatcagaagaagacttgtgaaagacagcaacaccaagaaggccggcaagacaggccccatgaaaaccctgctggttagagtgatgacacccgatctgagagagcggctggaaaacctgagaaagaagcctgaaaatatcccccagcccatcagcaatacatctagagccaacctgaataagctgctgaccgattacaccgaaatgaagaaggcgatcctgcatgtgtactgggaagagttccagaaggaccctgtgggcctgatgagccgggtggcccagcctgccagcaagaagatcgatcagaacaagctgaaacctgagatggacgagaagggcaacctgaccaccgccggctttgcctgctctcagtgtggccagcccctgttcgtgtacaagctggagcaggtgtctgagaagggcaaggcttacaccaactacttcggacggtgcaatgtggccgagcacgaaaagctgatcctgctggcccagctgaagcccgagaaggatagcgacgaagccgtgacatatagcctgggaaagtttgggcagagggccctggatttctacagcattcatgtgaccaaggagtccacccaccccgtgaagcccctggcccagatcgccggaaacagatacgcctccggacctgtgggaaaggccctgagcgacgcatgtatgggcacaatcgcctccttcctgtctaagtaccaggacatcatcatcgaacaccagaaggtggtgaagggcaaccagaagagactggagagcctgcgggagctggccggcaaggaaaacctggaataccctagcgtgaccctgccacctcagcctcacaccaaggagggcgttgatgcctacaacgaagtgatcgcccgggtgcgaatgtgggtgaacctgaacctgtggcagaagctgaagctaagcagagatgatgccaagcctctgctgagactgaagggattcccttcctttcctctggtcgagagacaggccaacgaagtggactggtgggacatggtgtgtaacgtgaagaagctgatcaacgagaaaaaggaggatggcaaggtgttttggcagaatctggctggctacaagagacaggaagccctgagaccatacctgagcagcgaggaagatcggaagaagggaaagaaattcgctcggtaccagctgggcgacctgctgctgcacctggaaaagaagcacggcgaggactggggaaaggtgtacgacgaggcctgggagcggattgacaagaaagtggaaggcctgagcaagcacatcaagctggaagaggaacggagaagcgaggacgcccagagcaaggccgccctgaccgactggctgcgggctaaggccagcttcgtgatcgagggcctgaaggaggccgacaaggacgagttctgcagatgcgagctgaagctgcagaagtggtacggggacctgcggggaaagcccttcgccatcgaagccgagaacagcatcctggacatcagcggcttcagcaagcagtacaactgtgccttcatctggcagaaggacggcgtgaagaagctgaacctgtacctgatcatcaactacttcaagggcggcaagctgcggttcaagaagatcaaacctgaagccttcgaagccaacagattctacaccgtgatcaacaaaaagagcggcgagatcgtgcccatggaggtgaacttcaacttcgacgaccccaacctgatcatcctgcctctggcctttggcaagagacagggcagagaattcatctggaacgacctgctgtccctggaaaccggcagcctgaagctggccaacggaagagtgatcgagaagacactgtacaacagaagaacccggcaggatgagcctgccctgttcgtggccctgaccttcgagcggcgggaggtcctggactcctccaatatcaaaccaatgaacctgatcggcgtggcaagaggcgaaaacatccccgccgtgatcgccctgaccgaccccgagggctgcccactgagccggtttaaggatagcctgggaaacccaacccacatcctgagaatcggcgagagctataaggagaagcagcggaccatccaggccaagaaggaggtggagcagcggagagccggcggctacagccggaagtacgccagcaaagccaagaatctggcagacgatatggtgagaaacaccgctagagatctgctgtactacgccgtgacccaggatgccatgctgatcttcgccaacctgagccggggcttcggccggcagggcaagcggaccttcatggccgagagacagtacacacggatggaggactggctgaccgccaagctggcctacgagggcctgagcaagacctacctgtccaagacactggcccagtacacctccaagacatgcagcaactgtgggtttaccatcaccagcgccgactacgacagggtgctggagaagctgaagaagacagcaacaggctggatgaccacaattaacggcaaggagctgaaggtggagggccagattacctactacaacagatacaagagacagaacgtagtcaaggacctgtccgtcgagctggatagactgagcgaagaatctgtgaacaacgacatctcctcctggacaaagggcagaagcggagaagctctgagcctcctgaagaaaagattctcccatagacccgtgcaggagaagttcgtgtgcctgaactgcggcttcgagacacacgcagccgagcaagccgccctgaacatcgccagatcctggctgttcctgcggagccaggagtacaagaaataccagacaaacaagacaaccggcaacaccgataagagagccttcgtcgagacctggcagtccttttaccggaagaagcttaaggaggtgtggaaacctgccgtgcggtctggcggatctggcggaggctccaccagccccaagaaaaagagaaaagtctaagctgccttctgcggggcttgccttctggccatgcccttcttctctcccttgcacctgtacctcttggtctttgaataaagcctgagtaggaaggctagcaaaaaaaaaaaaaaaaaaaaaaaaaaaaaaaaaaaaaaaaaaaaaaaaaaaaaaaaaaaaaaaaaaaaaaaaaaaaaaaa

SEQ ID NO: 13609 - RNA, 5785 nt, synthetic construct
  source 1..5785: mol_type = other RNA
aggaaataagagagaaaagaagagtaagaagaaatataagagccaccatggcccctaagaagaagcgtaaagtgagccggatggaacgcctcgtctacgaggtgcggcagaagtgcagaaacatcgaggacatctgcatctcctgcggatctctgaacgtgaccctggagcacccactgttcatcggcggcatgtgccagaactgtaaaaactgttttctggagtgtgcctatcaatacgacgatgacggctaccagagctactgcaccatctgttgcggcggaagagaggtgctgatgtgtggaaataacaactgctgccggtgcttctgcgtggaatgcgtggacctgctggtgggccccggcgccgcccaggccgctattaaggaagatccttggaactgctacatgtgcggccacaagggcacatacggcctgctgagacggagagaggactggcctagcagactgcagatgttcttcgccaataaccacgaccaggagttcgacccccctaaggtgtaccctcccgtccccgccgagaagagaaagcccatccgggtcctgagcctgttcgatggcatcgccaccggtctgctggtgctgaaggacctgggcatccaggtggataggtacattgcctccgaggtgtgcgaggactccatcaccgtgggaatggtgcgtcatcagggcaagatcatgtacgtgggcgacgtgcggagcgtgacacagaagcatatccaggagtggggccctttcgacctggtgatcggcggcagcccttgcaatgacctgagcatcgtgaacccagcccggaagggcctgtacgagggaaccggcagactgttcttcgagttttacagactgctgcacgacgcccggcctaaggaaggcgacgaccggcccttcttttggctgttcgagaatgtggtggccatgggagtcagcgacaagcgggatattagccggttcctggagagcaaccccgtgatgatcgatgccaaggaagtgagcgccgcccaccgggccagatacttctggggcaatctgcctggcatgaacagacccctggccagcaccgtgaacgacaagctggagctgcaggagtgcctggagcacggccggatcgccaagttcagcaaggtgagaaccatcaccacccgaagcaacagcatcaaacaaggcaaggaccagcactttcctgtgttcatgaacgagaaggaggacatcctgtggtgtaccgagatggagagagtgttcgggttcccagtccactacacagatgtcagcaacatgtctagactggccagacagagactgctgggaagaagctggtccgtccctgtgatcagacacctgttcgcccctctgaaggagtacttcgcctgcgtgagcagcggcaacagcaacgccaacagccggggccccagcttctctagcggcctggtgccactgtccctgagagggagccacatgggccccatggagatctacaaaaccgtgagcgcctggaagcggcagcctgtgcgcgtgctgagcctgtttcggaatatcgataaagtcctgaaaagcctgggattcctggagagcggctctggctccggcggtggcaccctgaagtacgtggaggatgtgacaaacgtggtcagacgggatgtggagaagtggggccccttcgatctggtgtacggcagcacccaacccctgggcagctcttgtgaccggtgccctggctggtacatgtttcagttccaccggatcctgcagtacgccctgccgagacaggagtcccagcggccattcttttggattttcatggacaacttgctgctgaccgaggatgaccaggaaactaccactcggttcctgcagaccgaagccgtgaccctgcaggacgtgagaggccgggactaccagaacgccatgcgggtgtggtccaacatccctggactgaaaagcaagcacgcacctctgacccctaaagaagaggagtacctgcaggcccaggtgcggagcagaagcaagctggacgcccctaaggtggatctgctggtgaagaattgcctcctgcccctgagagagtacttcaagtatttcagccagaatagtctgcccctgggaggcagcggcggcggcgtgaccgagctgctgaccttcaaggacatcagcgtggacttcacccaggaggagtggggccagctggcccccgcccacaggaacctgtacagggaggtgatgctggagaactacggcaacctggtgagcgtggccggctgccagctgagcaagcccagcgtgatcagccagctggagaagggcgaggagccctggatgaccgagaaggagggcgccggcgaccccagcagcgacctgaagagcggcggcccaagcagcggcgcccctcctcccagcggcggcagcccagccggctccccaacctctaccgaggagggcacctctgagtccgccacccccgagagcggccctggcacctccaccgagcccagcgagggcagcgcacccggcagccctgccggcagccccacctccacagaggagggaaccagcaccgagcccagcgaaggcagcgccccaggcaccagcaccgagcctagtgagcaggagattaaacggatcaacaagatcagaagaagacttgtgaaagacagcaacaccaagaaggccggcaagacaggccccatgaaaaccctgctggttagagtgatgacacccgatctgagagagcggctggaaaacctgagaaagaagcctgaaaatatcccccagcccatcagcaatacatctagagccaacctgaataagctgctgaccgattacaccgaaatgaagaaggcgatcctgcatgtgtactgggaagagttccagaaggaccctgtgggcctgatgagccgggtggcccagcctgccagcaagaagatcgatcagaacaagctgaaacctgagatggacgagaagggcaacctgaccaccgccggctttgcctgctctcagtgtggccagcccctgttcgtgtacaagctggagcaggtgtctgagaagggcaaggcttacaccaactacttcggacggtgcaatgtggccgagcacgaaaagctgatcctgctggcccagctgaagcccgagaaggatagcgacgaagccgtgacatatagcctgggaaagtttgggcagagggccctggatttctacagcattcatgtgaccaaggagtccacccaccccgtgaagcccctggcccagatcgccggaaacagatacgcctccggacctgtgggaaaggccctgagcgacgcatgtatgggcacaatcgcctccttcctgtctaagtaccaggacatcatcatcgaacaccagaaggtggtgaagggcaaccagaagagactggagagcctgcgggagctggccggcaaggaaaacctggaataccctagcgtgaccctgccacctcagcctcacaccaaggagggcgttgatgcctacaacgaagtgatcgcccgggtgcgaatgtgggtgaacctgaacctgtggcagaagctgaagctaagcagagatgatgccaagcctctgctgagactgaagggattcccttcctttcctctggtcgagagacaggccaacgaagtggactggtgggacatggtgtgtaacgtgaagaagctgatcaacgagaaaaaggaggatggcaaggtgttttggcagaatctggctggctacaagagacaggaagccctgagaccatacctgagcagcgaggaagatcggaagaagggaaagaaattcgctcggtaccagctgggcgacctgctgctgcacctggaaaagaagcacggcgaggactggggaaaggtgtacgacgaggcctgggagcggattgacaagaaagtggaaggcctgagcaagcacatcaagctggaagaggaacggagaagcgaggacgcccagagcaaggccgccctgaccgactggctgcgggctaaggccagcttcgtgatcgagggcctgaaggaggccgacaaggacgagttctgcagatgcgagctgaagctgcagaagtggtacggggacctgcggggaaagcccttcgccatcgaagccgagaacagcatcctggacatcagcggcttcagcaagcagtacaactgtgccttcatctggcagaaggacggcgtgaagaagctgaacctgtacctgatcatcaactacttcaagggcggcaagctgcggttcaagaagatcaaacctgaagccttcgaagccaacagattctacaccgtgatcaacaaaaagagcggcgagatcgtgcccatggaggtgaacttcaacttcgacgaccccaacctgatcatcctgcctctggcctttggcaagagacagggcagagaattcatctggaacgacctgctgtccctggaaaccggcagcctgaagctggccaacggaagagtgatcgagaagacactgtacaacagaagaacccggcaggatgagcctgccctgttcgtggccctgaccttcgagcggcgggaggtcctggactcctccaatatcaaaccaatgaacctgatcggcgtggcaagaggcgaaaacatccccgccgtgatcgccctgaccgaccccgagggctgcccactgagccggtttaaggatagcctgggaaacccaacccacatcctgagaatcggcgagagctataaggagaagcagcggaccatccaggccaagaaggaggtggagcagcggagagccggcggctacagccggaagtacgccagcaaagccaagaatctggcagacgatatggtgagaaacaccgctagagatctgctgtactacgccgtgacccaggatgccatgctgatcttcgccaacctgagccggggcttcggccggcagggcaagcggaccttcatggccgagagacagtacacacggatggaggactggctgaccgccaagctggcctacgagggcctgagcaagacctacctgtccaagacactggcccagtacacctccaagacatgcagcaactgtgggtttaccatcaccagcgccgactacgacagggtgctggagaagctgaagaagacagcaacaggctggatgaccacaattaacggcaaggagctgaaggtggagggccagattacctactacaacagatacaagagacagaacgtagtcaaggacctgtccgtcgagctggatagactgagcgaagaatctgtgaacaacgacatctcctcctggacaaagggcagaagcggagaagctctgagcctcctgaagaaaagattctcccatagacccgtgcaggagaagttcgtgtgcctgaactgcggcttcgagacacacgcagccgagcaagccgccctgaacatcgccagatcctggctgttcctgcggagccaggagtacaagaaataccagacaaacaagacaaccggcaacaccgataagagagccttcgtcgagacctggcagtccttttaccggaagaagcttaaggaggtgtggaaacctgccgtgcggtctggcggatctggcggaggctccaccagccccaagaaaaagagaaaagtctaagctgccttctgcggggcttgccttctggccatgcccttcttctctcccttgcacctgtacctcttggtctttgaataaagcctgagtaggaaggctagcaaaaaaaaaaaaaaaaaaaaaaaaaaaaaaaaaaaaaaaaaaaaaaaaaaaaaaaaaaaaaaaaaaaaaaaaaaaaaaaa

SEQ ID NO: 13610 - RNA, 5785 nt, synthetic construct
  source 1..5785: mol_type = other RNA
aggaaataagagagaaaagaagagtaagaagaaatataagagccaccatggcccctaagaagaagcgtaaagtgagccggatggaacgcctcgtctacgaggtgcggcagaagtgcagaaacatcgaggacatctgcatctcctgcggatctctgaacgtgaccctggagcacccactgttcatcggcggcatgtgccagaactgtaaaaactgttttctggagtgtgcctatcaatacgacgatgacggctaccagagctactgcaccatctgttgcggcggaagagaggtgctgatgtgtggaaataacaactgctgccggtgcttctgcgtggaatgcgtggacctgctggtgggccccggcgccgcccaggccgctattaaggaagatccttggaactgctacatgtgcggccacaagggcacatacggcctgctgagacggagagaggactggcctagcagactgcagatgttcttcgccaataaccacgaccaggagttcgacccccctaaggtgtaccctcccgtccccgccgagaagagaaagcccatccgggtcctgagcctgttcgatggcatcgccaccggtctgctggtgctgaaggacctgggcatccaggtggataggtacattgcctccgaggtgtgcgaggactccatcaccgtgggaatggtgcgtcatcagggcaagatcatgtacgtgggcgacgtgcggagcgtgacacagaagcatatccaggagtggggccctttcgacctggtgatcggcggcagcccttgcaatgacctgagcatcgtgaacccagcccggaagggcctgtacgagggaaccggcagactgttcttcgagttttacagactgctgcacgacgcccggcctaaggaaggcgacgaccggcccttcttttggctgttcgagaatgtggtggccatgggagtcagcgacaagcgggatattagccggttcctggagagcaaccccgtgatgatcgatgccaaggaagtgagcgccgcccaccgggccagatacttctggggcaatctgcctggcatgaacagacccctggccagcaccgtgaacgacaagctggagctgcaggagtgcctggagcacggccggatcgccaagttcagcaaggtgagaaccatcaccacccgaagcaacagcatcaaacaaggcaaggaccagcactttcctgtgttcatgaacgagaaggaggacatcctgtggtgtaccgagatggagagagtgttcgggttcccagtccactacacagatgtcagcaacatgtctagactggccagacagagactgctgggaagaagctggtccgtccctgtgatcagacacctgttcgcccctctgaaggagtacttcgcctgcgtgagcagcggcaacagcaacgccaacagccggggccccagcttctctagcggcctggtgccactgtccctgagagggagccacatgggccccatggagatctacaaaaccgtgagcgcctggaagcggcagcctgtgcgcgtgctgagcctgtttcggaatatcgataaagtcctgaaaagcctgggattcctggagagcggctctggctccggcggtggcaccctgaagtacgtggaggatgtgacaaacgtggtcagacgggatgtggagaagtggggccccttcgatctggtgtacggcagcacccaacccctgggcagctcttgtgaccggtgccctggctggtacatgtttcagttccaccggatcctgcagtacgccctgccgagacaggagtcccagcggccattcttttggattttcatggacaacttgctgctgaccgaggatgaccaggaaactaccactcggttcctgcagaccgaagccgtgaccctgcaggacgtgagaggccgggactaccagaacgccatgcgggtgtggtccaacatccctggactgaaaagcaagcacgcacctctgacccctaaagaagaggagtacctgcaggcccaggtgcggagcagaagcaagctggacgcccctaaggtggatctgctggtgaagaattgcctcctgcccctgagagagtacttcaagtatttcagccagaatagtctgcccctgggaggcagcggcggcggcgacctggaccaggtgaccttcgaggacgtggtggtggacttcaccagggaggagtggggctgcctggagcccgcccagaggaccctgtacagggacgtgatgctggagaccttcaggctgctggtgagcgtgggccactggctgcccaagcccgacgtgatcagcctgctggagcaggaggccgagctgtgggccgccgacgagggcggccccaggggcatgtgccccgacctggagaccaggggcggcccaagcagcggcgcccctcctcccagcggcggcagcccagccggctccccaacctctaccgaggagggcacctctgagtccgccacccccgagagcggccctggcacctccaccgagcccagcgagggcagcgcacccggcagccctgccggcagccccacctccacagaggagggaaccagcaccgagcccagcgaaggcagcgccccaggcaccagcaccgagcctagtgagcaggagattaaacggatcaacaagatcagaagaagacttgtgaaagacagcaacaccaagaaggccggcaagacaggccccatgaaaaccctgctggttagagtgatgacacccgatctgagagagcggctggaaaacctgagaaagaagcctgaaaatatcccccagcccatcagcaatacatctagagccaacctgaataagctgctgaccgattacaccgaaatgaagaaggcgatcctgcatgtgtactgggaagagttccagaaggaccctgtgggcctgatgagccgggtggcccagcctgccagcaagaagatcgatcagaacaagctgaaacctgagatggacgagaagggcaacctgaccaccgccggctttgcctgctctcagtgtggccagcccctgttcgtgtacaagctggagcaggtgtctgagaagggcaaggcttacaccaactacttcggacggtgcaatgtggccgagcacgaaaagctgatcctgctggcccagctgaagcccgagaaggatagcgacgaagccgtgacatatagcctgggaaagtttgggcagagggccctggatttctacagcattcatgtgaccaaggagtccacccaccccgtgaagcccctggcccagatcgccggaaacagatacgcctccggacctgtgggaaaggccctgagcgacgcatgtatgggcacaatcgcctccttcctgtctaagtaccaggacatcatcatcgaacaccagaaggtggtgaagggcaaccagaagagactggagagcctgcgggagctggccggcaaggaaaacctggaataccctagcgtgaccctgccacctcagcctcacaccaaggagggcgttgatgcctacaacgaagtgatcgcccgggtgcgaatgtgggtgaacctgaacctgtggcagaagctgaagctaagcagagatgatgccaagcctctgctgagactgaagggattcccttcctttcctctggtcgagagacaggccaacgaagtggactggtgggacatggtgtgtaacgtgaagaagctgatcaacgagaaaaaggaggatggcaaggtgttttggcagaatctggctggctacaagagacaggaagccctgagaccatacctgagcagcgaggaagatcggaagaagggaaagaaattcgctcggtaccagctgggcgacctgctgctgcacctggaaaagaagcacggcgaggactggggaaaggtgtacgacgaggcctgggagcggattgacaagaaagtggaaggcctgagcaagcacatcaagctggaagaggaacggagaagcgaggacgcccagagcaaggccgccctgaccgactggctgcgggctaaggccagcttcgtgatcgagggcctgaaggaggccgacaaggacgagttctgcagatgcgagctgaagctgcagaagtggtacggggacctgcggggaaagcccttcgccatcgaagccgagaacagcatcctggacatcagcggcttcagcaagcagtacaactgtgccttcatctggcagaaggacggcgtgaagaagctgaacctgtacctgatcatcaactacttcaagggcggcaagctgcggttcaagaagatcaaacctgaagccttcgaagccaacagattctacaccgtgatcaacaaaaagagcggcgagatcgtgcccatggaggtgaacttcaacttcgacgaccccaacctgatcatcctgcctctggcctttggcaagagacagggcagagaattcatctggaacgacctgctgtccctggaaaccggcagcctgaagctggccaacggaagagtgatcgagaagacactgtacaacagaagaacccggcaggatgagcctgccctgttcgtggccctgaccttcgagcggcgggaggtcctggactcctccaatatcaaaccaatgaacctgatcggcgtggcaagaggcgaaaacatccccgccgtgatcgccctgaccgaccccgagggctgcccactgagccggtttaaggatagcctgggaaacccaacccacatcctgagaatcggcgagagctataaggagaagcagcggaccatccaggccaagaaggaggtggagcagcggagagccggcggctacagccggaagtacgccagcaaagccaagaatctggcagacgatatggtgagaaacaccgctagagatctgctgtactacgccgtgacccaggatgccatgctgatcttcgccaacctgagccggggcttcggccggcagggcaagcggaccttcatggccgagagacagtacacacggatggaggactggctgaccgccaagctggcctacgagggcctgagcaagacctacctgtccaagacactggcccagtacacctccaagacatgcagcaactgtgggtttaccatcaccagcgccgactacgacagggtgctggagaagctgaagaagacagcaacaggctggatgaccacaattaacggcaaggagctgaaggtggagggccagattacctactacaacagatacaagagacagaacgtagtcaaggacctgtccgtcgagctggatagactgagcgaagaatctgtgaacaacgacatctcctcctggacaaagggcagaagcggagaagctctgagcctcctgaagaaaagattctcccatagacccgtgcaggagaagttcgtgtgcctgaactgcggcttcgagacacacgcagccgagcaagccgccctgaacatcgccagatcctggctgttcctgcggagccaggagtacaagaaataccagacaaacaagacaaccggcaacaccgataagagagccttcgtcgagacctggcagtccttttaccggaagaagcttaaggaggtgtggaaacctgccgtgcggtctggcggatctggcggaggctccaccagccccaagaaaaagagaaaagtctaagctgccttctgcggggcttgccttctggccatgcccttcttctctcccttgcacctgtacctcttggtctttgaataaagcctgagtaggaaggctagcaaaaaaaaaaaaaaaaaaaaaaaaaaaaaaaaaaaaaaaaaaaaaaaaaaaaaaaaaaaaaaaaaaaaaaaaaaaaaaaa

SEQ ID NO: 13611 - RNA, 5785 nt, synthetic construct
  source 1..5785: mol_type = other RNA
aggaaataagagagaaaagaagagtaagaagaaatataagagccaccatggcccctaagaagaagcgtaaagtgagccggatggaacgcctcgtctacgaggtgcggcagaagtgcagaaacatcgaggacatctgcatctcctgcggatctctgaacgtgaccctggagcacccactgttcatcggcggcatgtgccagaactgtaaaaactgttttctggagtgtgcctatcaatacgacgatgacggctaccagagctactgcaccatctgttgcggcggaagagaggtgctgatgtgtggaaataacaactgctgccggtgcttctgcgtggaatgcgtggacctgctggtgggccccggcgccgcccaggccgctattaaggaagatccttggaactgctacatgtgcggccacaagggcacatacggcctgctgagacggagagaggactggcctagcagactgcagatgttcttcgccaataaccacgaccaggagttcgacccccctaaggtgtaccctcccgtccccgccgagaagagaaagcccatccgggtcctgagcctgttcgatggcatcgccaccggtctgctggtgctgaaggacctgggcatccaggtggataggtacattgcctccgaggtgtgcgaggactccatcaccgtgggaatggtgcgtcatcagggcaagatcatgtacgtgggcgacgtgcggagcgtgacacagaagcatatccaggagtggggccctttcgacctggtgatcggcggcagcccttgcaatgacctgagcatcgtgaacccagcccggaagggcctgtacgagggaaccggcagactgttcttcgagttttacagactgctgcacgacgcccggcctaaggaaggcgacgaccggcccttcttttggctgttcgagaatgtggtggccatgggagtcagcgacaagcgggatattagccggttcctggagagcaaccccgtgatgatcgatgccaaggaagtgagcgccgcccaccgggccagatacttctggggcaatctgcctggcatgaacagacccctggccagcaccgtgaacgacaagctggagctgcaggagtgcctggagcacggccggatcgccaagttcagcaaggtgagaaccatcaccacccgaagcaacagcatcaaacaaggcaaggaccagcactttcctgtgttcatgaacgagaaggaggacatcctgtggtgtaccgagatggagagagtgttcgggttcccagtccactacacagatgtcagcaacatgtctagactggccagacagagactgctgggaagaagctggtccgtccctgtgatcagacacctgttcgcccctctgaaggagtacttcgcctgcgtgagcagcggcaacagcaacgccaacagccggggccccagcttctctagcggcctggtgccactgtccctgagagggagccacatgggccccatggagatctacaaaaccgtgagcgcctggaagcggcagcctgtgcgcgtgctgagcctgtttcggaatatcgataaagtcctgaaaagcctgggattcctggagagcggctctggctccggcggtggcaccctgaagtacgtggaggatgtgacaaacgtggtcagacgggatgtggagaagtggggccccttcgatctggtgtacggcagcacccaacccctgggcagctcttgtgaccggtgccctggctggtacatgtttcagttccaccggatcctgcagtacgccctgccgagacaggagtcccagcggccattcttttggattttcatggacaacttgctgctgaccgaggatgaccaggaaactaccactcggttcctgcagaccgaagccgtgaccctgcaggacgtgagaggccgggactaccagaacgccatgcgggtgtggtccaacatccctggactgaaaagcaagcacgcacctctgacccctaaagaagaggagtacctgcaggcccaggtgcggagcagaagcaagctggacgcccctaaggtggatctgctggtgaagaattgcctcctgcccctgagagagtacttcaagtatttcagccagaatagtctgcccctgggaggcagcggcggcggcgcccacggcagcgtgaccttcagggacgtggccatggacttcagccagcaggagtgggagtgcctgaaccccttccagaagaccctgtacagggacgtgatgatggagaactacggcaacctggtgagcctgggccacagcatcagcaagcccgacgtgatcaccctgctggagcagggcaaggagccctggatgatcgtgaagaaggagaccaggaagtggaggaaggacctggagagcaggggcggcccaagcagcggcgcccctcctcccagcggcggcagcccagccggctccccaacctctaccgaggagggcacctctgagtccgccacccccgagagcggccctggcacctccaccgagcccagcgagggcagcgcacccggcagccctgccggcagccccacctccacagaggagggaaccagcaccgagcccagcgaaggcagcgccccaggcaccagcaccgagcctagtgagcaggagattaaacggatcaacaagatcagaagaagacttgtgaaagacagcaacaccaagaaggccggcaagacaggccccatgaaaaccctgctggttagagtgatgacacccgatctgagagagcggctggaaaacctgagaaagaagcctgaaaatatcccccagcccatcagcaatacatctagagccaacctgaataagctgctgaccgattacaccgaaatgaagaaggcgatcctgcatgtgtactgggaagagttccagaaggaccctgtgggcctgatgagccgggtggcccagcctgccagcaagaagatcgatcagaacaagctgaaacctgagatggacgagaagggcaacctgaccaccgccggctttgcctgctctcagtgtggccagcccctgttcgtgtacaagctggagcaggtgtctgagaagggcaaggcttacaccaactacttcggacggtgcaatgtggccgagcacgaaaagctgatcctgctggcccagctgaagcccgagaaggatagcgacgaagccgtgacatatagcctgggaaagtttgggcagagggccctggatttctacagcattcatgtgaccaaggagtccacccaccccgtgaagcccctggcccagatcgccggaaacagatacgcctccggacctgtgggaaaggccctgagcgacgcatgtatgggcacaatcgcctccttcctgtctaagtaccaggacatcatcatcgaacaccagaaggtggtgaagggcaaccagaagagactggagagcctgcgggagctggccggcaaggaaaacctggaataccctagcgtgaccctgccacctcagcctcacaccaaggagggcgttgatgcctacaacgaagtgatcgcccgggtgcgaatgtgggtgaacctgaacctgtggcagaagctgaagctaagcagagatgatgccaagcctctgctgagactgaagggattcccttcctttcctctggtcgagagacaggccaacgaagtggactggtgggacatggtgtgtaacgtgaagaagctgatcaacgagaaaaaggaggatggcaaggtgttttggcagaatctggctggctacaagagacaggaagccctgagaccatacctgagcagcgaggaagatcggaagaagggaaagaaattcgctcggtaccagctgggcgacctgctgctgcacctggaaaagaagcacggcgaggactggggaaaggtgtacgacgaggcctgggagcggattgacaagaaagtggaaggcctgagcaagcacatcaagctggaagaggaacggagaagcgaggacgcccagagcaaggccgccctgaccgactggctgcgggctaaggccagcttcgtgatcgagggcctgaaggaggccgacaaggacgagttctgcagatgcgagctgaagctgcagaagtggtacggggacctgcggggaaagcccttcgccatcgaagccgagaacagcatcctggacatcagcggcttcagcaagcagtacaactgtgccttcatctggcagaaggacggcgtgaagaagctgaacctgtacctgatcatcaactacttcaagggcggcaagctgcggttcaagaagatcaaacctgaagccttcgaagccaacagattctacaccgtgatcaacaaaaagagcggcgagatcgtgcccatggaggtgaacttcaacttcgacgaccccaacctgatcatcctgcctctggcctttggcaagagacagggcagagaattcatctggaacgacctgctgtccctggaaaccggcagcctgaagctggccaacggaagagtgatcgagaagacactgtacaacagaagaacccggcaggatgagcctgccctgttcgtggccctgaccttcgagcggcgggaggtcctggactcctccaatatcaaaccaatgaacctgatcggcgtggcaagaggcgaaaacatccccgccgtgatcgccctgaccgaccccgagggctgcccactgagccggtttaaggatagcctgggaaacccaacccacatcctgagaatcggcgagagctataaggagaagcagcggaccatccaggccaagaaggaggtggagcagcggagagccggcggctacagccggaagtacgccagcaaagccaagaatctggcagacgatatggtgagaaacaccgctagagatctgctgtactacgccgtgacccaggatgccatgctgatcttcgccaacctgagccggggcttcggccggcagggcaagcggaccttcatggccgagagacagtacacacggatggaggactggctgaccgccaagctggcctacgagggcctgagcaagacctacctgtccaagacactggcccagtacacctccaagacatgcagcaactgtgggtttaccatcaccagcgccgactacgacagggtgctggagaagctgaagaagacagcaacaggctggatgaccacaattaacggcaaggagctgaaggtggagggccagattacctactacaacagatacaagagacagaacgtagtcaaggacctgtccgtcgagctggatagactgagcgaagaatctgtgaacaacgacatctcctcctggacaaagggcagaagcggagaagctctgagcctcctgaagaaaagattctcccatagacccgtgcaggagaagttcgtgtgcctgaactgcggcttcgagacacacgcagccgagcaagccgccctgaacatcgccagatcctggctgttcctgcggagccaggagtacaagaaataccagacaaacaagacaaccggcaacaccgataagagagccttcgtcgagacctggcagtccttttaccggaagaagcttaaggaggtgtggaaacctgccgtgcggtctggcggatctggcggaggctccaccagccccaagaaaaagagaaaagtctaagctgccttctgcggggcttgccttctggccatgcccttcttctctcccttgcacctgtacctcttggtctttgaataaagcctgagtaggaaggctagcaaaaaaaaaaaaaaaaaaaaaaaaaaaaaaaaaaaaaaaaaaaaaaaaaaaaaaaaaaaaaaaaaaaaaaaaaaaaaaaa

SEQ ID NO: 13612 - RNA, 5785 nt, synthetic construct
  source 1..5785: mol_type = other RNA
aggaaataagagagaaaagaagagtaagaagaaatataagagccaccatggcccctaagaagaagcgtaaagtgagccggatggaacgcctcgtctacgaggtgcggcagaagtgcagaaacatcgaggacatctgcatctcctgcggatctctgaacgtgaccctggagcacccactgttcatcggcggcatgtgccagaactgtaaaaactgttttctggagtgtgcctatcaatacgacgatgacggctaccagagctactgcaccatctgttgcggcggaagagaggtgctgatgtgtggaaataacaactgctgccggtgcttctgcgtggaatgcgtggacctgctggtgggccccggcgccgcccaggccgctattaaggaagatccttggaactgctacatgtgcggccacaagggcacatacggcctgctgagacggagagaggactggcctagcagactgcagatgttcttcgccaataaccacgaccaggagttcgacccccctaaggtgtaccctcccgtccccgccgagaagagaaagcccatccgggtcctgagcctgttcgatggcatcgccaccggtctgctggtgctgaaggacctgggcatccaggtggataggtacattgcctccgaggtgtgcgaggactccatcaccgtgggaatggtgcgtcatcagggcaagatcatgtacgtgggcgacgtgcggagcgtgacacagaagcatatccaggagtggggccctttcgacctggtgatcggcggcagcccttgcaatgacctgagcatcgtgaacccagcccggaagggcctgtacgagggaaccggcagactgttcttcgagttttacagactgctgcacgacgcccggcctaaggaaggcgacgaccggcccttcttttggctgttcgagaatgtggtggccatgggagtcagcgacaagcgggatattagccggttcctggagagcaaccccgtgatgatcgatgccaaggaagtgagcgccgcccaccgggccagatacttctggggcaatctgcctggcatgaacagacccctggccagcaccgtgaacgacaagctggagctgcaggagtgcctggagcacggccggatcgccaagttcagcaaggtgagaaccatcaccacccgaagcaacagcatcaaacaaggcaaggaccagcactttcctgtgttcatgaacgagaaggaggacatcctgtggtgtaccgagatggagagagtgttcgggttcccagtccactacacagatgtcagcaacatgtctagactggccagacagagactgctgggaagaagctggtccgtccctgtgatcagacacctgttcgcccctctgaaggagtacttcgcctgcgtgagcagcggcaacagcaacgccaacagccggggccccagcttctctagcggcctggtgccactgtccctgagagggagccacatgggccccatggagatctacaaaaccgtgagcgcctggaagcggcagcctgtgcgcgtgctgagcctgtttcggaatatcgataaagtcctgaaaagcctgggattcctggagagcggctctggctccggcggtggcaccctgaagtacgtggaggatgtgacaaacgtggtcagacgggatgtggagaagtggggccccttcgatctggtgtacggcagcacccaacccctgggcagctcttgtgaccggtgccctggctggtacatgtttcagttccaccggatcctgcagtacgccctgccgagacaggagtcccagcggccattcttttggattttcatggacaacttgctgctgaccgaggatgaccaggaaactaccactcggttcctgcagaccgaagccgtgaccctgcaggacgtgagaggccgggactaccagaacgccatgcgggtgtggtccaacatccctggactgaaaagcaagcacgcacctctgacccctaaagaagaggagtacctgcaggcccaggtgcggagcagaagcaagctggacgcccctaaggtggatctgctggtgaagaattgcctcctgcccctgagagagtacttcaagtatttcagccagaatagtctgcccctgggaggcagcggcggcggcgcccaggagagcgtgaccttcgaggacgtggccgtgaacttcaccaacagggagtggcagagcctgacctacgcccagaggcacctgtacaagcacgtgatgctggagaactacaggaacatggtgagcctgggcttccccttccccaagccccccctgatcagccacctggagaggggcgtggagccctgcgtgcaggacccccaggacaaggagagcctgagctgcagctaccccgtgagcggcggcccaagcagcggcgcccctcctcccagcggcggcagcccagccggctccccaacctctaccgaggagggcacctctgagtccgccacccccgagagcggccctggcacctccaccgagcccagcgagggcagcgcacccggcagccctgccggcagccccacctccacagaggagggaaccagcaccgagcccagcgaaggcagcgccccaggcaccagcaccgagcctagtgagcaggagattaaacggatcaacaagatcagaagaagacttgtgaaagacagcaacaccaagaaggccggcaagacaggccccatgaaaaccctgctggttagagtgatgacacccgatctgagagagcggctggaaaacctgagaaagaagcctgaaaatatcccccagcccatcagcaatacatctagagccaacctgaataagctgctgaccgattacaccgaaatgaagaaggcgatcctgcatgtgtactgggaagagttccagaaggaccctgtgggcctgatgagccgggtggcccagcctgccagcaagaagatcgatcagaacaagctgaaacctgagatggacgagaagggcaacctgaccaccgccggctttgcctgctctcagtgtggccagcccctgttcgtgtacaagctggagcaggtgtctgagaagggcaaggcttacaccaactacttcggacggtgcaatgtggccgagcacgaaaagctgatcctgctggcccagctgaagcccgagaaggatagcgacgaagccgtgacatatagcctgggaaagtttgggcagagggccctggatttctacagcattcatgtgaccaaggagtccacccaccccgtgaagcccctggcccagatcgccggaaacagatacgcctccggacctgtgggaaaggccctgagcgacgcatgtatgggcacaatcgcctccttcctgtctaagtaccaggacatcatcatcgaacaccagaaggtggtgaagggcaaccagaagagactggagagcctgcgggagctggccggcaaggaaaacctggaataccctagcgtgaccctgccacctcagcctcacaccaaggagggcgttgatgcctacaacgaagtgatcgcccgggtgcgaatgtgggtgaacctgaacctgtggcagaagctgaagctaagcagagatgatgccaagcctctgctgagactgaagggattcccttcctttcctctggtcgagagacaggccaacgaagtggactggtgggacatggtgtgtaacgtgaagaagctgatcaacgagaaaaaggaggatggcaaggtgttttggcagaatctggctggctacaagagacaggaagccctgagaccatacctgagcagcgaggaagatcggaagaagggaaagaaattcgctcggtaccagctgggcgacctgctgctgcacctggaaaagaagcacggcgaggactggggaaaggtgtacgacgaggcctgggagcggattgacaagaaagtggaaggcctgagcaagcacatcaagctggaagaggaacggagaagcgaggacgcccagagcaaggccgccctgaccgactggctgcgggctaaggccagcttcgtgatcgagggcctgaaggaggccgacaaggacgagttctgcagatgcgagctgaagctgcagaagtggtacggggacctgcggggaaagcccttcgccatcgaagccgagaacagcatcctggacatcagcggcttcagcaagcagtacaactgtgccttcatctggcagaaggacggcgtgaagaagctgaacctgtacctgatcatcaactacttcaagggcggcaagctgcggttcaagaagatcaaacctgaagccttcgaagccaacagattctacaccgtgatcaacaaaaagagcggcgagatcgtgcccatggaggtgaacttcaacttcgacgaccccaacctgatcatcctgcctctggcctttggcaagagacagggcagagaattcatctggaacgacctgctgtccctggaaaccggcagcctgaagctggccaacggaagagtgatcgagaagacactgtacaacagaagaacccggcaggatgagcctgccctgttcgtggccctgaccttcgagcggcgggaggtcctggactcctccaatatcaaaccaatgaacctgatcggcgtggcaagaggcgaaaacatccccgccgtgatcgccctgaccgaccccgagggctgcccactgagccggtttaaggatagcctgggaaacccaacccacatcctgagaatcggcgagagctataaggagaagcagcggaccatccaggccaagaaggaggtggagcagcggagagccggcggctacagccggaagtacgccagcaaagccaagaatctggcagacgatatggtgagaaacaccgctagagatctgctgtactacgccgtgacccaggatgccatgctgatcttcgccaacctgagccggggcttcggccggcagggcaagcggaccttcatggccgagagacagtacacacggatggaggactggctgaccgccaagctggcctacgagggcctgagcaagacctacctgtccaagacactggcccagtacacctccaagacatgcagcaactgtgggtttaccatcaccagcgccgactacgacagggtgctggagaagctgaagaagacagcaacaggctggatgaccacaattaacggcaaggagctgaaggtggagggccagattacctactacaacagatacaagagacagaacgtagtcaaggacctgtccgtcgagctggatagactgagcgaagaatctgtgaacaacgacatctcctcctggacaaagggcagaagcggagaagctctgagcctcctgaagaaaagattctcccatagacccgtgcaggagaagttcgtgtgcctgaactgcggcttcgagacacacgcagccgagcaagccgccctgaacatcgccagatcctggctgttcctgcggagccaggagtacaagaaataccagacaaacaagacaaccggcaacaccgataagagagccttcgtcgagacctggcagtccttttaccggaagaagcttaaggaggtgtggaaacctgccgtgcggtctggcggatctggcggaggctccaccagccccaagaaaaagagaaaagtctaagctgccttctgcggggcttgccttctggccatgcccttcttctctcccttgcacctgtacctcttggtctttgaataaagcctgagtaggaaggctagcaaaaaaaaaaaaaaaaaaaaaaaaaaaaaaaaaaaaaaaaaaaaaaaaaaaaaaaaaaaaaaaaaaaaaaaaaaaaaaaa

SEQ ID NO: 13613 - RNA, 5785 nt, synthetic construct
  source 1..5785: mol_type = other RNA
aggaaataagagagaaaagaagagtaagaagaaatataagagccaccatggcccctaagaagaagcgtaaagtgagccggatggaacgcctcgtctacgaggtgcggcagaagtgcagaaacatcgaggacatctgcatctcctgcggatctctgaacgtgaccctggagcacccactgttcatcggcggcatgtgccagaactgtaaaaactgttttctggagtgtgcctatcaatacgacgatgacggctaccagagctactgcaccatctgttgcggcggaagagaggtgctgatgtgtggaaataacaactgctgccggtgcttctgcgtggaatgcgtggacctgctggtgggccccggcgccgcccaggccgctattaaggaagatccttggaactgctacatgtgcggccacaagggcacatacggcctgctgagacggagagaggactggcctagcagactgcagatgttcttcgccaataaccacgaccaggagttcgacccccctaaggtgtaccctcccgtccccgccgagaagagaaagcccatccgggtcctgagcctgttcgatggcatcgccaccggtctgctggtgctgaaggacctgggcatccaggtggataggtacattgcctccgaggtgtgcgaggactccatcaccgtgggaatggtgcgtcatcagggcaagatcatgtacgtgggcgacgtgcggagcgtgacacagaagcatatccaggagtggggccctttcgacctggtgatcggcggcagcccttgcaatgacctgagcatcgtgaacccagcccggaagggcctgtacgagggaaccggcagactgttcttcgagttttacagactgctgcacgacgcccggcctaaggaaggcgacgaccggcccttcttttggctgttcgagaatgtggtggccatgggagtcagcgacaagcgggatattagccggttcctggagagcaaccccgtgatgatcgatgccaaggaagtgagcgccgcccaccgggccagatacttctggggcaatctgcctggcatgaacagacccctggccagcaccgtgaacgacaagctggagctgcaggagtgcctggagcacggccggatcgccaagttcagcaaggtgagaaccatcaccacccgaagcaacagcatcaaacaaggcaaggaccagcactttcctgtgttcatgaacgagaaggaggacatcctgtggtgtaccgagatggagagagtgttcgggttcccagtccactacacagatgtcagcaacatgtctagactggccagacagagactgctgggaagaagctggtccgtccctgtgatcagacacctgttcgcccctctgaaggagtacttcgcctgcgtgagcagcggcaacagcaacgccaacagccggggccccagcttctctagcggcctggtgccactgtccctgagagggagccacatgggccccatggagatctacaaaaccgtgagcgcctggaagcggcagcctgtgcgcgtgctgagcctgtttcggaatatcgataaagtcctgaaaagcctgggattcctggagagcggctctggctccggcggtggcaccctgaagtacgtggaggatgtgacaaacgtggtcagacgggatgtggagaagtggggccccttcgatctggtgtacggcagcacccaacccctgggcagctcttgtgaccggtgccctggctggtacatgtttcagttccaccggatcctgcagtacgccctgccgagacaggagtcccagcggccattcttttggattttcatggacaacttgctgctgaccgaggatgaccaggaaactaccactcggttcctgcagaccgaagccgtgaccctgcaggacgtgagaggccgggactaccagaacgccatgcgggtgtggtccaacatccctggactgaaaagcaagcacgcacctctgacccctaaagaagaggagtacctgcaggcccaggtgcggagcagaagcaagctggacgcccctaaggtggatctgctggtgaagaattgcctcctgcccctgagagagtacttcaagtatttcagccagaatagtctgcccctgggaggcagcggcggcggcatgcaggagagcgtgaccttcaaggacgtggccgtggacttcacccaggaggagtggaagcagctggaccccgcccagagggacctgtacagggacgtgatgctggagaactacaggaacctggtgagcctgggcctgcccgtgttcaagcccgacgtgatcagccagctggagaagggcgaggccccctggacccccgaggtgcccaggagcacctgcagcggcagcttcagccaggaggccggcggcccaagcagcggcgcccctcctcccagcggcggcagcccagccggctccccaacctctaccgaggagggcacctctgagtccgccacccccgagagcggccctggcacctccaccgagcccagcgagggcagcgcacccggcagccctgccggcagccccacctccacagaggagggaaccagcaccgagcccagcgaaggcagcgccccaggcaccagcaccgagcctagtgagcaggagattaaacggatcaacaagatcagaagaagacttgtgaaagacagcaacaccaagaaggccggcaagacaggccccatgaaaaccctgctggttagagtgatgacacccgatctgagagagcggctggaaaacctgagaaagaagcctgaaaatatcccccagcccatcagcaatacatctagagccaacctgaataagctgctgaccgattacaccgaaatgaagaaggcgatcctgcatgtgtactgggaagagttccagaaggaccctgtgggcctgatgagccgggtggcccagcctgccagcaagaagatcgatcagaacaagctgaaacctgagatggacgagaagggcaacctgaccaccgccggctttgcctgctctcagtgtggccagcccctgttcgtgtacaagctggagcaggtgtctgagaagggcaaggcttacaccaactacttcggacggtgcaatgtggccgagcacgaaaagctgatcctgctggcccagctgaagcccgagaaggatagcgacgaagccgtgacatatagcctgggaaagtttgggcagagggccctggatttctacagcattcatgtgaccaaggagtccacccaccccgtgaagcccctggcccagatcgccggaaacagatacgcctccggacctgtgggaaaggccctgagcgacgcatgtatgggcacaatcgcctccttcctgtctaagtaccaggacatcatcatcgaacaccagaaggtggtgaagggcaaccagaagagactggagagcctgcgggagctggccggcaaggaaaacctggaataccctagcgtgaccctgccacctcagcctcacaccaaggagggcgttgatgcctacaacgaagtgatcgcccgggtgcgaatgtgggtgaacctgaacctgtggcagaagctgaagctaagcagagatgatgccaagcctctgctgagactgaagggattcccttcctttcctctggtcgagagacaggccaacgaagtggactggtgggacatggtgtgtaacgtgaagaagctgatcaacgagaaaaaggaggatggcaaggtgttttggcagaatctggctggctacaagagacaggaagccctgagaccatacctgagcagcgaggaagatcggaagaagggaaagaaattcgctcggtaccagctgggcgacctgctgctgcacctggaaaagaagcacggcgaggactggggaaaggtgtacgacgaggcctgggagcggattgacaagaaagtggaaggcctgagcaagcacatcaagctggaagaggaacggagaagcgaggacgcccagagcaaggccgccctgaccgactggctgcgggctaaggccagcttcgtgatcgagggcctgaaggaggccgacaaggacgagttctgcagatgcgagctgaagctgcagaagtggtacggggacctgcggggaaagcccttcgccatcgaagccgagaacagcatcctggacatcagcggcttcagcaagcagtacaactgtgccttcatctggcagaaggacggcgtgaagaagctgaacctgtacctgatcatcaactacttcaagggcggcaagctgcggttcaagaagatcaaacctgaagccttcgaagccaacagattctacaccgtgatcaacaaaaagagcggcgagatcgtgcccatggaggtgaacttcaacttcgacgaccccaacctgatcatcctgcctctggcctttggcaagagacagggcagagaattcatctggaacgacctgctgtccctggaaaccggcagcctgaagctggccaacggaagagtgatcgagaagacactgtacaacagaagaacccggcaggatgagcctgccctgttcgtggccctgaccttcgagcggcgggaggtcctggactcctccaatatcaaaccaatgaacctgatcggcgtggcaagaggcgaaaacatccccgccgtgatcgccctgaccgaccccgagggctgcccactgagccggtttaaggatagcctgggaaacccaacccacatcctgagaatcggcgagagctataaggagaagcagcggaccatccaggccaagaaggaggtggagcagcggagagccggcggctacagccggaagtacgccagcaaagccaagaatctggcagacgatatggtgagaaacaccgctagagatctgctgtactacgccgtgacccaggatgccatgctgatcttcgccaacctgagccggggcttcggccggcagggcaagcggaccttcatggccgagagacagtacacacggatggaggactggctgaccgccaagctggcctacgagggcctgagcaagacctacctgtccaagacactggcccagtacacctccaagacatgcagcaactgtgggtttaccatcaccagcgccgactacgacagggtgctggagaagctgaagaagacagcaacaggctggatgaccacaattaacggcaaggagctgaaggtggagggccagattacctactacaacagatacaagagacagaacgtagtcaaggacctgtccgtcgagctggatagactgagcgaagaatctgtgaacaacgacatctcctcctggacaaagggcagaagcggagaagctctgagcctcctgaagaaaagattctcccatagacccgtgcaggagaagttcgtgtgcctgaactgcggcttcgagacacacgcagccgagcaagccgccctgaacatcgccagatcctggctgttcctgcggagccaggagtacaagaaataccagacaaacaagacaaccggcaacaccgataagagagccttcgtcgagacctggcagtccttttaccggaagaagcttaaggaggtgtggaaacctgccgtgcggtctggcggatctggcggaggctccaccagccccaagaaaaagagaaaagtctaagctgccttctgcggggcttgccttctggccatgcccttcttctctcccttgcacctgtacctcttggtctttgaataaagcctgagtaggaaggctagcaaaaaaaaaaaaaaaaaaaaaaaaaaaaaaaaaaaaaaaaaaaaaaaaaaaaaaaaaaaaaaaaaaaaaaaaaaaaaaaa

SEQ ID NO: 13614 - RNA, 5785 nt, synthetic construct
  source 1..5785: mol_type = other RNA
aggaaataagagagaaaagaagagtaagaagaaatataagagccaccatggcccctaagaagaagcgtaaagtgagccggatggaacgcctcgtctacgaggtgcggcagaagtgcagaaacatcgaggacatctgcatctcctgcggatctctgaacgtgaccctggagcacccactgttcatcggcggcatgtgccagaactgtaaaaactgttttctggagtgtgcctatcaatacgacgatgacggctaccagagctactgcaccatctgttgcggcggaagagaggtgctgatgtgtggaaataacaactgctgccggtgcttctgcgtggaatgcgtggacctgctggtgggccccggcgccgcccaggccgctattaaggaagatccttggaactgctacatgtgcggccacaagggcacatacggcctgctgagacggagagaggactggcctagcagactgcagatgttcttcgccaataaccacgaccaggagttcgacccccctaaggtgtaccctcccgtccccgccgagaagagaaagcccatccgggtcctgagcctgttcgatggcatcgccaccggtctgctggtgctgaaggacctgggcatccaggtggataggtacattgcctccgaggtgtgcgaggactccatcaccgtgggaatggtgcgtcatcagggcaagatcatgtacgtgggcgacgtgcggagcgtgacacagaagcatatccaggagtggggccctttcgacctggtgatcggcggcagcccttgcaatgacctgagcatcgtgaacccagcccggaagggcctgtacgagggaaccggcagactgttcttcgagttttacagactgctgcacgacgcccggcctaaggaaggcgacgaccggcccttcttttggctgttcgagaatgtggtggccatgggagtcagcgacaagcgggatattagccggttcctggagagcaaccccgtgatgatcgatgccaaggaagtgagcgccgcccaccgggccagatacttctggggcaatctgcctggcatgaacagacccctggccagcaccgtgaacgacaagctggagctgcaggagtgcctggagcacggccggatcgccaagttcagcaaggtgagaaccatcaccacccgaagcaacagcatcaaacaaggcaaggaccagcactttcctgtgttcatgaacgagaaggaggacatcctgtggtgtaccgagatggagagagtgttcgggttcccagtccactacacagatgtcagcaacatgtctagactggccagacagagactgctgggaagaagctggtccgtccctgtgatcagacacctgttcgcccctctgaaggagtacttcgcctgcgtgagcagcggcaacagcaacgccaacagccggggccccagcttctctagcggcctggtgccactgtccctgagagggagccacatgggccccatggagatctacaaaaccgtgagcgcctggaagcggcagcctgtgcgcgtgctgagcctgtttcggaatatcgataaagtcctgaaaagcctgggattcctggagagcggctctggctccggcggtggcaccctgaagtacgtggaggatgtgacaaacgtggtcagacgggatgtggagaagtggggccccttcgatctggtgtacggcagcacccaacccctgggcagctcttgtgaccggtgccctggctggtacatgtttcagttccaccggatcctgcagtacgccctgccgagacaggagtcccagcggccattcttttggattttcatggacaacttgctgctgaccgaggatgaccaggaaactaccactcggttcctgcagaccgaagccgtgaccctgcaggacgtgagaggccgggactaccagaacgccatgcgggtgtggtccaacatccctggactgaaaagcaagcacgcacctctgacccctaaagaagaggagtacctgcaggcccaggtgcggagcagaagcaagctggacgcccctaaggtggatctgctggtgaagaattgcctcctgcccctgagagagtacttcaagtatttcagccagaatagtctgcccctgggaggcagcggcggcggcgaccagctgcaggaggccttcgaggacgtggccctgtacttcacccagaacgagtgggagctgctgggcgacggcgacaaggtgctgtacagggaccagatgctgaggaactaccaggccctggtgagcctgggctaccagggccccgcccccgacctgatcagcaggatccagaggcaggaggtggagctgtgggtgtgcgaggaggagaaccccggcgagagcgtgtggaccgagggcctgggcggcccaagcagcggcgcccctcctcccagcggcggcagcccagccggctccccaacctctaccgaggagggcacctctgagtccgccacccccgagagcggccctggcacctccaccgagcccagcgagggcagcgcacccggcagccctgccggcagccccacctccacagaggagggaaccagcaccgagcccagcgaaggcagcgccccaggcaccagcaccgagcctagtgagcaggagattaaacggatcaacaagatcagaagaagacttgtgaaagacagcaacaccaagaaggccggcaagacaggccccatgaaaaccctgctggttagagtgatgacacccgatctgagagagcggctggaaaacctgagaaagaagcctgaaaatatcccccagcccatcagcaatacatctagagccaacctgaataagctgctgaccgattacaccgaaatgaagaaggcgatcctgcatgtgtactgggaagagttccagaaggaccctgtgggcctgatgagccgggtggcccagcctgccagcaagaagatcgatcagaacaagctgaaacctgagatggacgagaagggcaacctgaccaccgccggctttgcctgctctcagtgtggccagcccctgttcgtgtacaagctggagcaggtgtctgagaagggcaaggcttacaccaactacttcggacggtgcaatgtggccgagcacgaaaagctgatcctgctggcccagctgaagcccgagaaggatagcgacgaagccgtgacatatagcctgggaaagtttgggcagagggccctggatttctacagcattcatgtgaccaaggagtccacccaccccgtgaagcccctggcccagatcgccggaaacagatacgcctccggacctgtgggaaaggccctgagcgacgcatgtatgggcacaatcgcctccttcctgtctaagtaccaggacatcatcatcgaacaccagaaggtggtgaagggcaaccagaagagactggagagcctgcgggagctggccggcaaggaaaacctggaataccctagcgtgaccctgccacctcagcctcacaccaaggagggcgttgatgcctacaacgaagtgatcgcccgggtgcgaatgtgggtgaacctgaacctgtggcagaagctgaagctaagcagagatgatgccaagcctctgctgagactgaagggattcccttcctttcctctggtcgagagacaggccaacgaagtggactggtgggacatggtgtgtaacgtgaagaagctgatcaacgagaaaaaggaggatggcaaggtgttttggcagaatctggctggctacaagagacaggaagccctgagaccatacctgagcagcgaggaagatcggaagaagggaaagaaattcgctcggtaccagctgggcgacctgctgctgcacctggaaaagaagcacggcgaggactggggaaaggtgtacgacgaggcctgggagcggattgacaagaaagtggaaggcctgagcaagcacatcaagctggaagaggaacggagaagcgaggacgcccagagcaaggccgccctgaccgactggctgcgggctaaggccagcttcgtgatcgagggcctgaaggaggccgacaaggacgagttctgcagatgcgagctgaagctgcagaagtggtacggggacctgcggggaaagcccttcgccatcgaagccgagaacagcatcctggacatcagcggcttcagcaagcagtacaactgtgccttcatctggcagaaggacggcgtgaagaagctgaacctgtacctgatcatcaactacttcaagggcggcaagctgcggttcaagaagatcaaacctgaagccttcgaagccaacagattctacaccgtgatcaacaaaaagagcggcgagatcgtgcccatggaggtgaacttcaacttcgacgaccccaacctgatcatcctgcctctggcctttggcaagagacagggcagagaattcatctggaacgacctgctgtccctggaaaccggcagcctgaagctggccaacggaagagtgatcgagaagacactgtacaacagaagaacccggcaggatgagcctgccctgttcgtggccctgaccttcgagcggcgggaggtcctggactcctccaatatcaaaccaatgaacctgatcggcgtggcaagaggcgaaaacatccccgccgtgatcgccctgaccgaccccgagggctgcccactgagccggtttaaggatagcctgggaaacccaacccacatcctgagaatcggcgagagctataaggagaagcagcggaccatccaggccaagaaggaggtggagcagcggagagccggcggctacagccggaagtacgccagcaaagccaagaatctggcagacgatatggtgagaaacaccgctagagatctgctgtactacgccgtgacccaggatgccatgctgatcttcgccaacctgagccggggcttcggccggcagggcaagcggaccttcatggccgagagacagtacacacggatggaggactggctgaccgccaagctggcctacgagggcctgagcaagacctacctgtccaagacactggcccagtacacctccaagacatgcagcaactgtgggtttaccatcaccagcgccgactacgacagggtgctggagaagctgaagaagacagcaacaggctggatgaccacaattaacggcaaggagctgaaggtggagggccagattacctactacaacagatacaagagacagaacgtagtcaaggacctgtccgtcgagctggatagactgagcgaagaatctgtgaacaacgacatctcctcctggacaaagggcagaagcggagaagctctgagcctcctgaagaaaagattctcccatagacccgtgcaggagaagttcgtgtgcctgaactgcggcttcgagacacacgcagccgagcaagccgccctgaacatcgccagatcctggctgttcctgcggagccaggagtacaagaaataccagacaaacaagacaaccggcaacaccgataagagagccttcgtcgagacctggcagtccttttaccggaagaagcttaaggaggtgtggaaacctgccgtgcggtctggcggatctggcggaggctccaccagccccaagaaaaagagaaaagtctaagctgccttctgcggggcttgccttctggccatgcccttcttctctcccttgcacctgtacctcttggtctttgaataaagcctgagtaggaaggctagcaaaaaaaaaaaaaaaaaaaaaaaaaaaaaaaaaaaaaaaaaaaaaaaaaaaaaaaaaaaaaaaaaaaaaaaaaaaaaaaa

SEQ ID NO: 13615 - RNA, 5785 nt, synthetic construct
  source 1..5785: mol_type = other RNA
aggaaataagagagaaaagaagagtaagaagaaatataagagccaccatggcccctaagaagaagcgtaaagtgagccggatggaacgcctcgtctacgaggtgcggcagaagtgcagaaacatcgaggacatctgcatctcctgcggatctctgaacgtgaccctggagcacccactgttcatcggcggcatgtgccagaactgtaaaaactgttttctggagtgtgcctatcaatacgacgatgacggctaccagagctactgcaccatctgttgcggcggaagagaggtgctgatgtgtggaaataacaactgctgccggtgcttctgcgtggaatgcgtggacctgctggtgggccccggcgccgcccaggccgctattaaggaagatccttggaactgctacatgtgcggccacaagggcacatacggcctgctgagacggagagaggactggcctagcagactgcagatgttcttcgccaataaccacgaccaggagttcgacccccctaaggtgtaccctcccgtccccgccgagaagagaaagcccatccgggtcctgagcctgttcgatggcatcgccaccggtctgctggtgctgaaggacctgggcatccaggtggataggtacattgcctccgaggtgtgcgaggactccatcaccgtgggaatggtgcgtcatcagggcaagatcatgtacgtgggcgacgtgcggagcgtgacacagaagcatatccaggagtggggccctttcgacctggtgatcggcggcagcccttgcaatgacctgagcatcgtgaacccagcccggaagggcctgtacgagggaaccggcagactgttcttcgagttttacagactgctgcacgacgcccggcctaaggaaggcgacgaccggcccttcttttggctgttcgagaatgtggtggccatgggagtcagcgacaagcgggatattagccggttcctggagagcaaccccgtgatgatcgatgccaaggaagtgagcgccgcccaccgggccagatacttctggggcaatctgcctggcatgaacagacccctggccagcaccgtgaacgacaagctggagctgcaggagtgcctggagcacggccggatcgccaagttcagcaaggtgagaaccatcaccacccgaagcaacagcatcaaacaaggcaaggaccagcactttcctgtgttcatgaacgagaaggaggacatcctgtggtgtaccgagatggagagagtgttcgggttcccagtccactacacagatgtcagcaacatgtctagactggccagacagagactgctgggaagaagctggtccgtccctgtgatcagacacctgttcgcccctctgaaggagtacttcgcctgcgtgagcagcggcaacagcaacgccaacagccggggccccagcttctctagcggcctggtgccactgtccctgagagggagccacatgggccccatggagatctacaaaaccgtgagcgcctggaagcggcagcctgtgcgcgtgctgagcctgtttcggaatatcgataaagtcctgaaaagcctgggattcctggagagcggctctggctccggcggtggcaccctgaagtacgtggaggatgtgacaaacgtggtcagacgggatgtggagaagtggggccccttcgatctggtgtacggcagcacccaacccctgggcagctcttgtgaccggtgccctggctggtacatgtttcagttccaccggatcctgcagtacgccctgccgagacaggagtcccagcggccattcttttggattttcatggacaacttgctgctgaccgaggatgaccaggaaactaccactcggttcctgcagaccgaagccgtgaccctgcaggacgtgagaggccgggactaccagaacgccatgcgggtgtggtccaacatccctggactgaaaagcaagcacgcacctctgacccctaaagaagaggagtacctgcaggcccaggtgcggagcagaagcaagctggacgcccctaaggtggatctgctggtgaagaattgcctcctgcccctgagagagtacttcaagtatttcagccagaatagtctgcccctgggaggcagcggcggcggcgtgagggagcccctgaccttcgaggacgtggccgtgaacttcacccaggaggagtggcagcagctggaccccgcccagaagaccctgcacagggacgtgatgctggagatctacagccacctggtgagcgtgggctgcagcggcatcaagcccgacatcatcagcaagctggagcacggcgaggacccctggatcagggagagcgagctgcccaggtggacctacagcgacagggagaagagcggcggcccaagcagcggcgcccctcctcccagcggcggcagcccagccggctccccaacctctaccgaggagggcacctctgagtccgccacccccgagagcggccctggcacctccaccgagcccagcgagggcagcgcacccggcagccctgccggcagccccacctccacagaggagggaaccagcaccgagcccagcgaaggcagcgccccaggcaccagcaccgagcctagtgagcaggagattaaacggatcaacaagatcagaagaagacttgtgaaagacagcaacaccaagaaggccggcaagacaggccccatgaaaaccctgctggttagagtgatgacacccgatctgagagagcggctggaaaacctgagaaagaagcctgaaaatatcccccagcccatcagcaatacatctagagccaacctgaataagctgctgaccgattacaccgaaatgaagaaggcgatcctgcatgtgtactgggaagagttccagaaggaccctgtgggcctgatgagccgggtggcccagcctgccagcaagaagatcgatcagaacaagctgaaacctgagatggacgagaagggcaacctgaccaccgccggctttgcctgctctcagtgtggccagcccctgttcgtgtacaagctggagcaggtgtctgagaagggcaaggcttacaccaactacttcggacggtgcaatgtggccgagcacgaaaagctgatcctgctggcccagctgaagcccgagaaggatagcgacgaagccgtgacatatagcctgggaaagtttgggcagagggccctggatttctacagcattcatgtgaccaaggagtccacccaccccgtgaagcccctggcccagatcgccggaaacagatacgcctccggacctgtgggaaaggccctgagcgacgcatgtatgggcacaatcgcctccttcctgtctaagtaccaggacatcatcatcgaacaccagaaggtggtgaagggcaaccagaagagactggagagcctgcgggagctggccggcaaggaaaacctggaataccctagcgtgaccctgccacctcagcctcacaccaaggagggcgttgatgcctacaacgaagtgatcgcccgggtgcgaatgtgggtgaacctgaacctgtggcagaagctgaagctaagcagagatgatgccaagcctctgctgagactgaagggattcccttcctttcctctggtcgagagacaggccaacgaagtggactggtgggacatggtgtgtaacgtgaagaagctgatcaacgagaaaaaggaggatggcaaggtgttttggcagaatctggctggctacaagagacaggaagccctgagaccatacctgagcagcgaggaagatcggaagaagggaaagaaattcgctcggtaccagctgggcgacctgctgctgcacctggaaaagaagcacggcgaggactggggaaaggtgtacgacgaggcctgggagcggattgacaagaaagtggaaggcctgagcaagcacatcaagctggaagaggaacggagaagcgaggacgcccagagcaaggccgccctgaccgactggctgcgggctaaggccagcttcgtgatcgagggcctgaaggaggccgacaaggacgagttctgcagatgcgagctgaagctgcagaagtggtacggggacctgcggggaaagcccttcgccatcgaagccgagaacagcatcctggacatcagcggcttcagcaagcagtacaactgtgccttcatctggcagaaggacggcgtgaagaagctgaacctgtacctgatcatcaactacttcaagggcggcaagctgcggttcaagaagatcaaacctgaagccttcgaagccaacagattctacaccgtgatcaacaaaaagagcggcgagatcgtgcccatggaggtgaacttcaacttcgacgaccccaacctgatcatcctgcctctggcctttggcaagagacagggcagagaattcatctggaacgacctgctgtccctggaaaccggcagcctgaagctggccaacggaagagtgatcgagaagacactgtacaacagaagaacccggcaggatgagcctgccctgttcgtggccctgaccttcgagcggcgggaggtcctggactcctccaatatcaaaccaatgaacctgatcggcgtggcaagaggcgaaaacatccccgccgtgatcgccctgaccgaccccgagggctgcccactgagccggtttaaggatagcctgggaaacccaacccacatcctgagaatcggcgagagctataaggagaagcagcggaccatccaggccaagaaggaggtggagcagcggagagccggcggctacagccggaagtacgccagcaaagccaagaatctggcagacgatatggtgagaaacaccgctagagatctgctgtactacgccgtgacccaggatgccatgctgatcttcgccaacctgagccggggcttcggccggcagggcaagcggaccttcatggccgagagacagtacacacggatggaggactggctgaccgccaagctggcctacgagggcctgagcaagacctacctgtccaagacactggcccagtacacctccaagacatgcagcaactgtgggtttaccatcaccagcgccgactacgacagggtgctggagaagctgaagaagacagcaacaggctggatgaccacaattaacggcaaggagctgaaggtggagggccagattacctactacaacagatacaagagacagaacgtagtcaaggacctgtccgtcgagctggatagactgagcgaagaatctgtgaacaacgacatctcctcctggacaaagggcagaagcggagaagctctgagcctcctgaagaaaagattctcccatagacccgtgcaggagaagttcgtgtgcctgaactgcggcttcgagacacacgcagccgagcaagccgccctgaacatcgccagatcctggctgttcctgcggagccaggagtacaagaaataccagacaaacaagacaaccggcaacaccgataagagagccttcgtcgagacctggcagtccttttaccggaagaagcttaaggaggtgtggaaacctgccgtgcggtctggcggatctggcggaggctccaccagccccaagaaaaagagaaaagtctaagctgccttctgcggggcttgccttctggccatgcccttcttctctcccttgcacctgtacctcttggtctttgaataaagcctgagtaggaaggctagcaaaaaaaaaaaaaaaaaaaaaaaaaaaaaaaaaaaaaaaaaaaaaaaaaaaaaaaaaaaaaaaaaaaaaaaaaaaaaaaa

SEQ ID NO: 13616 - RNA, 5785 nt, synthetic construct
  source 1..5785: mol_type = other RNA
aggaaataagagagaaaagaagagtaagaagaaatataagagccaccatggcccctaagaagaagcgtaaagtgagccggatggaacgcctcgtctacgaggtgcggcagaagtgcagaaacatcgaggacatctgcatctcctgcggatctctgaacgtgaccctggagcacccactgttcatcggcggcatgtgccagaactgtaaaaactgttttctggagtgtgcctatcaatacgacgatgacggctaccagagctactgcaccatctgttgcggcggaagagaggtgctgatgtgtggaaataacaactgctgccggtgcttctgcgtggaatgcgtggacctgctggtgggccccggcgccgcccaggccgctattaaggaagatccttggaactgctacatgtgcggccacaagggcacatacggcctgctgagacggagagaggactggcctagcagactgcagatgttcttcgccaataaccacgaccaggagttcgacccccctaaggtgtaccctcccgtccccgccgagaagagaaagcccatccgggtcctgagcctgttcgatggcatcgccaccggtctgctggtgctgaaggacctgggcatccaggtggataggtacattgcctccgaggtgtgcgaggactccatcaccgtgggaatggtgcgtcatcagggcaagatcatgtacgtgggcgacgtgcggagcgtgacacagaagcatatccaggagtggggccctttcgacctggtgatcggcggcagcccttgcaatgacctgagcatcgtgaacccagcccggaagggcctgtacgagggaaccggcagactgttcttcgagttttacagactgctgcacgacgcccggcctaaggaaggcgacgaccggcccttcttttggctgttcgagaatgtggtggccatgggagtcagcgacaagcgggatattagccggttcctggagagcaaccccgtgatgatcgatgccaaggaagtgagcgccgcccaccgggccagatacttctggggcaatctgcctggcatgaacagacccctggccagcaccgtgaacgacaagctggagctgcaggagtgcctggagcacggccggatcgccaagttcagcaaggtgagaaccatcaccacccgaagcaacagcatcaaacaaggcaaggaccagcactttcctgtgttcatgaacgagaaggaggacatcctgtggtgtaccgagatggagagagtgttcgggttcccagtccactacacagatgtcagcaacatgtctagactggccagacagagactgctgggaagaagctggtccgtccctgtgatcagacacctgttcgcccctctgaaggagtacttcgcctgcgtgagcagcggcaacagcaacgccaacagccggggccccagcttctctagcggcctggtgccactgtccctgagagggagccacatgggccccatggagatctacaaaaccgtgagcgcctggaagcggcagcctgtgcgcgtgctgagcctgtttcggaatatcgataaagtcctgaaaagcctgggattcctggagagcggctctggctccggcggtggcaccctgaagtacgtggaggatgtgacaaacgtggtcagacgggatgtggagaagtggggccccttcgatctggtgtacggcagcacccaacccctgggcagctcttgtgaccggtgccctggctggtacatgtttcagttccaccggatcctgcagtacgccctgccgagacaggagtcccagcggccattcttttggattttcatggacaacttgctgctgaccgaggatgaccaggaaactaccactcggttcctgcagaccgaagccgtgaccctgcaggacgtgagaggccgggactaccagaacgccatgcgggtgtggtccaacatccctggactgaaaagcaagcacgcacctctgacccctaaagaagaggagtacctgcaggcccaggtgcggagcagaagcaagctggacgcccctaaggtggatctgctggtgaagaattgcctcctgcccctgagagagtacttcaagtatttcagccagaatagtctgcccctgggaggcagcggcggcggcatgaagctgggcagcgtgaccttcgaggacgtggccgtgtacttcagctgggaggagtgggccctgctggacgaggcccagaggtgcctgtaccacgacgtgatgctggagaacttcgccctgaccagcagcctggtggtgagcagcagcagccacaccatcgcccagctgggcctgggcgaggagagcttcgtgctgcccaggatgcacatgatccccctgagcaccaggtgggcccagaggggcggcccaagcagcggcgcccctcctcccagcggcggcagcccagccggctccccaacctctaccgaggagggcacctctgagtccgccacccccgagagcggccctggcacctccaccgagcccagcgagggcagcgcacccggcagccctgccggcagccccacctccacagaggagggaaccagcaccgagcccagcgaaggcagcgccccaggcaccagcaccgagcctagtgagcaggagattaaacggatcaacaagatcagaagaagacttgtgaaagacagcaacaccaagaaggccggcaagacaggccccatgaaaaccctgctggttagagtgatgacacccgatctgagagagcggctggaaaacctgagaaagaagcctgaaaatatcccccagcccatcagcaatacatctagagccaacctgaataagctgctgaccgattacaccgaaatgaagaaggcgatcctgcatgtgtactgggaagagttccagaaggaccctgtgggcctgatgagccgggtggcccagcctgccagcaagaagatcgatcagaacaagctgaaacctgagatggacgagaagggcaacctgaccaccgccggctttgcctgctctcagtgtggccagcccctgttcgtgtacaagctggagcaggtgtctgagaagggcaaggcttacaccaactacttcggacggtgcaatgtggccgagcacgaaaagctgatcctgctggcccagctgaagcccgagaaggatagcgacgaagccgtgacatatagcctgggaaagtttgggcagagggccctggatttctacagcattcatgtgaccaaggagtccacccaccccgtgaagcccctggcccagatcgccggaaacagatacgcctccggacctgtgggaaaggccctgagcgacgcatgtatgggcacaatcgcctccttcctgtctaagtaccaggacatcatcatcgaacaccagaaggtggtgaagggcaaccagaagagactggagagcctgcgggagctggccggcaaggaaaacctggaataccctagcgtgaccctgccacctcagcctcacaccaaggagggcgttgatgcctacaacgaagtgatcgcccgggtgcgaatgtgggtgaacctgaacctgtggcagaagctgaagctaagcagagatgatgccaagcctctgctgagactgaagggattcccttcctttcctctggtcgagagacaggccaacgaagtggactggtgggacatggtgtgtaacgtgaagaagctgatcaacgagaaaaaggaggatggcaaggtgttttggcagaatctggctggctacaagagacaggaagccctgagaccatacctgagcagcgaggaagatcggaagaagggaaagaaattcgctcggtaccagctgggcgacctgctgctgcacctggaaaagaagcacggcgaggactggggaaaggtgtacgacgaggcctgggagcggattgacaagaaagtggaaggcctgagcaagcacatcaagctggaagaggaacggagaagcgaggacgcccagagcaaggccgccctgaccgactggctgcgggctaaggccagcttcgtgatcgagggcctgaaggaggccgacaaggacgagttctgcagatgcgagctgaagctgcagaagtggtacggggacctgcggggaaagcccttcgccatcgaagccgagaacagcatcctggacatcagcggcttcagcaagcagtacaactgtgccttcatctggcagaaggacggcgtgaagaagctgaacctgtacctgatcatcaactacttcaagggcggcaagctgcggttcaagaagatcaaacctgaagccttcgaagccaacagattctacaccgtgatcaacaaaaagagcggcgagatcgtgcccatggaggtgaacttcaacttcgacgaccccaacctgatcatcctgcctctggcctttggcaagagacagggcagagaattcatctggaacgacctgctgtccctggaaaccggcagcctgaagctggccaacggaagagtgatcgagaagacactgtacaacagaagaacccggcaggatgagcctgccctgttcgtggccctgaccttcgagcggcgggaggtcctggactcctccaatatcaaaccaatgaacctgatcggcgtggcaagaggcgaaaacatccccgccgtgatcgccctgaccgaccccgagggctgcccactgagccggtttaaggatagcctgggaaacccaacccacatcctgagaatcggcgagagctataaggagaagcagcggaccatccaggccaagaaggaggtggagcagcggagagccggcggctacagccggaagtacgccagcaaagccaagaatctggcagacgatatggtgagaaacaccgctagagatctgctgtactacgccgtgacccaggatgccatgctgatcttcgccaacctgagccggggcttcggccggcagggcaagcggaccttcatggccgagagacagtacacacggatggaggactggctgaccgccaagctggcctacgagggcctgagcaagacctacctgtccaagacactggcccagtacacctccaagacatgcagcaactgtgggtttaccatcaccagcgccgactacgacagggtgctggagaagctgaagaagacagcaacaggctggatgaccacaattaacggcaaggagctgaaggtggagggccagattacctactacaacagatacaagagacagaacgtagtcaaggacctgtccgtcgagctggatagactgagcgaagaatctgtgaacaacgacatctcctcctggacaaagggcagaagcggagaagctctgagcctcctgaagaaaagattctcccatagacccgtgcaggagaagttcgtgtgcctgaactgcggcttcgagacacacgcagccgagcaagccgccctgaacatcgccagatcctggctgttcctgcggagccaggagtacaagaaataccagacaaacaagacaaccggcaacaccgataagagagccttcgtcgagacctggcagtccttttaccggaagaagcttaaggaggtgtggaaacctgccgtgcggtctggcggatctggcggaggctccaccagccccaagaaaaagagaaaagtctaagctgccttctgcggggcttgccttctggccatgcccttcttctctcccttgcacctgtacctcttggtctttgaataaagcctgagtaggaaggctagcaaaaaaaaaaaaaaaaaaaaaaaaaaaaaaaaaaaaaaaaaaaaaaaaaaaaaaaaaaaaaaaaaaaaaaaaaaaaaaaa

SEQ ID NO: 13617 - RNA, 5785 nt, synthetic construct
  source 1..5785: mol_type = other RNA
aggaaataagagagaaaagaagagtaagaagaaatataagagccaccatggcccctaagaagaagcgtaaagtgagccggatggaacgcctcgtctacgaggtgcggcagaagtgcagaaacatcgaggacatctgcatctcctgcggatctctgaacgtgaccctggagcacccactgttcatcggcggcatgtgccagaactgtaaaaactgttttctggagtgtgcctatcaatacgacgatgacggctaccagagctactgcaccatctgttgcggcggaagagaggtgctgatgtgtggaaataacaactgctgccggtgcttctgcgtggaatgcgtggacctgctggtgggccccggcgccgcccaggccgctattaaggaagatccttggaactgctacatgtgcggccacaagggcacatacggcctgctgagacggagagaggactggcctagcagactgcagatgttcttcgccaataaccacgaccaggagttcgacccccctaaggtgtaccctcccgtccccgccgagaagagaaagcccatccgggtcctgagcctgttcgatggcatcgccaccggtctgctggtgctgaaggacctgggcatccaggtggataggtacattgcctccgaggtgtgcgaggactccatcaccgtgggaatggtgcgtcatcagggcaagatcatgtacgtgggcgacgtgcggagcgtgacacagaagcatatccaggagtggggccctttcgacctggtgatcggcggcagcccttgcaatgacctgagcatcgtgaacccagcccggaagggcctgtacgagggaaccggcagactgttcttcgagttttacagactgctgcacgacgcccggcctaaggaaggcgacgaccggcccttcttttggctgttcgagaatgtggtggccatgggagtcagcgacaagcgggatattagccggttcctggagagcaaccccgtgatgatcgatgccaaggaagtgagcgccgcccaccgggccagatacttctggggcaatctgcctggcatgaacagacccctggccagcaccgtgaacgacaagctggagctgcaggagtgcctggagcacggccggatcgccaagttcagcaaggtgagaaccatcaccacccgaagcaacagcatcaaacaaggcaaggaccagcactttcctgtgttcatgaacgagaaggaggacatcctgtggtgtaccgagatggagagagtgttcgggttcccagtccactacacagatgtcagcaacatgtctagactggccagacagagactgctgggaagaagctggtccgtccctgtgatcagacacctgttcgcccctctgaaggagtacttcgcctgcgtgagcagcggcaacagcaacgccaacagccggggccccagcttctctagcggcctggtgccactgtccctgagagggagccacatgggccccatggagatctacaaaaccgtgagcgcctggaagcggcagcctgtgcgcgtgctgagcctgtttcggaatatcgataaagtcctgaaaagcctgggattcctggagagcggctctggctccggcggtggcaccctgaagtacgtggaggatgtgacaaacgtggtcagacgggatgtggagaagtggggccccttcgatctggtgtacggcagcacccaacccctgggcagctcttgtgaccggtgccctggctggtacatgtttcagttccaccggatcctgcagtacgccctgccgagacaggagtcccagcggccattcttttggattttcatggacaacttgctgctgaccgaggatgaccaggaaactaccactcggttcctgcagaccgaagccgtgaccctgcaggacgtgagaggccgggactaccagaacgccatgcgggtgtggtccaacatccctggactgaaaagcaagcacgcacctctgacccctaaagaagaggagtacctgcaggcccaggtgcggagcagaagcaagctggacgcccctaaggtggatctgctggtgaagaattgcctcctgcccctgagagagtacttcaagtatttcagccagaatagtctgcccctgggaggcagcggcggcggccagatgtgggtgaccttcgaggacgtggccgtgagcttcagccaggaggagtgggtgtacctggacgagggccagaaggagctgtacagggaggtgatgaaggagaactacgagaccgtgatgagcctggccggcgaggagttcagcaggggcaaggagaaggagggcagcatcgagcagcagagcctgaagaccgaggtgcacgagatgaacaagagggtgaagctgttcaagtgcagcgagggcggcccaagcagcggcgcccctcctcccagcggcggcagcccagccggctccccaacctctaccgaggagggcacctctgagtccgccacccccgagagcggccctggcacctccaccgagcccagcgagggcagcgcacccggcagccctgccggcagccccacctccacagaggagggaaccagcaccgagcccagcgaaggcagcgccccaggcaccagcaccgagcctagtgagcaggagattaaacggatcaacaagatcagaagaagacttgtgaaagacagcaacaccaagaaggccggcaagacaggccccatgaaaaccctgctggttagagtgatgacacccgatctgagagagcggctggaaaacctgagaaagaagcctgaaaatatcccccagcccatcagcaatacatctagagccaacctgaataagctgctgaccgattacaccgaaatgaagaaggcgatcctgcatgtgtactgggaagagttccagaaggaccctgtgggcctgatgagccgggtggcccagcctgccagcaagaagatcgatcagaacaagctgaaacctgagatggacgagaagggcaacctgaccaccgccggctttgcctgctctcagtgtggccagcccctgttcgtgtacaagctggagcaggtgtctgagaagggcaaggcttacaccaactacttcggacggtgcaatgtggccgagcacgaaaagctgatcctgctggcccagctgaagcccgagaaggatagcgacgaagccgtgacatatagcctgggaaagtttgggcagagggccctggatttctacagcattcatgtgaccaaggagtccacccaccccgtgaagcccctggcccagatcgccggaaacagatacgcctccggacctgtgggaaaggccctgagcgacgcatgtatgggcacaatcgcctccttcctgtctaagtaccaggacatcatcatcgaacaccagaaggtggtgaagggcaaccagaagagactggagagcctgcgggagctggccggcaaggaaaacctggaataccctagcgtgaccctgccacctcagcctcacaccaaggagggcgttgatgcctacaacgaagtgatcgcccgggtgcgaatgtgggtgaacctgaacctgtggcagaagctgaagctaagcagagatgatgccaagcctctgctgagactgaagggattcccttcctttcctctggtcgagagacaggccaacgaagtggactggtgggacatggtgtgtaacgtgaagaagctgatcaacgagaaaaaggaggatggcaaggtgttttggcagaatctggctggctacaagagacaggaagccctgagaccatacctgagcagcgaggaagatcggaagaagggaaagaaattcgctcggtaccagctgggcgacctgctgctgcacctggaaaagaagcacggcgaggactggggaaaggtgtacgacgaggcctgggagcggattgacaagaaagtggaaggcctgagcaagcacatcaagctggaagaggaacggagaagcgaggacgcccagagcaaggccgccctgaccgactggctgcgggctaaggccagcttcgtgatcgagggcctgaaggaggccgacaaggacgagttctgcagatgcgagctgaagctgcagaagtggtacggggacctgcggggaaagcccttcgccatcgaagccgagaacagcatcctggacatcagcggcttcagcaagcagtacaactgtgccttcatctggcagaaggacggcgtgaagaagctgaacctgtacctgatcatcaactacttcaagggcggcaagctgcggttcaagaagatcaaacctgaagccttcgaagccaacagattctacaccgtgatcaacaaaaagagcggcgagatcgtgcccatggaggtgaacttcaacttcgacgaccccaacctgatcatcctgcctctggcctttggcaagagacagggcagagaattcatctggaacgacctgctgtccctggaaaccggcagcctgaagctggccaacggaagagtgatcgagaagacactgtacaacagaagaacccggcaggatgagcctgccctgttcgtggccctgaccttcgagcggcgggaggtcctggactcctccaatatcaaaccaatgaacctgatcggcgtggcaagaggcgaaaacatccccgccgtgatcgccctgaccgaccccgagggctgcccactgagccggtttaaggatagcctgggaaacccaacccacatcctgagaatcggcgagagctataaggagaagcagcggaccatccaggccaagaaggaggtggagcagcggagagccggcggctacagccggaagtacgccagcaaagccaagaatctggcagacgatatggtgagaaacaccgctagagatctgctgtactacgccgtgacccaggatgccatgctgatcttcgccaacctgagccggggcttcggccggcagggcaagcggaccttcatggccgagagacagtacacacggatggaggactggctgaccgccaagctggcctacgagggcctgagcaagacctacctgtccaagacactggcccagtacacctccaagacatgcagcaactgtgggtttaccatcaccagcgccgactacgacagggtgctggagaagctgaagaagacagcaacaggctggatgaccacaattaacggcaaggagctgaaggtggagggccagattacctactacaacagatacaagagacagaacgtagtcaaggacctgtccgtcgagctggatagactgagcgaagaatctgtgaacaacgacatctcctcctggacaaagggcagaagcggagaagctctgagcctcctgaagaaaagattctcccatagacccgtgcaggagaagttcgtgtgcctgaactgcggcttcgagacacacgcagccgagcaagccgccctgaacatcgccagatcctggctgttcctgcggagccaggagtacaagaaataccagacaaacaagacaaccggcaacaccgataagagagccttcgtcgagacctggcagtccttttaccggaagaagcttaaggaggtgtggaaacctgccgtgcggtctggcggatctggcggaggctccaccagccccaagaaaaagagaaaagtctaagctgccttctgcggggcttgccttctggccatgcccttcttctctcccttgcacctgtacctcttggtctttgaataaagcctgagtaggaaggctagcaaaaaaaaaaaaaaaaaaaaaaaaaaaaaaaaaaaaaaaaaaaaaaaaaaaaaaaaaaaaaaaaaaaaaaaaaaaaaaaa

SEQ ID NO: 13618 - RNA, 5785 nt, synthetic construct
  source 1..5785: mol_type = other RNA
aggaaataagagagaaaagaagagtaagaagaaatataagagccaccatggcccctaagaagaagcgtaaagtgagccggatggaacgcctcgtctacgaggtgcggcagaagtgcagaaacatcgaggacatctgcatctcctgcggatctctgaacgtgaccctggagcacccactgttcatcggcggcatgtgccagaactgtaaaaactgttttctggagtgtgcctatcaatacgacgatgacggctaccagagctactgcaccatctgttgcggcggaagagaggtgctgatgtgtggaaataacaactgctgccggtgcttctgcgtggaatgcgtggacctgctggtgggccccggcgccgcccaggccgctattaaggaagatccttggaactgctacatgtgcggccacaagggcacatacggcctgctgagacggagagaggactggcctagcagactgcagatgttcttcgccaataaccacgaccaggagttcgacccccctaaggtgtaccctcccgtccccgccgagaagagaaagcccatccgggtcctgagcctgttcgatggcatcgccaccggtctgctggtgctgaaggacctgggcatccaggtggataggtacattgcctccgaggtgtgcgaggactccatcaccgtgggaatggtgcgtcatcagggcaagatcatgtacgtgggcgacgtgcggagcgtgacacagaagcatatccaggagtggggccctttcgacctggtgatcggcggcagcccttgcaatgacctgagcatcgtgaacccagcccggaagggcctgtacgagggaaccggcagactgttcttcgagttttacagactgctgcacgacgcccggcctaaggaaggcgacgaccggcccttcttttggctgttcgagaatgtggtggccatgggagtcagcgacaagcgggatattagccggttcctggagagcaaccccgtgatgatcgatgccaaggaagtgagcgccgcccaccgggccagatacttctggggcaatctgcctggcatgaacagacccctggccagcaccgtgaacgacaagctggagctgcaggagtgcctggagcacggccggatcgccaagttcagcaaggtgagaaccatcaccacccgaagcaacagcatcaaacaaggcaaggaccagcactttcctgtgttcatgaacgagaaggaggacatcctgtggtgtaccgagatggagagagtgttcgggttcccagtccactacacagatgtcagcaacatgtctagactggccagacagagactgctgggaagaagctggtccgtccctgtgatcagacacctgttcgcccctctgaaggagtacttcgcctgcgtgagcagcggcaacagcaacgccaacagccggggccccagcttctctagcggcctggtgccactgtccctgagagggagccacatgggccccatggagatctacaaaaccgtgagcgcctggaagcggcagcctgtgcgcgtgctgagcctgtttcggaatatcgataaagtcctgaaaagcctgggattcctggagagcggctctggctccggcggtggcaccctgaagtacgtggaggatgtgacaaacgtggtcagacgggatgtggagaagtggggccccttcgatctggtgtacggcagcacccaacccctgggcagctcttgtgaccggtgccctggctggtacatgtttcagttccaccggatcctgcagtacgccctgccgagacaggagtcccagcggccattcttttggattttcatggacaacttgctgctgaccgaggatgaccaggaaactaccactcggttcctgcagaccgaagccgtgaccctgcaggacgtgagaggccgggactaccagaacgccatgcgggtgtggtccaacatccctggactgaaaagcaagcacgcacctctgacccctaaagaagaggagtacctgcaggcccaggtgcggagcagaagcaagctggacgcccctaaggtggatctgctggtgaagaattgcctcctgcccctgagagagtacttcaagtatttcagccagaatagtctgcccctgggaggcagcggcggcggcctgcaggccagcgtgaccttcgaggacgtggccgtggacttcagcgccgaggagtggaggaggctgaggcccctgcagagggagctgtacagggaggtgatgctggagaactacaggagcctggcctggctgggcctggccgccagcaagcccggcgtgatctgcaggctggagaggggcgaggcccccagggagcccgaccccgacggcccccagagcggctgggccgactgcggcaccggcggcggcccaagcagcggcgcccctcctcccagcggcggcagcccagccggctccccaacctctaccgaggagggcacctctgagtccgccacccccgagagcggccctggcacctccaccgagcccagcgagggcagcgcacccggcagccctgccggcagccccacctccacagaggagggaaccagcaccgagcccagcgaaggcagcgccccaggcaccagcaccgagcctagtgagcaggagattaaacggatcaacaagatcagaagaagacttgtgaaagacagcaacaccaagaaggccggcaagacaggccccatgaaaaccctgctggttagagtgatgacacccgatctgagagagcggctggaaaacctgagaaagaagcctgaaaatatcccccagcccatcagcaatacatctagagccaacctgaataagctgctgaccgattacaccgaaatgaagaaggcgatcctgcatgtgtactgggaagagttccagaaggaccctgtgggcctgatgagccgggtggcccagcctgccagcaagaagatcgatcagaacaagctgaaacctgagatggacgagaagggcaacctgaccaccgccggctttgcctgctctcagtgtggccagcccctgttcgtgtacaagctggagcaggtgtctgagaagggcaaggcttacaccaactacttcggacggtgcaatgtggccgagcacgaaaagctgatcctgctggcccagctgaagcccgagaaggatagcgacgaagccgtgacatatagcctgggaaagtttgggcagagggccctggatttctacagcattcatgtgaccaaggagtccacccaccccgtgaagcccctggcccagatcgccggaaacagatacgcctccggacctgtgggaaaggccctgagcgacgcatgtatgggcacaatcgcctccttcctgtctaagtaccaggacatcatcatcgaacaccagaaggtggtgaagggcaaccagaagagactggagagcctgcgggagctggccggcaaggaaaacctggaataccctagcgtgaccctgccacctcagcctcacaccaaggagggcgttgatgcctacaacgaagtgatcgcccgggtgcgaatgtgggtgaacctgaacctgtggcagaagctgaagctaagcagagatgatgccaagcctctgctgagactgaagggattcccttcctttcctctggtcgagagacaggccaacgaagtggactggtgggacatggtgtgtaacgtgaagaagctgatcaacgagaaaaaggaggatggcaaggtgttttggcagaatctggctggctacaagagacaggaagccctgagaccatacctgagcagcgaggaagatcggaagaagggaaagaaattcgctcggtaccagctgggcgacctgctgctgcacctggaaaagaagcacggcgaggactggggaaaggtgtacgacgaggcctgggagcggattgacaagaaagtggaaggcctgagcaagcacatcaagctggaagaggaacggagaagcgaggacgcccagagcaaggccgccctgaccgactggctgcgggctaaggccagcttcgtgatcgagggcctgaaggaggccgacaaggacgagttctgcagatgcgagctgaagctgcagaagtggtacggggacctgcggggaaagcccttcgccatcgaagccgagaacagcatcctggacatcagcggcttcagcaagcagtacaactgtgccttcatctggcagaaggacggcgtgaagaagctgaacctgtacctgatcatcaactacttcaagggcggcaagctgcggttcaagaagatcaaacctgaagccttcgaagccaacagattctacaccgtgatcaacaaaaagagcggcgagatcgtgcccatggaggtgaacttcaacttcgacgaccccaacctgatcatcctgcctctggcctttggcaagagacagggcagagaattcatctggaacgacctgctgtccctggaaaccggcagcctgaagctggccaacggaagagtgatcgagaagacactgtacaacagaagaacccggcaggatgagcctgccctgttcgtggccctgaccttcgagcggcgggaggtcctggactcctccaatatcaaaccaatgaacctgatcggcgtggcaagaggcgaaaacatccccgccgtgatcgccctgaccgaccccgagggctgcccactgagccggtttaaggatagcctgggaaacccaacccacatcctgagaatcggcgagagctataaggagaagcagcggaccatccaggccaagaaggaggtggagcagcggagagccggcggctacagccggaagtacgccagcaaagccaagaatctggcagacgatatggtgagaaacaccgctagagatctgctgtactacgccgtgacccaggatgccatgctgatcttcgccaacctgagccggggcttcggccggcagggcaagcggaccttcatggccgagagacagtacacacggatggaggactggctgaccgccaagctggcctacgagggcctgagcaagacctacctgtccaagacactggcccagtacacctccaagacatgcagcaactgtgggtttaccatcaccagcgccgactacgacagggtgctggagaagctgaagaagacagcaacaggctggatgaccacaattaacggcaaggagctgaaggtggagggccagattacctactacaacagatacaagagacagaacgtagtcaaggacctgtccgtcgagctggatagactgagcgaagaatctgtgaacaacgacatctcctcctggacaaagggcagaagcggagaagctctgagcctcctgaagaaaagattctcccatagacccgtgcaggagaagttcgtgtgcctgaactgcggcttcgagacacacgcagccgagcaagccgccctgaacatcgccagatcctggctgttcctgcggagccaggagtacaagaaataccagacaaacaagacaaccggcaacaccgataagagagccttcgtcgagacctggcagtccttttaccggaagaagcttaaggaggtgtggaaacctgccgtgcggtctggcggatctggcggaggctccaccagccccaagaaaaagagaaaagtctaagctgccttctgcggggcttgccttctggccatgcccttcttctctcccttgcacctgtacctcttggtctttgaataaagcctgagtaggaaggctagcaaaaaaaaaaaaaaaaaaaaaaaaaaaaaaaaaaaaaaaaaaaaaaaaaaaaaaaaaaaaaaaaaaaaaaaaaaaaaaaa

SEQ ID NO: 13619 - RNA, 5785 nt, synthetic construct
  source 1..5785: mol_type = other RNA
aggaaataagagagaaaagaagagtaagaagaaatataagagccaccatggcccctaagaagaagcgtaaagtgagccggatggaacgcctcgtctacgaggtgcggcagaagtgcagaaacatcgaggacatctgcatctcctgcggatctctgaacgtgaccctggagcacccactgttcatcggcggcatgtgccagaactgtaaaaactgttttctggagtgtgcctatcaatacgacgatgacggctaccagagctactgcaccatctgttgcggcggaagagaggtgctgatgtgtggaaataacaactgctgccggtgcttctgcgtggaatgcgtggacctgctggtgggccccggcgccgcccaggccgctattaaggaagatccttggaactgctacatgtgcggccacaagggcacatacggcctgctgagacggagagaggactggcctagcagactgcagatgttcttcgccaataaccacgaccaggagttcgacccccctaaggtgtaccctcccgtccccgccgagaagagaaagcccatccgggtcctgagcctgttcgatggcatcgccaccggtctgctggtgctgaaggacctgggcatccaggtggataggtacattgcctccgaggtgtgcgaggactccatcaccgtgggaatggtgcgtcatcagggcaagatcatgtacgtgggcgacgtgcggagcgtgacacagaagcatatccaggagtggggccctttcgacctggtgatcggcggcagcccttgcaatgacctgagcatcgtgaacccagcccggaagggcctgtacgagggaaccggcagactgttcttcgagttttacagactgctgcacgacgcccggcctaaggaaggcgacgaccggcccttcttttggctgttcgagaatgtggtggccatgggagtcagcgacaagcgggatattagccggttcctggagagcaaccccgtgatgatcgatgccaaggaagtgagcgccgcccaccgggccagatacttctggggcaatctgcctggcatgaacagacccctggccagcaccgtgaacgacaagctggagctgcaggagtgcctggagcacggccggatcgccaagttcagcaaggtgagaaccatcaccacccgaagcaacagcatcaaacaaggcaaggaccagcactttcctgtgttcatgaacgagaaggaggacatcctgtggtgtaccgagatggagagagtgttcgggttcccagtccactacacagatgtcagcaacatgtctagactggccagacagagactgctgggaagaagctggtccgtccctgtgatcagacacctgttcgcccctctgaaggagtacttcgcctgcgtgagcagcggcaacagcaacgccaacagccggggccccagcttctctagcggcctggtgccactgtccctgagagggagccacatgggccccatggagatctacaaaaccgtgagcgcctggaagcggcagcctgtgcgcgtgctgagcctgtttcggaatatcgataaagtcctgaaaagcctgggattcctggagagcggctctggctccggcggtggcaccctgaagtacgtggaggatgtgacaaacgtggtcagacgggatgtggagaagtggggccccttcgatctggtgtacggcagcacccaacccctgggcagctcttgtgaccggtgccctggctggtacatgtttcagttccaccggatcctgcagtacgccctgccgagacaggagtcccagcggccattcttttggattttcatggacaacttgctgctgaccgaggatgaccaggaaactaccactcggttcctgcagaccgaagccgtgaccctgcaggacgtgagaggccgggactaccagaacgccatgcgggtgtggtccaacatccctggactgaaaagcaagcacgcacctctgacccctaaagaagaggagtacctgcaggcccaggtgcggagcagaagcaagctggacgcccctaaggtggatctgctggtgaagaattgcctcctgcccctgagagagtacttcaagtatttcagccagaatagtctgcccctgggaggcagcggcggcggcagccagggcctggtgaccttcggcgacgtggccgtggtgttcagccaggaggagtgggagtggctgagcagcgagcagaggagcctgtactggaaggtgatgctggacaactacaggaacctggccagcctgggcctgtgcgccagcaagcccgacatgatcaccagcctggagcagggcagggacccctggatgatgaagaggaagatgaggaagggccagaggctggacctgaaggccatgggcggcccaagcagcggcgcccctcctcccagcggcggcagcccagccggctccccaacctctaccgaggagggcacctctgagtccgccacccccgagagcggccctggcacctccaccgagcccagcgagggcagcgcacccggcagccctgccggcagccccacctccacagaggagggaaccagcaccgagcccagcgaaggcagcgccccaggcaccagcaccgagcctagtgagcaggagattaaacggatcaacaagatcagaagaagacttgtgaaagacagcaacaccaagaaggccggcaagacaggccccatgaaaaccctgctggttagagtgatgacacccgatctgagagagcggctggaaaacctgagaaagaagcctgaaaatatcccccagcccatcagcaatacatctagagccaacctgaataagctgctgaccgattacaccgaaatgaagaaggcgatcctgcatgtgtactgggaagagttccagaaggaccctgtgggcctgatgagccgggtggcccagcctgccagcaagaagatcgatcagaacaagctgaaacctgagatggacgagaagggcaacctgaccaccgccggctttgcctgctctcagtgtggccagcccctgttcgtgtacaagctggagcaggtgtctgagaagggcaaggcttacaccaactacttcggacggtgcaatgtggccgagcacgaaaagctgatcctgctggcccagctgaagcccgagaaggatagcgacgaagccgtgacatatagcctgggaaagtttgggcagagggccctggatttctacagcattcatgtgaccaaggagtccacccaccccgtgaagcccctggcccagatcgccggaaacagatacgcctccggacctgtgggaaaggccctgagcgacgcatgtatgggcacaatcgcctccttcctgtctaagtaccaggacatcatcatcgaacaccagaaggtggtgaagggcaaccagaagagactggagagcctgcgggagctggccggcaaggaaaacctggaataccctagcgtgaccctgccacctcagcctcacaccaaggagggcgttgatgcctacaacgaagtgatcgcccgggtgcgaatgtgggtgaacctgaacctgtggcagaagctgaagctaagcagagatgatgccaagcctctgctgagactgaagggattcccttcctttcctctggtcgagagacaggccaacgaagtggactggtgggacatggtgtgtaacgtgaagaagctgatcaacgagaaaaaggaggatggcaaggtgttttggcagaatctggctggctacaagagacaggaagccctgagaccatacctgagcagcgaggaagatcggaagaagggaaagaaattcgctcggtaccagctgggcgacctgctgctgcacctggaaaagaagcacggcgaggactggggaaaggtgtacgacgaggcctgggagcggattgacaagaaagtggaaggcctgagcaagcacatcaagctggaagaggaacggagaagcgaggacgcccagagcaaggccgccctgaccgactggctgcgggctaaggccagcttcgtgatcgagggcctgaaggaggccgacaaggacgagttctgcagatgcgagctgaagctgcagaagtggtacggggacctgcggggaaagcccttcgccatcgaagccgagaacagcatcctggacatcagcggcttcagcaagcagtacaactgtgccttcatctggcagaaggacggcgtgaagaagctgaacctgtacctgatcatcaactacttcaagggcggcaagctgcggttcaagaagatcaaacctgaagccttcgaagccaacagattctacaccgtgatcaacaaaaagagcggcgagatcgtgcccatggaggtgaacttcaacttcgacgaccccaacctgatcatcctgcctctggcctttggcaagagacagggcagagaattcatctggaacgacctgctgtccctggaaaccggcagcctgaagctggccaacggaagagtgatcgagaagacactgtacaacagaagaacccggcaggatgagcctgccctgttcgtggccctgaccttcgagcggcgggaggtcctggactcctccaatatcaaaccaatgaacctgatcggcgtggcaagaggcgaaaacatccccgccgtgatcgccctgaccgaccccgagggctgcccactgagccggtttaaggatagcctgggaaacccaacccacatcctgagaatcggcgagagctataaggagaagcagcggaccatccaggccaagaaggaggtggagcagcggagagccggcggctacagccggaagtacgccagcaaagccaagaatctggcagacgatatggtgagaaacaccgctagagatctgctgtactacgccgtgacccaggatgccatgctgatcttcgccaacctgagccggggcttcggccggcagggcaagcggaccttcatggccgagagacagtacacacggatggaggactggctgaccgccaagctggcctacgagggcctgagcaagacctacctgtccaagacactggcccagtacacctccaagacatgcagcaactgtgggtttaccatcaccagcgccgactacgacagggtgctggagaagctgaagaagacagcaacaggctggatgaccacaattaacggcaaggagctgaaggtggagggccagattacctactacaacagatacaagagacagaacgtagtcaaggacctgtccgtcgagctggatagactgagcgaagaatctgtgaacaacgacatctcctcctggacaaagggcagaagcggagaagctctgagcctcctgaagaaaagattctcccatagacccgtgcaggagaagttcgtgtgcctgaactgcggcttcgagacacacgcagccgagcaagccgccctgaacatcgccagatcctggctgttcctgcggagccaggagtacaagaaataccagacaaacaagacaaccggcaacaccgataagagagccttcgtcgagacctggcagtccttttaccggaagaagcttaaggaggtgtggaaacctgccgtgcggtctggcggatctggcggaggctccaccagccccaagaaaaagagaaaagtctaagctgccttctgcggggcttgccttctggccatgcccttcttctctcccttgcacctgtacctcttggtctttgaataaagcctgagtaggaaggctagcaaaaaaaaaaaaaaaaaaaaaaaaaaaaaaaaaaaaaaaaaaaaaaaaaaaaaaaaaaaaaaaaaaaaaaaaaaaaaaaa

SEQ ID NO: 13620 - RNA, 5785 nt, synthetic construct
  source 1..5785: mol_type = other RNA
aggaaataagagagaaaagaagagtaagaagaaatataagagccaccatggcccctaagaagaagcgtaaagtgagccggatggaacgcctcgtctacgaggtgcggcagaagtgcagaaacatcgaggacatctgcatctcctgcggatctctgaacgtgaccctggagcacccactgttcatcggcggcatgtgccagaactgtaaaaactgttttctggagtgtgcctatcaatacgacgatgacggctaccagagctactgcaccatctgttgcggcggaagagaggtgctgatgtgtggaaataacaactgctgccggtgcttctgcgtggaatgcgtggacctgctggtgggccccggcgccgcccaggccgctattaaggaagatccttggaactgctacatgtgcggccacaagggcacatacggcctgctgagacggagagaggactggcctagcagactgcagatgttcttcgccaataaccacgaccaggagttcgacccccctaaggtgtaccctcccgtccccgccgagaagagaaagcccatccgggtcctgagcctgttcgatggcatcgccaccggtctgctggtgctgaaggacctgggcatccaggtggataggtacattgcctccgaggtgtgcgaggactccatcaccgtgggaatggtgcgtcatcagggcaagatcatgtacgtgggcgacgtgcggagcgtgacacagaagcatatccaggagtggggccctttcgacctggtgatcggcggcagcccttgcaatgacctgagcatcgtgaacccagcccggaagggcctgtacgagggaaccggcagactgttcttcgagttttacagactgctgcacgacgcccggcctaaggaaggcgacgaccggcccttcttttggctgttcgagaatgtggtggccatgggagtcagcgacaagcgggatattagccggttcctggagagcaaccccgtgatgatcgatgccaaggaagtgagcgccgcccaccgggccagatacttctggggcaatctgcctggcatgaacagacccctggccagcaccgtgaacgacaagctggagctgcaggagtgcctggagcacggccggatcgccaagttcagcaaggtgagaaccatcaccacccgaagcaacagcatcaaacaaggcaaggaccagcactttcctgtgttcatgaacgagaaggaggacatcctgtggtgtaccgagatggagagagtgttcgggttcccagtccactacacagatgtcagcaacatgtctagactggccagacagagactgctgggaagaagctggtccgtccctgtgatcagacacctgttcgcccctctgaaggagtacttcgcctgcgtgagcagcggcaacagcaacgccaacagccggggccccagcttctctagcggcctggtgccactgtccctgagagggagccacatgggccccatggagatctacaaaaccgtgagcgcctggaagcggcagcctgtgcgcgtgctgagcctgtttcggaatatcgataaagtcctgaaaagcctgggattcctggagagcggctctggctccggcggtggcaccctgaagtacgtggaggatgtgacaaacgtggtcagacgggatgtggagaagtggggccccttcgatctggtgtacggcagcacccaacccctgggcagctcttgtgaccggtgccctggctggtacatgtttcagttccaccggatcctgcagtacgccctgccgagacaggagtcccagcggccattcttttggattttcatggacaacttgctgctgaccgaggatgaccaggaaactaccactcggttcctgcagaccgaagccgtgaccctgcaggacgtgagaggccgggactaccagaacgccatgcgggtgtggtccaacatccctggactgaaaagcaagcacgcacctctgacccctaaagaagaggagtacctgcaggcccaggtgcggagcagaagcaagctggacgcccctaaggtggatctgctggtgaagaattgcctcctgcccctgagagagtacttcaagtatttcagccagaatagtctgcccctgggaggcagcggcggcggcaggcccgagctggtgaccttcgaggacgtggccgtgtacttcagcgagaacgagtggaccagcctggcccccacccagagggtgctgtacagggacgtgatgctggagaactacggcgccgtggccagcctggccgtgcccttccccaagcccgccctgatcagccagctggagaggggcgaggccccctggtgcaaggccccccagggcgccctggacggcgagggccccaggggcatcagcggcggcccaagcagcggcgcccctcctcccagcggcggcagcccagccggctccccaacctctaccgaggagggcacctctgagtccgccacccccgagagcggccctggcacctccaccgagcccagcgagggcagcgcacccggcagccctgccggcagccccacctccacagaggagggaaccagcaccgagcccagcgaaggcagcgccccaggcaccagcaccgagcctagtgagcaggagattaaacggatcaacaagatcagaagaagacttgtgaaagacagcaacaccaagaaggccggcaagacaggccccatgaaaaccctgctggttagagtgatgacacccgatctgagagagcggctggaaaacctgagaaagaagcctgaaaatatcccccagcccatcagcaatacatctagagccaacctgaataagctgctgaccgattacaccgaaatgaagaaggcgatcctgcatgtgtactgggaagagttccagaaggaccctgtgggcctgatgagccgggtggcccagcctgccagcaagaagatcgatcagaacaagctgaaacctgagatggacgagaagggcaacctgaccaccgccggctttgcctgctctcagtgtggccagcccctgttcgtgtacaagctggagcaggtgtctgagaagggcaaggcttacaccaactacttcggacggtgcaatgtggccgagcacgaaaagctgatcctgctggcccagctgaagcccgagaaggatagcgacgaagccgtgacatatagcctgggaaagtttgggcagagggccctggatttctacagcattcatgtgaccaaggagtccacccaccccgtgaagcccctggcccagatcgccggaaacagatacgcctccggacctgtgggaaaggccctgagcgacgcatgtatgggcacaatcgcctccttcctgtctaagtaccaggacatcatcatcgaacaccagaaggtggtgaagggcaaccagaagagactggagagcctgcgggagctggccggcaaggaaaacctggaataccctagcgtgaccctgccacctcagcctcacaccaaggagggcgttgatgcctacaacgaagtgatcgcccgggtgcgaatgtgggtgaacctgaacctgtggcagaagctgaagctaagcagagatgatgccaagcctctgctgagactgaagggattcccttcctttcctctggtcgagagacaggccaacgaagtggactggtgggacatggtgtgtaacgtgaagaagctgatcaacgagaaaaaggaggatggcaaggtgttttggcagaatctggctggctacaagagacaggaagccctgagaccatacctgagcagcgaggaagatcggaagaagggaaagaaattcgctcggtaccagctgggcgacctgctgctgcacctggaaaagaagcacggcgaggactggggaaaggtgtacgacgaggcctgggagcggattgacaagaaagtggaaggcctgagcaagcacatcaagctggaagaggaacggagaagcgaggacgcccagagcaaggccgccctgaccgactggctgcgggctaaggccagcttcgtgatcgagggcctgaaggaggccgacaaggacgagttctgcagatgcgagctgaagctgcagaagtggtacggggacctgcggggaaagcccttcgccatcgaagccgagaacagcatcctggacatcagcggcttcagcaagcagtacaactgtgccttcatctggcagaaggacggcgtgaagaagctgaacctgtacctgatcatcaactacttcaagggcggcaagctgcggttcaagaagatcaaacctgaagccttcgaagccaacagattctacaccgtgatcaacaaaaagagcggcgagatcgtgcccatggaggtgaacttcaacttcgacgaccccaacctgatcatcctgcctctggcctttggcaagagacagggcagagaattcatctggaacgacctgctgtccctggaaaccggcagcctgaagctggccaacggaagagtgatcgagaagacactgtacaacagaagaacccggcaggatgagcctgccctgttcgtggccctgaccttcgagcggcgggaggtcctggactcctccaatatcaaaccaatgaacctgatcggcgtggcaagaggcgaaaacatccccgccgtgatcgccctgaccgaccccgagggctgcccactgagccggtttaaggatagcctgggaaacccaacccacatcctgagaatcggcgagagctataaggagaagcagcggaccatccaggccaagaaggaggtggagcagcggagagccggcggctacagccggaagtacgccagcaaagccaagaatctggcagacgatatggtgagaaacaccgctagagatctgctgtactacgccgtgacccaggatgccatgctgatcttcgccaacctgagccggggcttcggccggcagggcaagcggaccttcatggccgagagacagtacacacggatggaggactggctgaccgccaagctggcctacgagggcctgagcaagacctacctgtccaagacactggcccagtacacctccaagacatgcagcaactgtgggtttaccatcaccagcgccgactacgacagggtgctggagaagctgaagaagacagcaacaggctggatgaccacaattaacggcaaggagctgaaggtggagggccagattacctactacaacagatacaagagacagaacgtagtcaaggacctgtccgtcgagctggatagactgagcgaagaatctgtgaacaacgacatctcctcctggacaaagggcagaagcggagaagctctgagcctcctgaagaaaagattctcccatagacccgtgcaggagaagttcgtgtgcctgaactgcggcttcgagacacacgcagccgagcaagccgccctgaacatcgccagatcctggctgttcctgcggagccaggagtacaagaaataccagacaaacaagacaaccggcaacaccgataagagagccttcgtcgagacctggcagtccttttaccggaagaagcttaaggaggtgtggaaacctgccgtgcggtctggcggatctggcggaggctccaccagccccaagaaaaagagaaaagtctaagctgccttctgcggggcttgccttctggccatgcccttcttctctcccttgcacctgtacctcttggtctttgaataaagcctgagtaggaaggctagcaaaaaaaaaaaaaaaaaaaaaaaaaaaaaaaaaaaaaaaaaaaaaaaaaaaaaaaaaaaaaaaaaaaaaaaaaaaaaaaa

SEQ ID NO: 13621 - RNA, 5785 nt, synthetic construct
  source 1..5785: mol_type = other RNA
aggaaataagagagaaaagaagagtaagaagaaatataagagccaccatggcccctaagaagaagcgtaaagtgagccggatggaacgcctcgtctacgaggtgcggcagaagtgcagaaacatcgaggacatctgcatctcctgcggatctctgaacgtgaccctggagcacccactgttcatcggcggcatgtgccagaactgtaaaaactgttttctggagtgtgcctatcaatacgacgatgacggctaccagagctactgcaccatctgttgcggcggaagagaggtgctgatgtgtggaaataacaactgctgccggtgcttctgcgtggaatgcgtggacctgctggtgggccccggcgccgcccaggccgctattaaggaagatccttggaactgctacatgtgcggccacaagggcacatacggcctgctgagacggagagaggactggcctagcagactgcagatgttcttcgccaataaccacgaccaggagttcgacccccctaaggtgtaccctcccgtccccgccgagaagagaaagcccatccgggtcctgagcctgttcgatggcatcgccaccggtctgctggtgctgaaggacctgggcatccaggtggataggtacattgcctccgaggtgtgcgaggactccatcaccgtgggaatggtgcgtcatcagggcaagatcatgtacgtgggcgacgtgcggagcgtgacacagaagcatatccaggagtggggccctttcgacctggtgatcggcggcagcccttgcaatgacctgagcatcgtgaacccagcccggaagggcctgtacgagggaaccggcagactgttcttcgagttttacagactgctgcacgacgcccggcctaaggaaggcgacgaccggcccttcttttggctgttcgagaatgtggtggccatgggagtcagcgacaagcgggatattagccggttcctggagagcaaccccgtgatgatcgatgccaaggaagtgagcgccgcccaccgggccagatacttctggggcaatctgcctggcatgaacagacccctggccagcaccgtgaacgacaagctggagctgcaggagtgcctggagcacggccggatcgccaagttcagcaaggtgagaaccatcaccacccgaagcaacagcatcaaacaaggcaaggaccagcactttcctgtgttcatgaacgagaaggaggacatcctgtggtgtaccgagatggagagagtgttcgggttcccagtccactacacagatgtcagcaacatgtctagactggccagacagagactgctgggaagaagctggtccgtccctgtgatcagacacctgttcgcccctctgaaggagtacttcgcctgcgtgagcagcggcaacagcaacgccaacagccggggccccagcttctctagcggcctggtgccactgtccctgagagggagccacatgggccccatggagatctacaaaaccgtgagcgcctggaagcggcagcctgtgcgcgtgctgagcctgtttcggaatatcgataaagtcctgaaaagcctgggattcctggagagcggctctggctccggcggtggcaccctgaagtacgtggaggatgtgacaaacgtggtcagacgggatgtggagaagtggggccccttcgatctggtgtacggcagcacccaacccctgggcagctcttgtgaccggtgccctggctggtacatgtttcagttccaccggatcctgcagtacgccctgccgagacaggagtcccagcggccattcttttggattttcatggacaacttgctgctgaccgaggatgaccaggaaactaccactcggttcctgcagaccgaagccgtgaccctgcaggacgtgagaggccgggactaccagaacgccatgcgggtgtggtccaacatccctggactgaaaagcaagcacgcacctctgacccctaaagaagaggagtacctgcaggcccaggtgcggagcagaagcaagctggacgcccctaaggtggatctgctggtgaagaattgcctcctgcccctgagagagtacttcaagtatttcagccagaatagtctgcccctgggaggcagcggcggcggcttccagggcagcgtgaccttcgaggacgtggccatcgccttcagccagcaggagtgggagagcctggacagcagccagaggggcctgtacagggacgtgatgctggagaactacaggaacctggtgagcatggccggccacagcctgagcaagccccacgtgatcgccctgctggagaggtggaaggagcccaaggtgaccgagaggaaggacggcaggaggtggtgcaccgacctgcagctgggcggcccaagcagcggcgcccctcctcccagcggcggcagcccagccggctccccaacctctaccgaggagggcacctctgagtccgccacccccgagagcggccctggcacctccaccgagcccagcgagggcagcgcacccggcagccctgccggcagccccacctccacagaggagggaaccagcaccgagcccagcgaaggcagcgccccaggcaccagcaccgagcctagtgagcaggagattaaacggatcaacaagatcagaagaagacttgtgaaagacagcaacaccaagaaggccggcaagacaggccccatgaaaaccctgctggttagagtgatgacacccgatctgagagagcggctggaaaacctgagaaagaagcctgaaaatatcccccagcccatcagcaatacatctagagccaacctgaataagctgctgaccgattacaccgaaatgaagaaggcgatcctgcatgtgtactgggaagagttccagaaggaccctgtgggcctgatgagccgggtggcccagcctgccagcaagaagatcgatcagaacaagctgaaacctgagatggacgagaagggcaacctgaccaccgccggctttgcctgctctcagtgtggccagcccctgttcgtgtacaagctggagcaggtgtctgagaagggcaaggcttacaccaactacttcggacggtgcaatgtggccgagcacgaaaagctgatcctgctggcccagctgaagcccgagaaggatagcgacgaagccgtgacatatagcctgggaaagtttgggcagagggccctggatttctacagcattcatgtgaccaaggagtccacccaccccgtgaagcccctggcccagatcgccggaaacagatacgcctccggacctgtgggaaaggccctgagcgacgcatgtatgggcacaatcgcctccttcctgtctaagtaccaggacatcatcatcgaacaccagaaggtggtgaagggcaaccagaagagactggagagcctgcgggagctggccggcaaggaaaacctggaataccctagcgtgaccctgccacctcagcctcacaccaaggagggcgttgatgcctacaacgaagtgatcgcccgggtgcgaatgtgggtgaacctgaacctgtggcagaagctgaagctaagcagagatgatgccaagcctctgctgagactgaagggattcccttcctttcctctggtcgagagacaggccaacgaagtggactggtgggacatggtgtgtaacgtgaagaagctgatcaacgagaaaaaggaggatggcaaggtgttttggcagaatctggctggctacaagagacaggaagccctgagaccatacctgagcagcgaggaagatcggaagaagggaaagaaattcgctcggtaccagctgggcgacctgctgctgcacctggaaaagaagcacggcgaggactggggaaaggtgtacgacgaggcctgggagcggattgacaagaaagtggaaggcctgagcaagcacatcaagctggaagaggaacggagaagcgaggacgcccagagcaaggccgccctgaccgactggctgcgggctaaggccagcttcgtgatcgagggcctgaaggaggccgacaaggacgagttctgcagatgcgagctgaagctgcagaagtggtacggggacctgcggggaaagcccttcgccatcgaagccgagaacagcatcctggacatcagcggcttcagcaagcagtacaactgtgccttcatctggcagaaggacggcgtgaagaagctgaacctgtacctgatcatcaactacttcaagggcggcaagctgcggttcaagaagatcaaacctgaagccttcgaagccaacagattctacaccgtgatcaacaaaaagagcggcgagatcgtgcccatggaggtgaacttcaacttcgacgaccccaacctgatcatcctgcctctggcctttggcaagagacagggcagagaattcatctggaacgacctgctgtccctggaaaccggcagcctgaagctggccaacggaagagtgatcgagaagacactgtacaacagaagaacccggcaggatgagcctgccctgttcgtggccctgaccttcgagcggcgggaggtcctggactcctccaatatcaaaccaatgaacctgatcggcgtggcaagaggcgaaaacatccccgccgtgatcgccctgaccgaccccgagggctgcccactgagccggtttaaggatagcctgggaaacccaacccacatcctgagaatcggcgagagctataaggagaagcagcggaccatccaggccaagaaggaggtggagcagcggagagccggcggctacagccggaagtacgccagcaaagccaagaatctggcagacgatatggtgagaaacaccgctagagatctgctgtactacgccgtgacccaggatgccatgctgatcttcgccaacctgagccggggcttcggccggcagggcaagcggaccttcatggccgagagacagtacacacggatggaggactggctgaccgccaagctggcctacgagggcctgagcaagacctacctgtccaagacactggcccagtacacctccaagacatgcagcaactgtgggtttaccatcaccagcgccgactacgacagggtgctggagaagctgaagaagacagcaacaggctggatgaccacaattaacggcaaggagctgaaggtggagggccagattacctactacaacagatacaagagacagaacgtagtcaaggacctgtccgtcgagctggatagactgagcgaagaatctgtgaacaacgacatctcctcctggacaaagggcagaagcggagaagctctgagcctcctgaagaaaagattctcccatagacccgtgcaggagaagttcgtgtgcctgaactgcggcttcgagacacacgcagccgagcaagccgccctgaacatcgccagatcctggctgttcctgcggagccaggagtacaagaaataccagacaaacaagacaaccggcaacaccgataagagagccttcgtcgagacctggcagtccttttaccggaagaagcttaaggaggtgtggaaacctgccgtgcggtctggcggatctggcggaggctccaccagccccaagaaaaagagaaaagtctaagctgccttctgcggggcttgccttctggccatgcccttcttctctcccttgcacctgtacctcttggtctttgaataaagcctgagtaggaaggctagcaaaaaaaaaaaaaaaaaaaaaaaaaaaaaaaaaaaaaaaaaaaaaaaaaaaaaaaaaaaaaaaaaaaaaaaaaaaaaaaa

SEQ ID NO: 13622 - RNA, 5785 nt, synthetic construct
  source 1..5785: mol_type = other RNA
aggaaataagagagaaaagaagagtaagaagaaatataagagccaccatggcccctaagaagaagcgtaaagtgagccggatggaacgcctcgtctacgaggtgcggcagaagtgcagaaacatcgaggacatctgcatctcctgcggatctctgaacgtgaccctggagcacccactgttcatcggcggcatgtgccagaactgtaaaaactgttttctggagtgtgcctatcaatacgacgatgacggctaccagagctactgcaccatctgttgcggcggaagagaggtgctgatgtgtggaaataacaactgctgccggtgcttctgcgtggaatgcgtggacctgctggtgggccccggcgccgcccaggccgctattaaggaagatccttggaactgctacatgtgcggccacaagggcacatacggcctgctgagacggagagaggactggcctagcagactgcagatgttcttcgccaataaccacgaccaggagttcgacccccctaaggtgtaccctcccgtccccgccgagaagagaaagcccatccgggtcctgagcctgttcgatggcatcgccaccggtctgctggtgctgaaggacctgggcatccaggtggataggtacattgcctccgaggtgtgcgaggactccatcaccgtgggaatggtgcgtcatcagggcaagatcatgtacgtgggcgacgtgcggagcgtgacacagaagcatatccaggagtggggccctttcgacctggtgatcggcggcagcccttgcaatgacctgagcatcgtgaacccagcccggaagggcctgtacgagggaaccggcagactgttcttcgagttttacagactgctgcacgacgcccggcctaaggaaggcgacgaccggcccttcttttggctgttcgagaatgtggtggccatgggagtcagcgacaagcgggatattagccggttcctggagagcaaccccgtgatgatcgatgccaaggaagtgagcgccgcccaccgggccagatacttctggggcaatctgcctggcatgaacagacccctggccagcaccgtgaacgacaagctggagctgcaggagtgcctggagcacggccggatcgccaagttcagcaaggtgagaaccatcaccacccgaagcaacagcatcaaacaaggcaaggaccagcactttcctgtgttcatgaacgagaaggaggacatcctgtggtgtaccgagatggagagagtgttcgggttcccagtccactacacagatgtcagcaacatgtctagactggccagacagagactgctgggaagaagctggtccgtccctgtgatcagacacctgttcgcccctctgaaggagtacttcgcctgcgtgagcagcggcaacagcaacgccaacagccggggccccagcttctctagcggcctggtgccactgtccctgagagggagccacatgggccccatggagatctacaaaaccgtgagcgcctggaagcggcagcctgtgcgcgtgctgagcctgtttcggaatatcgataaagtcctgaaaagcctgggattcctggagagcggctctggctccggcggtggcaccctgaagtacgtggaggatgtgacaaacgtggtcagacgggatgtggagaagtggggccccttcgatctggtgtacggcagcacccaacccctgggcagctcttgtgaccggtgccctggctggtacatgtttcagttccaccggatcctgcagtacgccctgccgagacaggagtcccagcggccattcttttggattttcatggacaacttgctgctgaccgaggatgaccaggaaactaccactcggttcctgcagaccgaagccgtgaccctgcaggacgtgagaggccgggactaccagaacgccatgcgggtgtggtccaacatccctggactgaaaagcaagcacgcacctctgacccctaaagaagaggagtacctgcaggcccaggtgcggagcagaagcaagctggacgcccctaaggtggatctgctggtgaagaattgcctcctgcccctgagagagtacttcaagtatttcagccagaatagtctgcccctgggaggcagcggcggcggcagcctggagagcgacgtgttcaccgacgtggccatcgtgttcagccaggaggagtgggagcagctggcccccgcccagagggacctgtacagggacgtgatgctggagacctacagcaacctggtgagcctgggcctggccatcgccaagcccgacgtgatcagcttcctggaggagggcaaggagccctgggtggtggagaagaccagcaggggcggcctgtgccccgtgctggagagcaggggcggcccaagcagcggcgcccctcctcccagcggcggcagcccagccggctccccaacctctaccgaggagggcacctctgagtccgccacccccgagagcggccctggcacctccaccgagcccagcgagggcagcgcacccggcagccctgccggcagccccacctccacagaggagggaaccagcaccgagcccagcgaaggcagcgccccaggcaccagcaccgagcctagtgagcaggagattaaacggatcaacaagatcagaagaagacttgtgaaagacagcaacaccaagaaggccggcaagacaggccccatgaaaaccctgctggttagagtgatgacacccgatctgagagagcggctggaaaacctgagaaagaagcctgaaaatatcccccagcccatcagcaatacatctagagccaacctgaataagctgctgaccgattacaccgaaatgaagaaggcgatcctgcatgtgtactgggaagagttccagaaggaccctgtgggcctgatgagccgggtggcccagcctgccagcaagaagatcgatcagaacaagctgaaacctgagatggacgagaagggcaacctgaccaccgccggctttgcctgctctcagtgtggccagcccctgttcgtgtacaagctggagcaggtgtctgagaagggcaaggcttacaccaactacttcggacggtgcaatgtggccgagcacgaaaagctgatcctgctggcccagctgaagcccgagaaggatagcgacgaagccgtgacatatagcctgggaaagtttgggcagagggccctggatttctacagcattcatgtgaccaaggagtccacccaccccgtgaagcccctggcccagatcgccggaaacagatacgcctccggacctgtgggaaaggccctgagcgacgcatgtatgggcacaatcgcctccttcctgtctaagtaccaggacatcatcatcgaacaccagaaggtggtgaagggcaaccagaagagactggagagcctgcgggagctggccggcaaggaaaacctggaataccctagcgtgaccctgccacctcagcctcacaccaaggagggcgttgatgcctacaacgaagtgatcgcccgggtgcgaatgtgggtgaacctgaacctgtggcagaagctgaagctaagcagagatgatgccaagcctctgctgagactgaagggattcccttcctttcctctggtcgagagacaggccaacgaagtggactggtgggacatggtgtgtaacgtgaagaagctgatcaacgagaaaaaggaggatggcaaggtgttttggcagaatctggctggctacaagagacaggaagccctgagaccatacctgagcagcgaggaagatcggaagaagggaaagaaattcgctcggtaccagctgggcgacctgctgctgcacctggaaaagaagcacggcgaggactggggaaaggtgtacgacgaggcctgggagcggattgacaagaaagtggaaggcctgagcaagcacatcaagctggaagaggaacggagaagcgaggacgcccagagcaaggccgccctgaccgactggctgcgggctaaggccagcttcgtgatcgagggcctgaaggaggccgacaaggacgagttctgcagatgcgagctgaagctgcagaagtggtacggggacctgcggggaaagcccttcgccatcgaagccgagaacagcatcctggacatcagcggcttcagcaagcagtacaactgtgccttcatctggcagaaggacggcgtgaagaagctgaacctgtacctgatcatcaactacttcaagggcggcaagctgcggttcaagaagatcaaacctgaagccttcgaagccaacagattctacaccgtgatcaacaaaaagagcggcgagatcgtgcccatggaggtgaacttcaacttcgacgaccccaacctgatcatcctgcctctggcctttggcaagagacagggcagagaattcatctggaacgacctgctgtccctggaaaccggcagcctgaagctggccaacggaagagtgatcgagaagacactgtacaacagaagaacccggcaggatgagcctgccctgttcgtggccctgaccttcgagcggcgggaggtcctggactcctccaatatcaaaccaatgaacctgatcggcgtggcaagaggcgaaaacatccccgccgtgatcgccctgaccgaccccgagggctgcccactgagccggtttaaggatagcctgggaaacccaacccacatcctgagaatcggcgagagctataaggagaagcagcggaccatccaggccaagaaggaggtggagcagcggagagccggcggctacagccggaagtacgccagcaaagccaagaatctggcagacgatatggtgagaaacaccgctagagatctgctgtactacgccgtgacccaggatgccatgctgatcttcgccaacctgagccggggcttcggccggcagggcaagcggaccttcatggccgagagacagtacacacggatggaggactggctgaccgccaagctggcctacgagggcctgagcaagacctacctgtccaagacactggcccagtacacctccaagacatgcagcaactgtgggtttaccatcaccagcgccgactacgacagggtgctggagaagctgaagaagacagcaacaggctggatgaccacaattaacggcaaggagctgaaggtggagggccagattacctactacaacagatacaagagacagaacgtagtcaaggacctgtccgtcgagctggatagactgagcgaagaatctgtgaacaacgacatctcctcctggacaaagggcagaagcggagaagctctgagcctcctgaagaaaagattctcccatagacccgtgcaggagaagttcgtgtgcctgaactgcggcttcgagacacacgcagccgagcaagccgccctgaacatcgccagatcctggctgttcctgcggagccaggagtacaagaaataccagacaaacaagacaaccggcaacaccgataagagagccttcgtcgagacctggcagtccttttaccggaagaagcttaaggaggtgtggaaacctgccgtgcggtctggcggatctggcggaggctccaccagccccaagaaaaagagaaaagtctaagctgccttctgcggggcttgccttctggccatgcccttcttctctcccttgcacctgtacctcttggtctttgaataaagcctgagtaggaaggctagcaaaaaaaaaaaaaaaaaaaaaaaaaaaaaaaaaaaaaaaaaaaaaaaaaaaaaaaaaaaaaaaaaaaaaaaaaaaaaaaa

SEQ ID NO: 13623 - RNA, 5785 nt, synthetic construct
  source 1..5785: mol_type = other RNA
aggaaataagagagaaaagaagagtaagaagaaatataagagccaccatggcccctaagaagaagcgtaaagtgagccggatggaacgcctcgtctacgaggtgcggcagaagtgcagaaacatcgaggacatctgcatctcctgcggatctctgaacgtgaccctggagcacccactgttcatcggcggcatgtgccagaactgtaaaaactgttttctggagtgtgcctatcaatacgacgatgacggctaccagagctactgcaccatctgttgcggcggaagagaggtgctgatgtgtggaaataacaactgctgccggtgcttctgcgtggaatgcgtggacctgctggtgggccccggcgccgcccaggccgctattaaggaagatccttggaactgctacatgtgcggccacaagggcacatacggcctgctgagacggagagaggactggcctagcagactgcagatgttcttcgccaataaccacgaccaggagttcgacccccctaaggtgtaccctcccgtccccgccgagaagagaaagcccatccgggtcctgagcctgttcgatggcatcgccaccggtctgctggtgctgaaggacctgggcatccaggtggataggtacattgcctccgaggtgtgcgaggactccatcaccgtgggaatggtgcgtcatcagggcaagatcatgtacgtgggcgacgtgcggagcgtgacacagaagcatatccaggagtggggccctttcgacctggtgatcggcggcagcccttgcaatgacctgagcatcgtgaacccagcccggaagggcctgtacgagggaaccggcagactgttcttcgagttttacagactgctgcacgacgcccggcctaaggaaggcgacgaccggcccttcttttggctgttcgagaatgtggtggccatgggagtcagcgacaagcgggatattagccggttcctggagagcaaccccgtgatgatcgatgccaaggaagtgagcgccgcccaccgggccagatacttctggggcaatctgcctggcatgaacagacccctggccagcaccgtgaacgacaagctggagctgcaggagtgcctggagcacggccggatcgccaagttcagcaaggtgagaaccatcaccacccgaagcaacagcatcaaacaaggcaaggaccagcactttcctgtgttcatgaacgagaaggaggacatcctgtggtgtaccgagatggagagagtgttcgggttcccagtccactacacagatgtcagcaacatgtctagactggccagacagagactgctgggaagaagctggtccgtccctgtgatcagacacctgttcgcccctctgaaggagtacttcgcctgcgtgagcagcggcaacagcaacgccaacagccggggccccagcttctctagcggcctggtgccactgtccctgagagggagccacatgggccccatggagatctacaaaaccgtgagcgcctggaagcggcagcctgtgcgcgtgctgagcctgtttcggaatatcgataaagtcctgaaaagcctgggattcctggagagcggctctggctccggcggtggcaccctgaagtacgtggaggatgtgacaaacgtggtcagacgggatgtggagaagtggggccccttcgatctggtgtacggcagcacccaacccctgggcagctcttgtgaccggtgccctggctggtacatgtttcagttccaccggatcctgcagtacgccctgccgagacaggagtcccagcggccattcttttggattttcatggacaacttgctgctgaccgaggatgaccaggaaactaccactcggttcctgcagaccgaagccgtgaccctgcaggacgtgagaggccgggactaccagaacgccatgcgggtgtggtccaacatccctggactgaaaagcaagcacgcacctctgacccctaaagaagaggagtacctgcaggcccaggtgcggagcagaagcaagctggacgcccctaaggtggatctgctggtgaagaattgcctcctgcccctgagagagtacttcaagtatttcagccagaatagtctgcccctgggaggcagcggcggcggcctgctggagagcgtgaccttcggcgacgtggccgtggtgttcagcagggacgagtggctgcacctggacgccgcccagaggagcctgtacagggaggtgatgctggagaactacagcgccctggtgagcctgggcatccccctgagcatccccaagctgatctgccagctgcagcagggcgaggacccctgcatggtggagagggagatcccccaggacgtgtgcctgggcttcaagacctggggcggcccaagcagcggcgcccctcctcccagcggcggcagcccagccggctccccaacctctaccgaggagggcacctctgagtccgccacccccgagagcggccctggcacctccaccgagcccagcgagggcagcgcacccggcagccctgccggcagccccacctccacagaggagggaaccagcaccgagcccagcgaaggcagcgccccaggcaccagcaccgagcctagtgagcaggagattaaacggatcaacaagatcagaagaagacttgtgaaagacagcaacaccaagaaggccggcaagacaggccccatgaaaaccctgctggttagagtgatgacacccgatctgagagagcggctggaaaacctgagaaagaagcctgaaaatatcccccagcccatcagcaatacatctagagccaacctgaataagctgctgaccgattacaccgaaatgaagaaggcgatcctgcatgtgtactgggaagagttccagaaggaccctgtgggcctgatgagccgggtggcccagcctgccagcaagaagatcgatcagaacaagctgaaacctgagatggacgagaagggcaacctgaccaccgccggctttgcctgctctcagtgtggccagcccctgttcgtgtacaagctggagcaggtgtctgagaagggcaaggcttacaccaactacttcggacggtgcaatgtggccgagcacgaaaagctgatcctgctggcccagctgaagcccgagaaggatagcgacgaagccgtgacatatagcctgggaaagtttgggcagagggccctggatttctacagcattcatgtgaccaaggagtccacccaccccgtgaagcccctggcccagatcgccggaaacagatacgcctccggacctgtgggaaaggccctgagcgacgcatgtatgggcacaatcgcctccttcctgtctaagtaccaggacatcatcatcgaacaccagaaggtggtgaagggcaaccagaagagactggagagcctgcgggagctggccggcaaggaaaacctggaataccctagcgtgaccctgccacctcagcctcacaccaaggagggcgttgatgcctacaacgaagtgatcgcccgggtgcgaatgtgggtgaacctgaacctgtggcagaagctgaagctaagcagagatgatgccaagcctctgctgagactgaagggattcccttcctttcctctggtcgagagacaggccaacgaagtggactggtgggacatggtgtgtaacgtgaagaagctgatcaacgagaaaaaggaggatggcaaggtgttttggcagaatctggctggctacaagagacaggaagccctgagaccatacctgagcagcgaggaagatcggaagaagggaaagaaattcgctcggtaccagctgggcgacctgctgctgcacctggaaaagaagcacggcgaggactggggaaaggtgtacgacgaggcctgggagcggattgacaagaaagtggaaggcctgagcaagcacatcaagctggaagaggaacggagaagcgaggacgcccagagcaaggccgccctgaccgactggctgcgggctaaggccagcttcgtgatcgagggcctgaaggaggccgacaaggacgagttctgcagatgcgagctgaagctgcagaagtggtacggggacctgcggggaaagcccttcgccatcgaagccgagaacagcatcctggacatcagcggcttcagcaagcagtacaactgtgccttcatctggcagaaggacggcgtgaagaagctgaacctgtacctgatcatcaactacttcaagggcggcaagctgcggttcaagaagatcaaacctgaagccttcgaagccaacagattctacaccgtgatcaacaaaaagagcggcgagatcgtgcccatggaggtgaacttcaacttcgacgaccccaacctgatcatcctgcctctggcctttggcaagagacagggcagagaattcatctggaacgacctgctgtccctggaaaccggcagcctgaagctggccaacggaagagtgatcgagaagacactgtacaacagaagaacccggcaggatgagcctgccctgttcgtggccctgaccttcgagcggcgggaggtcctggactcctccaatatcaaaccaatgaacctgatcggcgtggcaagaggcgaaaacatccccgccgtgatcgccctgaccgaccccgagggctgcccactgagccggtttaaggatagcctgggaaacccaacccacatcctgagaatcggcgagagctataaggagaagcagcggaccatccaggccaagaaggaggtggagcagcggagagccggcggctacagccggaagtacgccagcaaagccaagaatctggcagacgatatggtgagaaacaccgctagagatctgctgtactacgccgtgacccaggatgccatgctgatcttcgccaacctgagccggggcttcggccggcagggcaagcggaccttcatggccgagagacagtacacacggatggaggactggctgaccgccaagctggcctacgagggcctgagcaagacctacctgtccaagacactggcccagtacacctccaagacatgcagcaactgtgggtttaccatcaccagcgccgactacgacagggtgctggagaagctgaagaagacagcaacaggctggatgaccacaattaacggcaaggagctgaaggtggagggccagattacctactacaacagatacaagagacagaacgtagtcaaggacctgtccgtcgagctggatagactgagcgaagaatctgtgaacaacgacatctcctcctggacaaagggcagaagcggagaagctctgagcctcctgaagaaaagattctcccatagacccgtgcaggagaagttcgtgtgcctgaactgcggcttcgagacacacgcagccgagcaagccgccctgaacatcgccagatcctggctgttcctgcggagccaggagtacaagaaataccagacaaacaagacaaccggcaacaccgataagagagccttcgtcgagacctggcagtccttttaccggaagaagcttaaggaggtgtggaaacctgccgtgcggtctggcggatctggcggaggctccaccagccccaagaaaaagagaaaagtctaagctgccttctgcggggcttgccttctggccatgcccttcttctctcccttgcacctgtacctcttggtctttgaataaagcctgagtaggaaggctagcaaaaaaaaaaaaaaaaaaaaaaaaaaaaaaaaaaaaaaaaaaaaaaaaaaaaaaaaaaaaaaaaaaaaaaaaaaaaaaaa

SEQ ID NO: 13624 - RNA, 5785 nt, synthetic construct
  source 1..5785: mol_type = other RNA
aggaaataagagagaaaagaagagtaagaagaaatataagagccaccatggcccctaagaagaagcgtaaagtgagccggatggaacgcctcgtctacgaggtgcggcagaagtgcagaaacatcgaggacatctgcatctcctgcggatctctgaacgtgaccctggagcacccactgttcatcggcggcatgtgccagaactgtaaaaactgttttctggagtgtgcctatcaatacgacgatgacggctaccagagctactgcaccatctgttgcggcggaagagaggtgctgatgtgtggaaataacaactgctgccggtgcttctgcgtggaatgcgtggacctgctggtgggccccggcgccgcccaggccgctattaaggaagatccttggaactgctacatgtgcggccacaagggcacatacggcctgctgagacggagagaggactggcctagcagactgcagatgttcttcgccaataaccacgaccaggagttcgacccccctaaggtgtaccctcccgtccccgccgagaagagaaagcccatccgggtcctgagcctgttcgatggcatcgccaccggtctgctggtgctgaaggacctgggcatccaggtggataggtacattgcctccgaggtgtgcgaggactccatcaccgtgggaatggtgcgtcatcagggcaagatcatgtacgtgggcgacgtgcggagcgtgacacagaagcatatccaggagtggggccctttcgacctggtgatcggcggcagcccttgcaatgacctgagcatcgtgaacccagcccggaagggcctgtacgagggaaccggcagactgttcttcgagttttacagactgctgcacgacgcccggcctaaggaaggcgacgaccggcccttcttttggctgttcgagaatgtggtggccatgggagtcagcgacaagcgggatattagccggttcctggagagcaaccccgtgatgatcgatgccaaggaagtgagcgccgcccaccgggccagatacttctggggcaatctgcctggcatgaacagacccctggccagcaccgtgaacgacaagctggagctgcaggagtgcctggagcacggccggatcgccaagttcagcaaggtgagaaccatcaccacccgaagcaacagcatcaaacaaggcaaggaccagcactttcctgtgttcatgaacgagaaggaggacatcctgtggtgtaccgagatggagagagtgttcgggttcccagtccactacacagatgtcagcaacatgtctagactggccagacagagactgctgggaagaagctggtccgtccctgtgatcagacacctgttcgcccctctgaaggagtacttcgcctgcgtgagcagcggcaacagcaacgccaacagccggggccccagcttctctagcggcctggtgccactgtccctgagagggagccacatgggccccatggagatctacaaaaccgtgagcgcctggaagcggcagcctgtgcgcgtgctgagcctgtttcggaatatcgataaagtcctgaaaagcctgggattcctggagagcggctctggctccggcggtggcaccctgaagtacgtggaggatgtgacaaacgtggtcagacgggatgtggagaagtggggccccttcgatctggtgtacggcagcacccaacccctgggcagctcttgtgaccggtgccctggctggtacatgtttcagttccaccggatcctgcagtacgccctgccgagacaggagtcccagcggccattcttttggattttcatggacaacttgctgctgaccgaggatgaccaggaaactaccactcggttcctgcagaccgaagccgtgaccctgcaggacgtgagaggccgggactaccagaacgccatgcgggtgtggtccaacatccctggactgaaaagcaagcacgcacctctgacccctaaagaagaggagtacctgcaggcccaggtgcggagcagaagcaagctggacgcccctaaggtggatctgctggtgaagaattgcctcctgcccctgagagagtacttcaagtatttcagccagaatagtctgcccctgggaggcagcggcggcggcagccagggcagggtgaccttcgaggacgtgaccgtgaacttcaccaagggcgagtggcagaggctgaaccccgagcagaggaacctgtacagggacgtgatgctggagaactacagcaacctggtgagcgtgggcagggaggagaccaccaagcccaacgtgatcctgaggctggagcagggcaaggagccctggctggtggaggaggaggtgctgggcagcggcaggcccgagaagaacggcggcggcccaagcagcggcgcccctcctcccagcggcggcagcccagccggctccccaacctctaccgaggagggcacctctgagtccgccacccccgagagcggccctggcacctccaccgagcccagcgagggcagcgcacccggcagccctgccggcagccccacctccacagaggagggaaccagcaccgagcccagcgaaggcagcgccccaggcaccagcaccgagcctagtgagcaggagattaaacggatcaacaagatcagaagaagacttgtgaaagacagcaacaccaagaaggccggcaagacaggccccatgaaaaccctgctggttagagtgatgacacccgatctgagagagcggctggaaaacctgagaaagaagcctgaaaatatcccccagcccatcagcaatacatctagagccaacctgaataagctgctgaccgattacaccgaaatgaagaaggcgatcctgcatgtgtactgggaagagttccagaaggaccctgtgggcctgatgagccgggtggcccagcctgccagcaagaagatcgatcagaacaagctgaaacctgagatggacgagaagggcaacctgaccaccgccggctttgcctgctctcagtgtggccagcccctgttcgtgtacaagctggagcaggtgtctgagaagggcaaggcttacaccaactacttcggacggtgcaatgtggccgagcacgaaaagctgatcctgctggcccagctgaagcccgagaaggatagcgacgaagccgtgacatatagcctgggaaagtttgggcagagggccctggatttctacagcattcatgtgaccaaggagtccacccaccccgtgaagcccctggcccagatcgccggaaacagatacgcctccggacctgtgggaaaggccctgagcgacgcatgtatgggcacaatcgcctccttcctgtctaagtaccaggacatcatcatcgaacaccagaaggtggtgaagggcaaccagaagagactggagagcctgcgggagctggccggcaaggaaaacctggaataccctagcgtgaccctgccacctcagcctcacaccaaggagggcgttgatgcctacaacgaagtgatcgcccgggtgcgaatgtgggtgaacctgaacctgtggcagaagctgaagctaagcagagatgatgccaagcctctgctgagactgaagggattcccttcctttcctctggtcgagagacaggccaacgaagtggactggtgggacatggtgtgtaacgtgaagaagctgatcaacgagaaaaaggaggatggcaaggtgttttggcagaatctggctggctacaagagacaggaagccctgagaccatacctgagcagcgaggaagatcggaagaagggaaagaaattcgctcggtaccagctgggcgacctgctgctgcacctggaaaagaagcacggcgaggactggggaaaggtgtacgacgaggcctgggagcggattgacaagaaagtggaaggcctgagcaagcacatcaagctggaagaggaacggagaagcgaggacgcccagagcaaggccgccctgaccgactggctgcgggctaaggccagcttcgtgatcgagggcctgaaggaggccgacaaggacgagttctgcagatgcgagctgaagctgcagaagtggtacggggacctgcggggaaagcccttcgccatcgaagccgagaacagcatcctggacatcagcggcttcagcaagcagtacaactgtgccttcatctggcagaaggacggcgtgaagaagctgaacctgtacctgatcatcaactacttcaagggcggcaagctgcggttcaagaagatcaaacctgaagccttcgaagccaacagattctacaccgtgatcaacaaaaagagcggcgagatcgtgcccatggaggtgaacttcaacttcgacgaccccaacctgatcatcctgcctctggcctttggcaagagacagggcagagaattcatctggaacgacctgctgtccctggaaaccggcagcctgaagctggccaacggaagagtgatcgagaagacactgtacaacagaagaacccggcaggatgagcctgccctgttcgtggccctgaccttcgagcggcgggaggtcctggactcctccaatatcaaaccaatgaacctgatcggcgtggcaagaggcgaaaacatccccgccgtgatcgccctgaccgaccccgagggctgcccactgagccggtttaaggatagcctgggaaacccaacccacatcctgagaatcggcgagagctataaggagaagcagcggaccatccaggccaagaaggaggtggagcagcggagagccggcggctacagccggaagtacgccagcaaagccaagaatctggcagacgatatggtgagaaacaccgctagagatctgctgtactacgccgtgacccaggatgccatgctgatcttcgccaacctgagccggggcttcggccggcagggcaagcggaccttcatggccgagagacagtacacacggatggaggactggctgaccgccaagctggcctacgagggcctgagcaagacctacctgtccaagacactggcccagtacacctccaagacatgcagcaactgtgggtttaccatcaccagcgccgactacgacagggtgctggagaagctgaagaagacagcaacaggctggatgaccacaattaacggcaaggagctgaaggtggagggccagattacctactacaacagatacaagagacagaacgtagtcaaggacctgtccgtcgagctggatagactgagcgaagaatctgtgaacaacgacatctcctcctggacaaagggcagaagcggagaagctctgagcctcctgaagaaaagattctcccatagacccgtgcaggagaagttcgtgtgcctgaactgcggcttcgagacacacgcagccgagcaagccgccctgaacatcgccagatcctggctgttcctgcggagccaggagtacaagaaataccagacaaacaagacaaccggcaacaccgataagagagccttcgtcgagacctggcagtccttttaccggaagaagcttaaggaggtgtggaaacctgccgtgcggtctggcggatctggcggaggctccaccagccccaagaaaaagagaaaagtctaagctgccttctgcggggcttgccttctggccatgcccttcttctctcccttgcacctgtacctcttggtctttgaataaagcctgagtaggaaggctagcaaaaaaaaaaaaaaaaaaaaaaaaaaaaaaaaaaaaaaaaaaaaaaaaaaaaaaaaaaaaaaaaaaaaaaaaaaaaaaaa

SEQ ID NO: 13625 - RNA, 5785 nt, synthetic construct
  source 1..5785: mol_type = other RNA
aggaaataagagagaaaagaagagtaagaagaaatataagagccaccatggcccctaagaagaagcgtaaagtgagccggatggaacgcctcgtctacgaggtgcggcagaagtgcagaaacatcgaggacatctgcatctcctgcggatctctgaacgtgaccctggagcacccactgttcatcggcggcatgtgccagaactgtaaaaactgttttctggagtgtgcctatcaatacgacgatgacggctaccagagctactgcaccatctgttgcggcggaagagaggtgctgatgtgtggaaataacaactgctgccggtgcttctgcgtggaatgcgtggacctgctggtgggccccggcgccgcccaggccgctattaaggaagatccttggaactgctacatgtgcggccacaagggcacatacggcctgctgagacggagagaggactggcctagcagactgcagatgttcttcgccaataaccacgaccaggagttcgacccccctaaggtgtaccctcccgtccccgccgagaagagaaagcccatccgggtcctgagcctgttcgatggcatcgccaccggtctgctggtgctgaaggacctgggcatccaggtggataggtacattgcctccgaggtgtgcgaggactccatcaccgtgggaatggtgcgtcatcagggcaagatcatgtacgtgggcgacgtgcggagcgtgacacagaagcatatccaggagtggggccctttcgacctggtgatcggcggcagcccttgcaatgacctgagcatcgtgaacccagcccggaagggcctgtacgagggaaccggcagactgttcttcgagttttacagactgctgcacgacgcccggcctaaggaaggcgacgaccggcccttcttttggctgttcgagaatgtggtggccatgggagtcagcgacaagcgggatattagccggttcctggagagcaaccccgtgatgatcgatgccaaggaagtgagcgccgcccaccgggccagatacttctggggcaatctgcctggcatgaacagacccctggccagcaccgtgaacgacaagctggagctgcaggagtgcctggagcacggccggatcgccaagttcagcaaggtgagaaccatcaccacccgaagcaacagcatcaaacaaggcaaggaccagcactttcctgtgttcatgaacgagaaggaggacatcctgtggtgtaccgagatggagagagtgttcgggttcccagtccactacacagatgtcagcaacatgtctagactggccagacagagactgctgggaagaagctggtccgtccctgtgatcagacacctgttcgcccctctgaaggagtacttcgcctgcgtgagcagcggcaacagcaacgccaacagccggggccccagcttctctagcggcctggtgccactgtccctgagagggagccacatgggccccatggagatctacaaaaccgtgagcgcctggaagcggcagcctgtgcgcgtgctgagcctgtttcggaatatcgataaagtcctgaaaagcctgggattcctggagagcggctctggctccggcggtggcaccctgaagtacgtggaggatgtgacaaacgtggtcagacgggatgtggagaagtggggccccttcgatctggtgtacggcagcacccaacccctgggcagctcttgtgaccggtgccctggctggtacatgtttcagttccaccggatcctgcagtacgccctgccgagacaggagtcccagcggccattcttttggattttcatggacaacttgctgctgaccgaggatgaccaggaaactaccactcggttcctgcagaccgaagccgtgaccctgcaggacgtgagaggccgggactaccagaacgccatgcgggtgtggtccaacatccctggactgaaaagcaagcacgcacctctgacccctaaagaagaggagtacctgcaggcccaggtgcggagcagaagcaagctggacgcccctaaggtggatctgctggtgaagaattgcctcctgcccctgagagagtacttcaagtatttcagccagaatagtctgcccctgggaggcagcggcggcggcgccctgaggagcgtgatgttcagcgacgtgagcatcgacttcagccccgaggagtgggagtacctggacctggagcagaaggacctgtacagggacgtgatgctggagaactacagcaacctggtgagcctgggctgcttcatcagcaagcccgacgtgatcagcctgctggagcagggcaaggagccctggaaggtggtgaggaagggcaggaggcagtaccccgacctggagaccaagtacggcggcccaagcagcggcgcccctcctcccagcggcggcagcccagccggctccccaacctctaccgaggagggcacctctgagtccgccacccccgagagcggccctggcacctccaccgagcccagcgagggcagcgcacccggcagccctgccggcagccccacctccacagaggagggaaccagcaccgagcccagcgaaggcagcgccccaggcaccagcaccgagcctagtgagcaggagattaaacggatcaacaagatcagaagaagacttgtgaaagacagcaacaccaagaaggccggcaagacaggccccatgaaaaccctgctggttagagtgatgacacccgatctgagagagcggctggaaaacctgagaaagaagcctgaaaatatcccccagcccatcagcaatacatctagagccaacctgaataagctgctgaccgattacaccgaaatgaagaaggcgatcctgcatgtgtactgggaagagttccagaaggaccctgtgggcctgatgagccgggtggcccagcctgccagcaagaagatcgatcagaacaagctgaaacctgagatggacgagaagggcaacctgaccaccgccggctttgcctgctctcagtgtggccagcccctgttcgtgtacaagctggagcaggtgtctgagaagggcaaggcttacaccaactacttcggacggtgcaatgtggccgagcacgaaaagctgatcctgctggcccagctgaagcccgagaaggatagcgacgaagccgtgacatatagcctgggaaagtttgggcagagggccctggatttctacagcattcatgtgaccaaggagtccacccaccccgtgaagcccctggcccagatcgccggaaacagatacgcctccggacctgtgggaaaggccctgagcgacgcatgtatgggcacaatcgcctccttcctgtctaagtaccaggacatcatcatcgaacaccagaaggtggtgaagggcaaccagaagagactggagagcctgcgggagctggccggcaaggaaaacctggaataccctagcgtgaccctgccacctcagcctcacaccaaggagggcgttgatgcctacaacgaagtgatcgcccgggtgcgaatgtgggtgaacctgaacctgtggcagaagctgaagctaagcagagatgatgccaagcctctgctgagactgaagggattcccttcctttcctctggtcgagagacaggccaacgaagtggactggtgggacatggtgtgtaacgtgaagaagctgatcaacgagaaaaaggaggatggcaaggtgttttggcagaatctggctggctacaagagacaggaagccctgagaccatacctgagcagcgaggaagatcggaagaagggaaagaaattcgctcggtaccagctgggcgacctgctgctgcacctggaaaagaagcacggcgaggactggggaaaggtgtacgacgaggcctgggagcggattgacaagaaagtggaaggcctgagcaagcacatcaagctggaagaggaacggagaagcgaggacgcccagagcaaggccgccctgaccgactggctgcgggctaaggccagcttcgtgatcgagggcctgaaggaggccgacaaggacgagttctgcagatgcgagctgaagctgcagaagtggtacggggacctgcggggaaagcccttcgccatcgaagccgagaacagcatcctggacatcagcggcttcagcaagcagtacaactgtgccttcatctggcagaaggacggcgtgaagaagctgaacctgtacctgatcatcaactacttcaagggcggcaagctgcggttcaagaagatcaaacctgaagccttcgaagccaacagattctacaccgtgatcaacaaaaagagcggcgagatcgtgcccatggaggtgaacttcaacttcgacgaccccaacctgatcatcctgcctctggcctttggcaagagacagggcagagaattcatctggaacgacctgctgtccctggaaaccggcagcctgaagctggccaacggaagagtgatcgagaagacactgtacaacagaagaacccggcaggatgagcctgccctgttcgtggccctgaccttcgagcggcgggaggtcctggactcctccaatatcaaaccaatgaacctgatcggcgtggcaagaggcgaaaacatccccgccgtgatcgccctgaccgaccccgagggctgcccactgagccggtttaaggatagcctgggaaacccaacccacatcctgagaatcggcgagagctataaggagaagcagcggaccatccaggccaagaaggaggtggagcagcggagagccggcggctacagccggaagtacgccagcaaagccaagaatctggcagacgatatggtgagaaacaccgctagagatctgctgtactacgccgtgacccaggatgccatgctgatcttcgccaacctgagccggggcttcggccggcagggcaagcggaccttcatggccgagagacagtacacacggatggaggactggctgaccgccaagctggcctacgagggcctgagcaagacctacctgtccaagacactggcccagtacacctccaagacatgcagcaactgtgggtttaccatcaccagcgccgactacgacagggtgctggagaagctgaagaagacagcaacaggctggatgaccacaattaacggcaaggagctgaaggtggagggccagattacctactacaacagatacaagagacagaacgtagtcaaggacctgtccgtcgagctggatagactgagcgaagaatctgtgaacaacgacatctcctcctggacaaagggcagaagcggagaagctctgagcctcctgaagaaaagattctcccatagacccgtgcaggagaagttcgtgtgcctgaactgcggcttcgagacacacgcagccgagcaagccgccctgaacatcgccagatcctggctgttcctgcggagccaggagtacaagaaataccagacaaacaagacaaccggcaacaccgataagagagccttcgtcgagacctggcagtccttttaccggaagaagcttaaggaggtgtggaaacctgccgtgcggtctggcggatctggcggaggctccaccagccccaagaaaaagagaaaagtctaagctgccttctgcggggcttgccttctggccatgcccttcttctctcccttgcacctgtacctcttggtctttgaataaagcctgagtaggaaggctagcaaaaaaaaaaaaaaaaaaaaaaaaaaaaaaaaaaaaaaaaaaaaaaaaaaaaaaaaaaaaaaaaaaaaaaaaaaaaaaaa

SEQ ID NO: 13626 - RNA, 5785 nt, synthetic construct
  source 1..5785: mol_type = other RNA
aggaaataagagagaaaagaagagtaagaagaaatataagagccaccatggcccctaagaagaagcgtaaagtgagccggatggaacgcctcgtctacgaggtgcggcagaagtgcagaaacatcgaggacatctgcatctcctgcggatctctgaacgtgaccctggagcacccactgttcatcggcggcatgtgccagaactgtaaaaactgttttctggagtgtgcctatcaatacgacgatgacggctaccagagctactgcaccatctgttgcggcggaagagaggtgctgatgtgtggaaataacaactgctgccggtgcttctgcgtggaatgcgtggacctgctggtgggccccggcgccgcccaggccgctattaaggaagatccttggaactgctacatgtgcggccacaagggcacatacggcctgctgagacggagagaggactggcctagcagactgcagatgttcttcgccaataaccacgaccaggagttcgacccccctaaggtgtaccctcccgtccccgccgagaagagaaagcccatccgggtcctgagcctgttcgatggcatcgccaccggtctgctggtgctgaaggacctgggcatccaggtggataggtacattgcctccgaggtgtgcgaggactccatcaccgtgggaatggtgcgtcatcagggcaagatcatgtacgtgggcgacgtgcggagcgtgacacagaagcatatccaggagtggggccctttcgacctggtgatcggcggcagcccttgcaatgacctgagcatcgtgaacccagcccggaagggcctgtacgagggaaccggcagactgttcttcgagttttacagactgctgcacgacgcccggcctaaggaaggcgacgaccggcccttcttttggctgttcgagaatgtggtggccatgggagtcagcgacaagcgggatattagccggttcctggagagcaaccccgtgatgatcgatgccaaggaagtgagcgccgcccaccgggccagatacttctggggcaatctgcctggcatgaacagacccctggccagcaccgtgaacgacaagctggagctgcaggagtgcctggagcacggccggatcgccaagttcagcaaggtgagaaccatcaccacccgaagcaacagcatcaaacaaggcaaggaccagcactttcctgtgttcatgaacgagaaggaggacatcctgtggtgtaccgagatggagagagtgttcgggttcccagtccactacacagatgtcagcaacatgtctagactggccagacagagactgctgggaagaagctggtccgtccctgtgatcagacacctgttcgcccctctgaaggagtacttcgcctgcgtgagcagcggcaacagcaacgccaacagccggggccccagcttctctagcggcctggtgccactgtccctgagagggagccacatgggccccatggagatctacaaaaccgtgagcgcctggaagcggcagcctgtgcgcgtgctgagcctgtttcggaatatcgataaagtcctgaaaagcctgggattcctggagagcggctctggctccggcggtggcaccctgaagtacgtggaggatgtgacaaacgtggtcagacgggatgtggagaagtggggccccttcgatctggtgtacggcagcacccaacccctgggcagctcttgtgaccggtgccctggctggtacatgtttcagttccaccggatcctgcagtacgccctgccgagacaggagtcccagcggccattcttttggattttcatggacaacttgctgctgaccgaggatgaccaggaaactaccactcggttcctgcagaccgaagccgtgaccctgcaggacgtgagaggccgggactaccagaacgccatgcgggtgtggtccaacatccctggactgaaaagcaagcacgcacctctgacccctaaagaagaggagtacctgcaggcccaggtgcggagcagaagcaagctggacgcccctaaggtggatctgctggtgaagaattgcctcctgcccctgagagagtacttcaagtatttcagccagaatagtctgcccctgggaggcagcggcggcggcgagcaggacgccgtgacctacgaggacgtgcacgtgaacttcacccacgaggagtgggccctgctggaccccagccagaagagcctgtacaaggacgtgatgatggagacctactggaacctgacctgcatcggctacaagtgggaggaccacaacatcgaggagcactgccagagctgcaggaggaacggcagcaggtgcgtgatctgccacagcggccacaacccctgcgagcacaagggcggcggcccaagcagcggcgcccctcctcccagcggcggcagcccagccggctccccaacctctaccgaggagggcacctctgagtccgccacccccgagagcggccctggcacctccaccgagcccagcgagggcagcgcacccggcagccctgccggcagccccacctccacagaggagggaaccagcaccgagcccagcgaaggcagcgccccaggcaccagcaccgagcctagtgagcaggagattaaacggatcaacaagatcagaagaagacttgtgaaagacagcaacaccaagaaggccggcaagacaggccccatgaaaaccctgctggttagagtgatgacacccgatctgagagagcggctggaaaacctgagaaagaagcctgaaaatatcccccagcccatcagcaatacatctagagccaacctgaataagctgctgaccgattacaccgaaatgaagaaggcgatcctgcatgtgtactgggaagagttccagaaggaccctgtgggcctgatgagccgggtggcccagcctgccagcaagaagatcgatcagaacaagctgaaacctgagatggacgagaagggcaacctgaccaccgccggctttgcctgctctcagtgtggccagcccctgttcgtgtacaagctggagcaggtgtctgagaagggcaaggcttacaccaactacttcggacggtgcaatgtggccgagcacgaaaagctgatcctgctggcccagctgaagcccgagaaggatagcgacgaagccgtgacatatagcctgggaaagtttgggcagagggccctggatttctacagcattcatgtgaccaaggagtccacccaccccgtgaagcccctggcccagatcgccggaaacagatacgcctccggacctgtgggaaaggccctgagcgacgcatgtatgggcacaatcgcctccttcctgtctaagtaccaggacatcatcatcgaacaccagaaggtggtgaagggcaaccagaagagactggagagcctgcgggagctggccggcaaggaaaacctggaataccctagcgtgaccctgccacctcagcctcacaccaaggagggcgttgatgcctacaacgaagtgatcgcccgggtgcgaatgtgggtgaacctgaacctgtggcagaagctgaagctaagcagagatgatgccaagcctctgctgagactgaagggattcccttcctttcctctggtcgagagacaggccaacgaagtggactggtgggacatggtgtgtaacgtgaagaagctgatcaacgagaaaaaggaggatggcaaggtgttttggcagaatctggctggctacaagagacaggaagccctgagaccatacctgagcagcgaggaagatcggaagaagggaaagaaattcgctcggtaccagctgggcgacctgctgctgcacctggaaaagaagcacggcgaggactggggaaaggtgtacgacgaggcctgggagcggattgacaagaaagtggaaggcctgagcaagcacatcaagctggaagaggaacggagaagcgaggacgcccagagcaaggccgccctgaccgactggctgcgggctaaggccagcttcgtgatcgagggcctgaaggaggccgacaaggacgagttctgcagatgcgagctgaagctgcagaagtggtacggggacctgcggggaaagcccttcgccatcgaagccgagaacagcatcctggacatcagcggcttcagcaagcagtacaactgtgccttcatctggcagaaggacggcgtgaagaagctgaacctgtacctgatcatcaactacttcaagggcggcaagctgcggttcaagaagatcaaacctgaagccttcgaagccaacagattctacaccgtgatcaacaaaaagagcggcgagatcgtgcccatggaggtgaacttcaacttcgacgaccccaacctgatcatcctgcctctggcctttggcaagagacagggcagagaattcatctggaacgacctgctgtccctggaaaccggcagcctgaagctggccaacggaagagtgatcgagaagacactgtacaacagaagaacccggcaggatgagcctgccctgttcgtggccctgaccttcgagcggcgggaggtcctggactcctccaatatcaaaccaatgaacctgatcggcgtggcaagaggcgaaaacatccccgccgtgatcgccctgaccgaccccgagggctgcccactgagccggtttaaggatagcctgggaaacccaacccacatcctgagaatcggcgagagctataaggagaagcagcggaccatccaggccaagaaggaggtggagcagcggagagccggcggctacagccggaagtacgccagcaaagccaagaatctggcagacgatatggtgagaaacaccgctagagatctgctgtactacgccgtgacccaggatgccatgctgatcttcgccaacctgagccggggcttcggccggcagggcaagcggaccttcatggccgagagacagtacacacggatggaggactggctgaccgccaagctggcctacgagggcctgagcaagacctacctgtccaagacactggcccagtacacctccaagacatgcagcaactgtgggtttaccatcaccagcgccgactacgacagggtgctggagaagctgaagaagacagcaacaggctggatgaccacaattaacggcaaggagctgaaggtggagggccagattacctactacaacagatacaagagacagaacgtagtcaaggacctgtccgtcgagctggatagactgagcgaagaatctgtgaacaacgacatctcctcctggacaaagggcagaagcggagaagctctgagcctcctgaagaaaagattctcccatagacccgtgcaggagaagttcgtgtgcctgaactgcggcttcgagacacacgcagccgagcaagccgccctgaacatcgccagatcctggctgttcctgcggagccaggagtacaagaaataccagacaaacaagacaaccggcaacaccgataagagagccttcgtcgagacctggcagtccttttaccggaagaagcttaaggaggtgtggaaacctgccgtgcggtctggcggatctggcggaggctccaccagccccaagaaaaagagaaaagtctaagctgccttctgcggggcttgccttctggccatgcccttcttctctcccttgcacctgtacctcttggtctttgaataaagcctgagtaggaaggctagcaaaaaaaaaaaaaaaaaaaaaaaaaaaaaaaaaaaaaaaaaaaaaaaaaaaaaaaaaaaaaaaaaaaaaaaaaaaaaaaa

SEQ ID NO: 13627 - RNA, 5785 nt, synthetic construct
  source 1..5785: mol_type = other RNA
aggaaataagagagaaaagaagagtaagaagaaatataagagccaccatggcccctaagaagaagcgtaaagtgagccggatggaacgcctcgtctacgaggtgcggcagaagtgcagaaacatcgaggacatctgcatctcctgcggatctctgaacgtgaccctggagcacccactgttcatcggcggcatgtgccagaactgtaaaaactgttttctggagtgtgcctatcaatacgacgatgacggctaccagagctactgcaccatctgttgcggcggaagagaggtgctgatgtgtggaaataacaactgctgccggtgcttctgcgtggaatgcgtggacctgctggtgggccccggcgccgcccaggccgctattaaggaagatccttggaactgctacatgtgcggccacaagggcacatacggcctgctgagacggagagaggactggcctagcagactgcagatgttcttcgccaataaccacgaccaggagttcgacccccctaaggtgtaccctcccgtccccgccgagaagagaaagcccatccgggtcctgagcctgttcgatggcatcgccaccggtctgctggtgctgaaggacctgggcatccaggtggataggtacattgcctccgaggtgtgcgaggactccatcaccgtgggaatggtgcgtcatcagggcaagatcatgtacgtgggcgacgtgcggagcgtgacacagaagcatatccaggagtggggccctttcgacctggtgatcggcggcagcccttgcaatgacctgagcatcgtgaacccagcccggaagggcctgtacgagggaaccggcagactgttcttcgagttttacagactgctgcacgacgcccggcctaaggaaggcgacgaccggcccttcttttggctgttcgagaatgtggtggccatgggagtcagcgacaagcgggatattagccggttcctggagagcaaccccgtgatgatcgatgccaaggaagtgagcgccgcccaccgggccagatacttctggggcaatctgcctggcatgaacagacccctggccagcaccgtgaacgacaagctggagctgcaggagtgcctggagcacggccggatcgccaagttcagcaaggtgagaaccatcaccacccgaagcaacagcatcaaacaaggcaaggaccagcactttcctgtgttcatgaacgagaaggaggacatcctgtggtgtaccgagatggagagagtgttcgggttcccagtccactacacagatgtcagcaacatgtctagactggccagacagagactgctgggaagaagctggtccgtccctgtgatcagacacctgttcgcccctctgaaggagtacttcgcctgcgtgagcagcggcaacagcaacgccaacagccggggccccagcttctctagcggcctggtgccactgtccctgagagggagccacatgggccccatggagatctacaaaaccgtgagcgcctggaagcggcagcctgtgcgcgtgctgagcctgtttcggaatatcgataaagtcctgaaaagcctgggattcctggagagcggctctggctccggcggtggcaccctgaagtacgtggaggatgtgacaaacgtggtcagacgggatgtggagaagtggggccccttcgatctggtgtacggcagcacccaacccctgggcagctcttgtgaccggtgccctggctggtacatgtttcagttccaccggatcctgcagtacgccctgccgagacaggagtcccagcggccattcttttggattttcatggacaacttgctgctgaccgaggatgaccaggaaactaccactcggttcctgcagaccgaagccgtgaccctgcaggacgtgagaggccgggactaccagaacgccatgcgggtgtggtccaacatccctggactgaaaagcaagcacgcacctctgacccctaaagaagaggagtacctgcaggcccaggtgcggagcagaagcaagctggacgcccctaaggtggatctgctggtgaagaattgcctcctgcccctgagagagtacttcaagtatttcagccagaatagtctgcccctgggaggcagcggcggcggctgcaaggagagcgtgatcttcaaggacgtgtgcgtgaacttcagcctggaggagtgggagtgcctggacctgacccagaggaacctgtacaggtgcgtgatgctggagaactacagcaacctggtgagcgtggtgggcctgagcatccccaagcccgacgtgatcagcctgctggagcagggcaaggagccctggggcgtgttcgacagcgagatgaccaggggcctgaaccaggactgcggcggcggcccaagcagcggcgcccctcctcccagcggcggcagcccagccggctccccaacctctaccgaggagggcacctctgagtccgccacccccgagagcggccctggcacctccaccgagcccagcgagggcagcgcacccggcagccctgccggcagccccacctccacagaggagggaaccagcaccgagcccagcgaaggcagcgccccaggcaccagcaccgagcctagtgagcaggagattaaacggatcaacaagatcagaagaagacttgtgaaagacagcaacaccaagaaggccggcaagacaggccccatgaaaaccctgctggttagagtgatgacacccgatctgagagagcggctggaaaacctgagaaagaagcctgaaaatatcccccagcccatcagcaatacatctagagccaacctgaataagctgctgaccgattacaccgaaatgaagaaggcgatcctgcatgtgtactgggaagagttccagaaggaccctgtgggcctgatgagccgggtggcccagcctgccagcaagaagatcgatcagaacaagctgaaacctgagatggacgagaagggcaacctgaccaccgccggctttgcctgctctcagtgtggccagcccctgttcgtgtacaagctggagcaggtgtctgagaagggcaaggcttacaccaactacttcggacggtgcaatgtggccgagcacgaaaagctgatcctgctggcccagctgaagcccgagaaggatagcgacgaagccgtgacatatagcctgggaaagtttgggcagagggccctggatttctacagcattcatgtgaccaaggagtccacccaccccgtgaagcccctggcccagatcgccggaaacagatacgcctccggacctgtgggaaaggccctgagcgacgcatgtatgggcacaatcgcctccttcctgtctaagtaccaggacatcatcatcgaacaccagaaggtggtgaagggcaaccagaagagactggagagcctgcgggagctggccggcaaggaaaacctggaataccctagcgtgaccctgccacctcagcctcacaccaaggagggcgttgatgcctacaacgaagtgatcgcccgggtgcgaatgtgggtgaacctgaacctgtggcagaagctgaagctaagcagagatgatgccaagcctctgctgagactgaagggattcccttcctttcctctggtcgagagacaggccaacgaagtggactggtgggacatggtgtgtaacgtgaagaagctgatcaacgagaaaaaggaggatggcaaggtgttttggcagaatctggctggctacaagagacaggaagccctgagaccatacctgagcagcgaggaagatcggaagaagggaaagaaattcgctcggtaccagctgggcgacctgctgctgcacctggaaaagaagcacggcgaggactggggaaaggtgtacgacgaggcctgggagcggattgacaagaaagtggaaggcctgagcaagcacatcaagctggaagaggaacggagaagcgaggacgcccagagcaaggccgccctgaccgactggctgcgggctaaggccagcttcgtgatcgagggcctgaaggaggccgacaaggacgagttctgcagatgcgagctgaagctgcagaagtggtacggggacctgcggggaaagcccttcgccatcgaagccgagaacagcatcctggacatcagcggcttcagcaagcagtacaactgtgccttcatctggcagaaggacggcgtgaagaagctgaacctgtacctgatcatcaactacttcaagggcggcaagctgcggttcaagaagatcaaacctgaagccttcgaagccaacagattctacaccgtgatcaacaaaaagagcggcgagatcgtgcccatggaggtgaacttcaacttcgacgaccccaacctgatcatcctgcctctggcctttggcaagagacagggcagagaattcatctggaacgacctgctgtccctggaaaccggcagcctgaagctggccaacggaagagtgatcgagaagacactgtacaacagaagaacccggcaggatgagcctgccctgttcgtggccctgaccttcgagcggcgggaggtcctggactcctccaatatcaaaccaatgaacctgatcggcgtggcaagaggcgaaaacatccccgccgtgatcgccctgaccgaccccgagggctgcccactgagccggtttaaggatagcctgggaaacccaacccacatcctgagaatcggcgagagctataaggagaagcagcggaccatccaggccaagaaggaggtggagcagcggagagccggcggctacagccggaagtacgccagcaaagccaagaatctggcagacgatatggtgagaaacaccgctagagatctgctgtactacgccgtgacccaggatgccatgctgatcttcgccaacctgagccggggcttcggccggcagggcaagcggaccttcatggccgagagacagtacacacggatggaggactggctgaccgccaagctggcctacgagggcctgagcaagacctacctgtccaagacactggcccagtacacctccaagacatgcagcaactgtgggtttaccatcaccagcgccgactacgacagggtgctggagaagctgaagaagacagcaacaggctggatgaccacaattaacggcaaggagctgaaggtggagggccagattacctactacaacagatacaagagacagaacgtagtcaaggacctgtccgtcgagctggatagactgagcgaagaatctgtgaacaacgacatctcctcctggacaaagggcagaagcggagaagctctgagcctcctgaagaaaagattctcccatagacccgtgcaggagaagttcgtgtgcctgaactgcggcttcgagacacacgcagccgagcaagccgccctgaacatcgccagatcctggctgttcctgcggagccaggagtacaagaaataccagacaaacaagacaaccggcaacaccgataagagagccttcgtcgagacctggcagtccttttaccggaagaagcttaaggaggtgtggaaacctgccgtgcggtctggcggatctggcggaggctccaccagccccaagaaaaagagaaaagtctaagctgccttctgcggggcttgccttctggccatgcccttcttctctcccttgcacctgtacctcttggtctttgaataaagcctgagtaggaaggctagcaaaaaaaaaaaaaaaaaaaaaaaaaaaaaaaaaaaaaaaaaaaaaaaaaaaaaaaaaaaaaaaaaaaaaaaaaaaaaaaa

SEQ ID NO: 13628 - RNA, 5785 nt, synthetic construct
  source 1..5785: mol_type = other RNA
aggaaataagagagaaaagaagagtaagaagaaatataagagccaccatggcccctaagaagaagcgtaaagtgagccggatggaacgcctcgtctacgaggtgcggcagaagtgcagaaacatcgaggacatctgcatctcctgcggatctctgaacgtgaccctggagcacccactgttcatcggcggcatgtgccagaactgtaaaaactgttttctggagtgtgcctatcaatacgacgatgacggctaccagagctactgcaccatctgttgcggcggaagagaggtgctgatgtgtggaaataacaactgctgccggtgcttctgcgtggaatgcgtggacctgctggtgggccccggcgccgcccaggccgctattaaggaagatccttggaactgctacatgtgcggccacaagggcacatacggcctgctgagacggagagaggactggcctagcagactgcagatgttcttcgccaataaccacgaccaggagttcgacccccctaaggtgtaccctcccgtccccgccgagaagagaaagcccatccgggtcctgagcctgttcgatggcatcgccaccggtctgctggtgctgaaggacctgggcatccaggtggataggtacattgcctccgaggtgtgcgaggactccatcaccgtgggaatggtgcgtcatcagggcaagatcatgtacgtgggcgacgtgcggagcgtgacacagaagcatatccaggagtggggccctttcgacctggtgatcggcggcagcccttgcaatgacctgagcatcgtgaacccagcccggaagggcctgtacgagggaaccggcagactgttcttcgagttttacagactgctgcacgacgcccggcctaaggaaggcgacgaccggcccttcttttggctgttcgagaatgtggtggccatgggagtcagcgacaagcgggatattagccggttcctggagagcaaccccgtgatgatcgatgccaaggaagtgagcgccgcccaccgggccagatacttctggggcaatctgcctggcatgaacagacccctggccagcaccgtgaacgacaagctggagctgcaggagtgcctggagcacggccggatcgccaagttcagcaaggtgagaaccatcaccacccgaagcaacagcatcaaacaaggcaaggaccagcactttcctgtgttcatgaacgagaaggaggacatcctgtggtgtaccgagatggagagagtgttcgggttcccagtccactacacagatgtcagcaacatgtctagactggccagacagagactgctgggaagaagctggtccgtccctgtgatcagacacctgttcgcccctctgaaggagtacttcgcctgcgtgagcagcggcaacagcaacgccaacagccggggccccagcttctctagcggcctggtgccactgtccctgagagggagccacatgggccccatggagatctacaaaaccgtgagcgcctggaagcggcagcctgtgcgcgtgctgagcctgtttcggaatatcgataaagtcctgaaaagcctgggattcctggagagcggctctggctccggcggtggcaccctgaagtacgtggaggatgtgacaaacgtggtcagacgggatgtggagaagtggggccccttcgatctggtgtacggcagcacccaacccctgggcagctcttgtgaccggtgccctggctggtacatgtttcagttccaccggatcctgcagtacgccctgccgagacaggagtcccagcggccattcttttggattttcatggacaacttgctgctgaccgaggatgaccaggaaactaccactcggttcctgcagaccgaagccgtgaccctgcaggacgtgagaggccgggactaccagaacgccatgcgggtgtggtccaacatccctggactgaaaagcaagcacgcacctctgacccctaaagaagaggagtacctgcaggcccaggtgcggagcagaagcaagctggacgcccctaaggtggatctgctggtgaagaattgcctcctgcccctgagagagtacttcaagtatttcagccagaatagtctgcccctgggaggcagcggcggcggcggcagggtgaccttcagggacgtggccgtggagttcagcctggccgagtggaagtgcctgaaccccgtgcagagggccctgtacagggaggtgatgctggagaactacaggaacctggagttcgtggacagcagcctgaagagcatgatggagttcagcagccacgagcacagcaacaccggcgagggcttccacaccggcaccctggagaggcacaagagctaccacatcggcgacttctggggcggcccaagcagcggcgcccctcctcccagcggcggcagcccagccggctccccaacctctaccgaggagggcacctctgagtccgccacccccgagagcggccctggcacctccaccgagcccagcgagggcagcgcacccggcagccctgccggcagccccacctccacagaggagggaaccagcaccgagcccagcgaaggcagcgccccaggcaccagcaccgagcctagtgagcaggagattaaacggatcaacaagatcagaagaagacttgtgaaagacagcaacaccaagaaggccggcaagacaggccccatgaaaaccctgctggttagagtgatgacacccgatctgagagagcggctggaaaacctgagaaagaagcctgaaaatatcccccagcccatcagcaatacatctagagccaacctgaataagctgctgaccgattacaccgaaatgaagaaggcgatcctgcatgtgtactgggaagagttccagaaggaccctgtgggcctgatgagccgggtggcccagcctgccagcaagaagatcgatcagaacaagctgaaacctgagatggacgagaagggcaacctgaccaccgccggctttgcctgctctcagtgtggccagcccctgttcgtgtacaagctggagcaggtgtctgagaagggcaaggcttacaccaactacttcggacggtgcaatgtggccgagcacgaaaagctgatcctgctggcccagctgaagcccgagaaggatagcgacgaagccgtgacatatagcctgggaaagtttgggcagagggccctggatttctacagcattcatgtgaccaaggagtccacccaccccgtgaagcccctggcccagatcgccggaaacagatacgcctccggacctgtgggaaaggccctgagcgacgcatgtatgggcacaatcgcctccttcctgtctaagtaccaggacatcatcatcgaacaccagaaggtggtgaagggcaaccagaagagactggagagcctgcgggagctggccggcaaggaaaacctggaataccctagcgtgaccctgccacctcagcctcacaccaaggagggcgttgatgcctacaacgaagtgatcgcccgggtgcgaatgtgggtgaacctgaacctgtggcagaagctgaagctaagcagagatgatgccaagcctctgctgagactgaagggattcccttcctttcctctggtcgagagacaggccaacgaagtggactggtgggacatggtgtgtaacgtgaagaagctgatcaacgagaaaaaggaggatggcaaggtgttttggcagaatctggctggctacaagagacaggaagccctgagaccatacctgagcagcgaggaagatcggaagaagggaaagaaattcgctcggtaccagctgggcgacctgctgctgcacctggaaaagaagcacggcgaggactggggaaaggtgtacgacgaggcctgggagcggattgacaagaaagtggaaggcctgagcaagcacatcaagctggaagaggaacggagaagcgaggacgcccagagcaaggccgccctgaccgactggctgcgggctaaggccagcttcgtgatcgagggcctgaaggaggccgacaaggacgagttctgcagatgcgagctgaagctgcagaagtggtacggggacctgcggggaaagcccttcgccatcgaagccgagaacagcatcctggacatcagcggcttcagcaagcagtacaactgtgccttcatctggcagaaggacggcgtgaagaagctgaacctgtacctgatcatcaactacttcaagggcggcaagctgcggttcaagaagatcaaacctgaagccttcgaagccaacagattctacaccgtgatcaacaaaaagagcggcgagatcgtgcccatggaggtgaacttcaacttcgacgaccccaacctgatcatcctgcctctggcctttggcaagagacagggcagagaattcatctggaacgacctgctgtccctggaaaccggcagcctgaagctggccaacggaagagtgatcgagaagacactgtacaacagaagaacccggcaggatgagcctgccctgttcgtggccctgaccttcgagcggcgggaggtcctggactcctccaatatcaaaccaatgaacctgatcggcgtggcaagaggcgaaaacatccccgccgtgatcgccctgaccgaccccgagggctgcccactgagccggtttaaggatagcctgggaaacccaacccacatcctgagaatcggcgagagctataaggagaagcagcggaccatccaggccaagaaggaggtggagcagcggagagccggcggctacagccggaagtacgccagcaaagccaagaatctggcagacgatatggtgagaaacaccgctagagatctgctgtactacgccgtgacccaggatgccatgctgatcttcgccaacctgagccggggcttcggccggcagggcaagcggaccttcatggccgagagacagtacacacggatggaggactggctgaccgccaagctggcctacgagggcctgagcaagacctacctgtccaagacactggcccagtacacctccaagacatgcagcaactgtgggtttaccatcaccagcgccgactacgacagggtgctggagaagctgaagaagacagcaacaggctggatgaccacaattaacggcaaggagctgaaggtggagggccagattacctactacaacagatacaagagacagaacgtagtcaaggacctgtccgtcgagctggatagactgagcgaagaatctgtgaacaacgacatctcctcctggacaaagggcagaagcggagaagctctgagcctcctgaagaaaagattctcccatagacccgtgcaggagaagttcgtgtgcctgaactgcggcttcgagacacacgcagccgagcaagccgccctgaacatcgccagatcctggctgttcctgcggagccaggagtacaagaaataccagacaaacaagacaaccggcaacaccgataagagagccttcgtcgagacctggcagtccttttaccggaagaagcttaaggaggtgtggaaacctgccgtgcggtctggcggatctggcggaggctccaccagccccaagaaaaagagaaaagtctaagctgccttctgcggggcttgccttctggccatgcccttcttctctcccttgcacctgtacctcttggtctttgaataaagcctgagtaggaaggctagcaaaaaaaaaaaaaaaaaaaaaaaaaaaaaaaaaaaaaaaaaaaaaaaaaaaaaaaaaaaaaaaaaaaaaaaaaaaaaaaa

SEQ ID NO: 13629 - RNA, 5785 nt, synthetic construct
  source 1..5785: mol_type = other RNA
aggaaataagagagaaaagaagagtaagaagaaatataagagccaccatggcccctaagaagaagcgtaaagtgagccggatggaacgcctcgtctacgaggtgcggcagaagtgcagaaacatcgaggacatctgcatctcctgcggatctctgaacgtgaccctggagcacccactgttcatcggcggcatgtgccagaactgtaaaaactgttttctggagtgtgcctatcaatacgacgatgacggctaccagagctactgcaccatctgttgcggcggaagagaggtgctgatgtgtggaaataacaactgctgccggtgcttctgcgtggaatgcgtggacctgctggtgggccccggcgccgcccaggccgctattaaggaagatccttggaactgctacatgtgcggccacaagggcacatacggcctgctgagacggagagaggactggcctagcagactgcagatgttcttcgccaataaccacgaccaggagttcgacccccctaaggtgtaccctcccgtccccgccgagaagagaaagcccatccgggtcctgagcctgttcgatggcatcgccaccggtctgctggtgctgaaggacctgggcatccaggtggataggtacattgcctccgaggtgtgcgaggactccatcaccgtgggaatggtgcgtcatcagggcaagatcatgtacgtgggcgacgtgcggagcgtgacacagaagcatatccaggagtggggccctttcgacctggtgatcggcggcagcccttgcaatgacctgagcatcgtgaacccagcccggaagggcctgtacgagggaaccggcagactgttcttcgagttttacagactgctgcacgacgcccggcctaaggaaggcgacgaccggcccttcttttggctgttcgagaatgtggtggccatgggagtcagcgacaagcgggatattagccggttcctggagagcaaccccgtgatgatcgatgccaaggaagtgagcgccgcccaccgggccagatacttctggggcaatctgcctggcatgaacagacccctggccagcaccgtgaacgacaagctggagctgcaggagtgcctggagcacggccggatcgccaagttcagcaaggtgagaaccatcaccacccgaagcaacagcatcaaacaaggcaaggaccagcactttcctgtgttcatgaacgagaaggaggacatcctgtggtgtaccgagatggagagagtgttcgggttcccagtccactacacagatgtcagcaacatgtctagactggccagacagagactgctgggaagaagctggtccgtccctgtgatcagacacctgttcgcccctctgaaggagtacttcgcctgcgtgagcagcggcaacagcaacgccaacagccggggccccagcttctctagcggcctggtgccactgtccctgagagggagccacatgggccccatggagatctacaaaaccgtgagcgcctggaagcggcagcctgtgcgcgtgctgagcctgtttcggaatatcgataaagtcctgaaaagcctgggattcctggagagcggctctggctccggcggtggcaccctgaagtacgtggaggatgtgacaaacgtggtcagacgggatgtggagaagtggggccccttcgatctggtgtacggcagcacccaacccctgggcagctcttgtgaccggtgccctggctggtacatgtttcagttccaccggatcctgcagtacgccctgccgagacaggagtcccagcggccattcttttggattttcatggacaacttgctgctgaccgaggatgaccaggaaactaccactcggttcctgcagaccgaagccgtgaccctgcaggacgtgagaggccgggactaccagaacgccatgcgggtgtggtccaacatccctggactgaaaagcaagcacgcacctctgacccctaaagaagaggagtacctgcaggcccaggtgcggagcagaagcaagctggacgcccctaaggtggatctgctggtgaagaattgcctcctgcccctgagagagtacttcaagtatttcagccagaatagtctgcccctgggaggcagcggcggcggcggcaaggagctgctgagcttcgaggacgtggccatgtacttcaccagggaggagtggggccacctgaacctgggccagaaggacctgtacagggacgtgatgctggagaactacaggaacatggtgctgctgggcttccagttccccaagcccgaggtgatctgccagctggagaactgggacgagcagtggatcctggacctgcccagggccggcaacaggaaggccagcggcagcgcctgcggcggcccaagcagcggcgcccctcctcccagcggcggcagcccagccggctccccaacctctaccgaggagggcacctctgagtccgccacccccgagagcggccctggcacctccaccgagcccagcgagggcagcgcacccggcagccctgccggcagccccacctccacagaggagggaaccagcaccgagcccagcgaaggcagcgccccaggcaccagcaccgagcctagtgagcaggagattaaacggatcaacaagatcagaagaagacttgtgaaagacagcaacaccaagaaggccggcaagacaggccccatgaaaaccctgctggttagagtgatgacacccgatctgagagagcggctggaaaacctgagaaagaagcctgaaaatatcccccagcccatcagcaatacatctagagccaacctgaataagctgctgaccgattacaccgaaatgaagaaggcgatcctgcatgtgtactgggaagagttccagaaggaccctgtgggcctgatgagccgggtggcccagcctgccagcaagaagatcgatcagaacaagctgaaacctgagatggacgagaagggcaacctgaccaccgccggctttgcctgctctcagtgtggccagcccctgttcgtgtacaagctggagcaggtgtctgagaagggcaaggcttacaccaactacttcggacggtgcaatgtggccgagcacgaaaagctgatcctgctggcccagctgaagcccgagaaggatagcgacgaagccgtgacatatagcctgggaaagtttgggcagagggccctggatttctacagcattcatgtgaccaaggagtccacccaccccgtgaagcccctggcccagatcgccggaaacagatacgcctccggacctgtgggaaaggccctgagcgacgcatgtatgggcacaatcgcctccttcctgtctaagtaccaggacatcatcatcgaacaccagaaggtggtgaagggcaaccagaagagactggagagcctgcgggagctggccggcaaggaaaacctggaataccctagcgtgaccctgccacctcagcctcacaccaaggagggcgttgatgcctacaacgaagtgatcgcccgggtgcgaatgtgggtgaacctgaacctgtggcagaagctgaagctaagcagagatgatgccaagcctctgctgagactgaagggattcccttcctttcctctggtcgagagacaggccaacgaagtggactggtgggacatggtgtgtaacgtgaagaagctgatcaacgagaaaaaggaggatggcaaggtgttttggcagaatctggctggctacaagagacaggaagccctgagaccatacctgagcagcgaggaagatcggaagaagggaaagaaattcgctcggtaccagctgggcgacctgctgctgcacctggaaaagaagcacggcgaggactggggaaaggtgtacgacgaggcctgggagcggattgacaagaaagtggaaggcctgagcaagcacatcaagctggaagaggaacggagaagcgaggacgcccagagcaaggccgccctgaccgactggctgcgggctaaggccagcttcgtgatcgagggcctgaaggaggccgacaaggacgagttctgcagatgcgagctgaagctgcagaagtggtacggggacctgcggggaaagcccttcgccatcgaagccgagaacagcatcctggacatcagcggcttcagcaagcagtacaactgtgccttcatctggcagaaggacggcgtgaagaagctgaacctgtacctgatcatcaactacttcaagggcggcaagctgcggttcaagaagatcaaacctgaagccttcgaagccaacagattctacaccgtgatcaacaaaaagagcggcgagatcgtgcccatggaggtgaacttcaacttcgacgaccccaacctgatcatcctgcctctggcctttggcaagagacagggcagagaattcatctggaacgacctgctgtccctggaaaccggcagcctgaagctggccaacggaagagtgatcgagaagacactgtacaacagaagaacccggcaggatgagcctgccctgttcgtggccctgaccttcgagcggcgggaggtcctggactcctccaatatcaaaccaatgaacctgatcggcgtggcaagaggcgaaaacatccccgccgtgatcgccctgaccgaccccgagggctgcccactgagccggtttaaggatagcctgggaaacccaacccacatcctgagaatcggcgagagctataaggagaagcagcggaccatccaggccaagaaggaggtggagcagcggagagccggcggctacagccggaagtacgccagcaaagccaagaatctggcagacgatatggtgagaaacaccgctagagatctgctgtactacgccgtgacccaggatgccatgctgatcttcgccaacctgagccggggcttcggccggcagggcaagcggaccttcatggccgagagacagtacacacggatggaggactggctgaccgccaagctggcctacgagggcctgagcaagacctacctgtccaagacactggcccagtacacctccaagacatgcagcaactgtgggtttaccatcaccagcgccgactacgacagggtgctggagaagctgaagaagacagcaacaggctggatgaccacaattaacggcaaggagctgaaggtggagggccagattacctactacaacagatacaagagacagaacgtagtcaaggacctgtccgtcgagctggatagactgagcgaagaatctgtgaacaacgacatctcctcctggacaaagggcagaagcggagaagctctgagcctcctgaagaaaagattctcccatagacccgtgcaggagaagttcgtgtgcctgaactgcggcttcgagacacacgcagccgagcaagccgccctgaacatcgccagatcctggctgttcctgcggagccaggagtacaagaaataccagacaaacaagacaaccggcaacaccgataagagagccttcgtcgagacctggcagtccttttaccggaagaagcttaaggaggtgtggaaacctgccgtgcggtctggcggatctggcggaggctccaccagccccaagaaaaagagaaaagtctaagctgccttctgcggggcttgccttctggccatgcccttcttctctcccttgcacctgtacctcttggtctttgaataaagcctgagtaggaaggctagcaaaaaaaaaaaaaaaaaaaaaaaaaaaaaaaaaaaaaaaaaaaaaaaaaaaaaaaaaaaaaaaaaaaaaaaaaaaaaaaa

SEQ ID NO: 13630 - RNA, 5785 nt, synthetic construct
  source 1..5785: mol_type = other RNA
aggaaataagagagaaaagaagagtaagaagaaatataagagccaccatggcccctaagaagaagcgtaaagtgagccggatggaacgcctcgtctacgaggtgcggcagaagtgcagaaacatcgaggacatctgcatctcctgcggatctctgaacgtgaccctggagcacccactgttcatcggcggcatgtgccagaactgtaaaaactgttttctggagtgtgcctatcaatacgacgatgacggctaccagagctactgcaccatctgttgcggcggaagagaggtgctgatgtgtggaaataacaactgctgccggtgcttctgcgtggaatgcgtggacctgctggtgggccccggcgccgcccaggccgctattaaggaagatccttggaactgctacatgtgcggccacaagggcacatacggcctgctgagacggagagaggactggcctagcagactgcagatgttcttcgccaataaccacgaccaggagttcgacccccctaaggtgtaccctcccgtccccgccgagaagagaaagcccatccgggtcctgagcctgttcgatggcatcgccaccggtctgctggtgctgaaggacctgggcatccaggtggataggtacattgcctccgaggtgtgcgaggactccatcaccgtgggaatggtgcgtcatcagggcaagatcatgtacgtgggcgacgtgcggagcgtgacacagaagcatatccaggagtggggccctttcgacctggtgatcggcggcagcccttgcaatgacctgagcatcgtgaacccagcccggaagggcctgtacgagggaaccggcagactgttcttcgagttttacagactgctgcacgacgcccggcctaaggaaggcgacgaccggcccttcttttggctgttcgagaatgtggtggccatgggagtcagcgacaagcgggatattagccggttcctggagagcaaccccgtgatgatcgatgccaaggaagtgagcgccgcccaccgggccagatacttctggggcaatctgcctggcatgaacagacccctggccagcaccgtgaacgacaagctggagctgcaggagtgcctggagcacggccggatcgccaagttcagcaaggtgagaaccatcaccacccgaagcaacagcatcaaacaaggcaaggaccagcactttcctgtgttcatgaacgagaaggaggacatcctgtggtgtaccgagatggagagagtgttcgggttcccagtccactacacagatgtcagcaacatgtctagactggccagacagagactgctgggaagaagctggtccgtccctgtgatcagacacctgttcgcccctctgaaggagtacttcgcctgcgtgagcagcggcaacagcaacgccaacagccggggccccagcttctctagcggcctggtgccactgtccctgagagggagccacatgggccccatggagatctacaaaaccgtgagcgcctggaagcggcagcctgtgcgcgtgctgagcctgtttcggaatatcgataaagtcctgaaaagcctgggattcctggagagcggctctggctccggcggtggcaccctgaagtacgtggaggatgtgacaaacgtggtcagacgggatgtggagaagtggggccccttcgatctggtgtacggcagcacccaacccctgggcagctcttgtgaccggtgccctggctggtacatgtttcagttccaccggatcctgcagtacgccctgccgagacaggagtcccagcggccattcttttggattttcatggacaacttgctgctgaccgaggatgaccaggaaactaccactcggttcctgcagaccgaagccgtgaccctgcaggacgtgagaggccgggactaccagaacgccatgcgggtgtggtccaacatccctggactgaaaagcaagcacgcacctctgacccctaaagaagaggagtacctgcaggcccaggtgcggagcagaagcaagctggacgcccctaaggtggatctgctggtgaagaattgcctcctgcccctgagagagtacttcaagtatttcagccagaatagtctgcccctgggaggcagcggcggcggccccctggagagcgtgaccttcgaggacgtggccgtggacttcacccaggaggagtggagcctgctggacaagagccagaagaacctgttcaggaacgtgatgctggagaccgtgacccacctggtgagcgtgggctaccagatcagcaagagcgacgtgatcttccagctggagcagggcaaggagctgtggcccgaggccgccggcggcctgcagggccagagccccgacgaggtgacccccggcggcccaagcagcggcgcccctcctcccagcggcggcagcccagccggctccccaacctctaccgaggagggcacctctgagtccgccacccccgagagcggccctggcacctccaccgagcccagcgagggcagcgcacccggcagccctgccggcagccccacctccacagaggagggaaccagcaccgagcccagcgaaggcagcgccccaggcaccagcaccgagcctagtgagcaggagattaaacggatcaacaagatcagaagaagacttgtgaaagacagcaacaccaagaaggccggcaagacaggccccatgaaaaccctgctggttagagtgatgacacccgatctgagagagcggctggaaaacctgagaaagaagcctgaaaatatcccccagcccatcagcaatacatctagagccaacctgaataagctgctgaccgattacaccgaaatgaagaaggcgatcctgcatgtgtactgggaagagttccagaaggaccctgtgggcctgatgagccgggtggcccagcctgccagcaagaagatcgatcagaacaagctgaaacctgagatggacgagaagggcaacctgaccaccgccggctttgcctgctctcagtgtggccagcccctgttcgtgtacaagctggagcaggtgtctgagaagggcaaggcttacaccaactacttcggacggtgcaatgtggccgagcacgaaaagctgatcctgctggcccagctgaagcccgagaaggatagcgacgaagccgtgacatatagcctgggaaagtttgggcagagggccctggatttctacagcattcatgtgaccaaggagtccacccaccccgtgaagcccctggcccagatcgccggaaacagatacgcctccggacctgtgggaaaggccctgagcgacgcatgtatgggcacaatcgcctccttcctgtctaagtaccaggacatcatcatcgaacaccagaaggtggtgaagggcaaccagaagagactggagagcctgcgggagctggccggcaaggaaaacctggaataccctagcgtgaccctgccacctcagcctcacaccaaggagggcgttgatgcctacaacgaagtgatcgcccgggtgcgaatgtgggtgaacctgaacctgtggcagaagctgaagctaagcagagatgatgccaagcctctgctgagactgaagggattcccttcctttcctctggtcgagagacaggccaacgaagtggactggtgggacatggtgtgtaacgtgaagaagctgatcaacgagaaaaaggaggatggcaaggtgttttggcagaatctggctggctacaagagacaggaagccctgagaccatacctgagcagcgaggaagatcggaagaagggaaagaaattcgctcggtaccagctgggcgacctgctgctgcacctggaaaagaagcacggcgaggactggggaaaggtgtacgacgaggcctgggagcggattgacaagaaagtggaaggcctgagcaagcacatcaagctggaagaggaacggagaagcgaggacgcccagagcaaggccgccctgaccgactggctgcgggctaaggccagcttcgtgatcgagggcctgaaggaggccgacaaggacgagttctgcagatgcgagctgaagctgcagaagtggtacggggacctgcggggaaagcccttcgccatcgaagccgagaacagcatcctggacatcagcggcttcagcaagcagtacaactgtgccttcatctggcagaaggacggcgtgaagaagctgaacctgtacctgatcatcaactacttcaagggcggcaagctgcggttcaagaagatcaaacctgaagccttcgaagccaacagattctacaccgtgatcaacaaaaagagcggcgagatcgtgcccatggaggtgaacttcaacttcgacgaccccaacctgatcatcctgcctctggcctttggcaagagacagggcagagaattcatctggaacgacctgctgtccctggaaaccggcagcctgaagctggccaacggaagagtgatcgagaagacactgtacaacagaagaacccggcaggatgagcctgccctgttcgtggccctgaccttcgagcggcgggaggtcctggactcctccaatatcaaaccaatgaacctgatcggcgtggcaagaggcgaaaacatccccgccgtgatcgccctgaccgaccccgagggctgcccactgagccggtttaaggatagcctgggaaacccaacccacatcctgagaatcggcgagagctataaggagaagcagcggaccatccaggccaagaaggaggtggagcagcggagagccggcggctacagccggaagtacgccagcaaagccaagaatctggcagacgatatggtgagaaacaccgctagagatctgctgtactacgccgtgacccaggatgccatgctgatcttcgccaacctgagccggggcttcggccggcagggcaagcggaccttcatggccgagagacagtacacacggatggaggactggctgaccgccaagctggcctacgagggcctgagcaagacctacctgtccaagacactggcccagtacacctccaagacatgcagcaactgtgggtttaccatcaccagcgccgactacgacagggtgctggagaagctgaagaagacagcaacaggctggatgaccacaattaacggcaaggagctgaaggtggagggccagattacctactacaacagatacaagagacagaacgtagtcaaggacctgtccgtcgagctggatagactgagcgaagaatctgtgaacaacgacatctcctcctggacaaagggcagaagcggagaagctctgagcctcctgaagaaaagattctcccatagacccgtgcaggagaagttcgtgtgcctgaactgcggcttcgagacacacgcagccgagcaagccgccctgaacatcgccagatcctggctgttcctgcggagccaggagtacaagaaataccagacaaacaagacaaccggcaacaccgataagagagccttcgtcgagacctggcagtccttttaccggaagaagcttaaggaggtgtggaaacctgccgtgcggtctggcggatctggcggaggctccaccagccccaagaaaaagagaaaagtctaagctgccttctgcggggcttgccttctggccatgcccttcttctctcccttgcacctgtacctcttggtctttgaataaagcctgagtaggaaggctagcaaaaaaaaaaaaaaaaaaaaaaaaaaaaaaaaaaaaaaaaaaaaaaaaaaaaaaaaaaaaaaaaaaaaaaaaaaaaaaaa

SEQ ID NO: 13631 - RNA, 5785 nt, synthetic construct
  source 1..5785: mol_type = other RNA
aggaaataagagagaaaagaagagtaagaagaaatataagagccaccatggcccctaagaagaagcgtaaagtgagccggatggaacgcctcgtctacgaggtgcggcagaagtgcagaaacatcgaggacatctgcatctcctgcggatctctgaacgtgaccctggagcacccactgttcatcggcggcatgtgccagaactgtaaaaactgttttctggagtgtgcctatcaatacgacgatgacggctaccagagctactgcaccatctgttgcggcggaagagaggtgctgatgtgtggaaataacaactgctgccggtgcttctgcgtggaatgcgtggacctgctggtgggccccggcgccgcccaggccgctattaaggaagatccttggaactgctacatgtgcggccacaagggcacatacggcctgctgagacggagagaggactggcctagcagactgcagatgttcttcgccaataaccacgaccaggagttcgacccccctaaggtgtaccctcccgtccccgccgagaagagaaagcccatccgggtcctgagcctgttcgatggcatcgccaccggtctgctggtgctgaaggacctgggcatccaggtggataggtacattgcctccgaggtgtgcgaggactccatcaccgtgggaatggtgcgtcatcagggcaagatcatgtacgtgggcgacgtgcggagcgtgacacagaagcatatccaggagtggggccctttcgacctggtgatcggcggcagcccttgcaatgacctgagcatcgtgaacccagcccggaagggcctgtacgagggaaccggcagactgttcttcgagttttacagactgctgcacgacgcccggcctaaggaaggcgacgaccggcccttcttttggctgttcgagaatgtggtggccatgggagtcagcgacaagcgggatattagccggttcctggagagcaaccccgtgatgatcgatgccaaggaagtgagcgccgcccaccgggccagatacttctggggcaatctgcctggcatgaacagacccctggccagcaccgtgaacgacaagctggagctgcaggagtgcctggagcacggccggatcgccaagttcagcaaggtgagaaccatcaccacccgaagcaacagcatcaaacaaggcaaggaccagcactttcctgtgttcatgaacgagaaggaggacatcctgtggtgtaccgagatggagagagtgttcgggttcccagtccactacacagatgtcagcaacatgtctagactggccagacagagactgctgggaagaagctggtccgtccctgtgatcagacacctgttcgcccctctgaaggagtacttcgcctgcgtgagcagcggcaacagcaacgccaacagccggggccccagcttctctagcggcctggtgccactgtccctgagagggagccacatgggccccatggagatctacaaaaccgtgagcgcctggaagcggcagcctgtgcgcgtgctgagcctgtttcggaatatcgataaagtcctgaaaagcctgggattcctggagagcggctctggctccggcggtggcaccctgaagtacgtggaggatgtgacaaacgtggtcagacgggatgtggagaagtggggccccttcgatctggtgtacggcagcacccaacccctgggcagctcttgtgaccggtgccctggctggtacatgtttcagttccaccggatcctgcagtacgccctgccgagacaggagtcccagcggccattcttttggattttcatggacaacttgctgctgaccgaggatgaccaggaaactaccactcggttcctgcagaccgaagccgtgaccctgcaggacgtgagaggccgggactaccagaacgccatgcgggtgtggtccaacatccctggactgaaaagcaagcacgcacctctgacccctaaagaagaggagtacctgcaggcccaggtgcggagcagaagcaagctggacgcccctaaggtggatctgctggtgaagaattgcctcctgcccctgagagagtacttcaagtatttcagccagaatagtctgcccctgggaggcagcggcggcggcatggcccagggcctggtgaccttcagggacgtggccatcgagttcagcctggaggagtggaagtgcctggagcccgcccagagggacctgtacagggaggtgaccctggagaacttcggccacctggccagcctgggcctgagcatcagcaagcccgacgtggtgagcctgctggagcagggcaaggagccctggatgatcgccaacgacgtgaccggcccctggtaccccgacctggagagcggcggcccaagcagcggcgcccctcctcccagcggcggcagcccagccggctccccaacctctaccgaggagggcacctctgagtccgccacccccgagagcggccctggcacctccaccgagcccagcgagggcagcgcacccggcagccctgccggcagccccacctccacagaggagggaaccagcaccgagcccagcgaaggcagcgccccaggcaccagcaccgagcctagtgagcaggagattaaacggatcaacaagatcagaagaagacttgtgaaagacagcaacaccaagaaggccggcaagacaggccccatgaaaaccctgctggttagagtgatgacacccgatctgagagagcggctggaaaacctgagaaagaagcctgaaaatatcccccagcccatcagcaatacatctagagccaacctgaataagctgctgaccgattacaccgaaatgaagaaggcgatcctgcatgtgtactgggaagagttccagaaggaccctgtgggcctgatgagccgggtggcccagcctgccagcaagaagatcgatcagaacaagctgaaacctgagatggacgagaagggcaacctgaccaccgccggctttgcctgctctcagtgtggccagcccctgttcgtgtacaagctggagcaggtgtctgagaagggcaaggcttacaccaactacttcggacggtgcaatgtggccgagcacgaaaagctgatcctgctggcccagctgaagcccgagaaggatagcgacgaagccgtgacatatagcctgggaaagtttgggcagagggccctggatttctacagcattcatgtgaccaaggagtccacccaccccgtgaagcccctggcccagatcgccggaaacagatacgcctccggacctgtgggaaaggccctgagcgacgcatgtatgggcacaatcgcctccttcctgtctaagtaccaggacatcatcatcgaacaccagaaggtggtgaagggcaaccagaagagactggagagcctgcgggagctggccggcaaggaaaacctggaataccctagcgtgaccctgccacctcagcctcacaccaaggagggcgttgatgcctacaacgaagtgatcgcccgggtgcgaatgtgggtgaacctgaacctgtggcagaagctgaagctaagcagagatgatgccaagcctctgctgagactgaagggattcccttcctttcctctggtcgagagacaggccaacgaagtggactggtgggacatggtgtgtaacgtgaagaagctgatcaacgagaaaaaggaggatggcaaggtgttttggcagaatctggctggctacaagagacaggaagccctgagaccatacctgagcagcgaggaagatcggaagaagggaaagaaattcgctcggtaccagctgggcgacctgctgctgcacctggaaaagaagcacggcgaggactggggaaaggtgtacgacgaggcctgggagcggattgacaagaaagtggaaggcctgagcaagcacatcaagctggaagaggaacggagaagcgaggacgcccagagcaaggccgccctgaccgactggctgcgggctaaggccagcttcgtgatcgagggcctgaaggaggccgacaaggacgagttctgcagatgcgagctgaagctgcagaagtggtacggggacctgcggggaaagcccttcgccatcgaagccgagaacagcatcctggacatcagcggcttcagcaagcagtacaactgtgccttcatctggcagaaggacggcgtgaagaagctgaacctgtacctgatcatcaactacttcaagggcggcaagctgcggttcaagaagatcaaacctgaagccttcgaagccaacagattctacaccgtgatcaacaaaaagagcggcgagatcgtgcccatggaggtgaacttcaacttcgacgaccccaacctgatcatcctgcctctggcctttggcaagagacagggcagagaattcatctggaacgacctgctgtccctggaaaccggcagcctgaagctggccaacggaagagtgatcgagaagacactgtacaacagaagaacccggcaggatgagcctgccctgttcgtggccctgaccttcgagcggcgggaggtcctggactcctccaatatcaaaccaatgaacctgatcggcgtggcaagaggcgaaaacatccccgccgtgatcgccctgaccgaccccgagggctgcccactgagccggtttaaggatagcctgggaaacccaacccacatcctgagaatcggcgagagctataaggagaagcagcggaccatccaggccaagaaggaggtggagcagcggagagccggcggctacagccggaagtacgccagcaaagccaagaatctggcagacgatatggtgagaaacaccgctagagatctgctgtactacgccgtgacccaggatgccatgctgatcttcgccaacctgagccggggcttcggccggcagggcaagcggaccttcatggccgagagacagtacacacggatggaggactggctgaccgccaagctggcctacgagggcctgagcaagacctacctgtccaagacactggcccagtacacctccaagacatgcagcaactgtgggtttaccatcaccagcgccgactacgacagggtgctggagaagctgaagaagacagcaacaggctggatgaccacaattaacggcaaggagctgaaggtggagggccagattacctactacaacagatacaagagacagaacgtagtcaaggacctgtccgtcgagctggatagactgagcgaagaatctgtgaacaacgacatctcctcctggacaaagggcagaagcggagaagctctgagcctcctgaagaaaagattctcccatagacccgtgcaggagaagttcgtgtgcctgaactgcggcttcgagacacacgcagccgagcaagccgccctgaacatcgccagatcctggctgttcctgcggagccaggagtacaagaaataccagacaaacaagacaaccggcaacaccgataagagagccttcgtcgagacctggcagtccttttaccggaagaagcttaaggaggtgtggaaacctgccgtgcggtctggcggatctggcggaggctccaccagccccaagaaaaagagaaaagtctaagctgccttctgcggggcttgccttctggccatgcccttcttctctcccttgcacctgtacctcttggtctttgaataaagcctgagtaggaaggctagcaaaaaaaaaaaaaaaaaaaaaaaaaaaaaaaaaaaaaaaaaaaaaaaaaaaaaaaaaaaaaaaaaaaaaaaaaaaaaaaa

SEQ ID NO: 13632 - RNA, 5785 nt, synthetic construct
  source 1..5785: mol_type = other RNA
aggaaataagagagaaaagaagagtaagaagaaatataagagccaccatggcccctaagaagaagcgtaaagtgagccggatggaacgcctcgtctacgaggtgcggcagaagtgcagaaacatcgaggacatctgcatctcctgcggatctctgaacgtgaccctggagcacccactgttcatcggcggcatgtgccagaactgtaaaaactgttttctggagtgtgcctatcaatacgacgatgacggctaccagagctactgcaccatctgttgcggcggaagagaggtgctgatgtgtggaaataacaactgctgccggtgcttctgcgtggaatgcgtggacctgctggtgggccccggcgccgcccaggccgctattaaggaagatccttggaactgctacatgtgcggccacaagggcacatacggcctgctgagacggagagaggactggcctagcagactgcagatgttcttcgccaataaccacgaccaggagttcgacccccctaaggtgtaccctcccgtccccgccgagaagagaaagcccatccgggtcctgagcctgttcgatggcatcgccaccggtctgctggtgctgaaggacctgggcatccaggtggataggtacattgcctccgaggtgtgcgaggactccatcaccgtgggaatggtgcgtcatcagggcaagatcatgtacgtgggcgacgtgcggagcgtgacacagaagcatatccaggagtggggccctttcgacctggtgatcggcggcagcccttgcaatgacctgagcatcgtgaacccagcccggaagggcctgtacgagggaaccggcagactgttcttcgagttttacagactgctgcacgacgcccggcctaaggaaggcgacgaccggcccttcttttggctgttcgagaatgtggtggccatgggagtcagcgacaagcgggatattagccggttcctggagagcaaccccgtgatgatcgatgccaaggaagtgagcgccgcccaccgggccagatacttctggggcaatctgcctggcatgaacagacccctggccagcaccgtgaacgacaagctggagctgcaggagtgcctggagcacggccggatcgccaagttcagcaaggtgagaaccatcaccacccgaagcaacagcatcaaacaaggcaaggaccagcactttcctgtgttcatgaacgagaaggaggacatcctgtggtgtaccgagatggagagagtgttcgggttcccagtccactacacagatgtcagcaacatgtctagactggccagacagagactgctgggaagaagctggtccgtccctgtgatcagacacctgttcgcccctctgaaggagtacttcgcctgcgtgagcagcggcaacagcaacgccaacagccggggccccagcttctctagcggcctggtgccactgtccctgagagggagccacatgggccccatggagatctacaaaaccgtgagcgcctggaagcggcagcctgtgcgcgtgctgagcctgtttcggaatatcgataaagtcctgaaaagcctgggattcctggagagcggctctggctccggcggtggcaccctgaagtacgtggaggatgtgacaaacgtggtcagacgggatgtggagaagtggggccccttcgatctggtgtacggcagcacccaacccctgggcagctcttgtgaccggtgccctggctggtacatgtttcagttccaccggatcctgcagtacgccctgccgagacaggagtcccagcggccattcttttggattttcatggacaacttgctgctgaccgaggatgaccaggaaactaccactcggttcctgcagaccgaagccgtgaccctgcaggacgtgagaggccgggactaccagaacgccatgcgggtgtggtccaacatccctggactgaaaagcaagcacgcacctctgacccctaaagaagaggagtacctgcaggcccaggtgcggagcagaagcaagctggacgcccctaaggtggatctgctggtgaagaattgcctcctgcccctgagagagtacttcaagtatttcagccagaatagtctgcccctgggaggcagcggcggcggcgcccagaaggtgctgaccttcagggacgtggccatcgagttcagcctggaggagtggaagttcctggaccccgcccagcagaacctgtacagggacgtgatgctggagaactacaggaacctgttcagcatcggcctgaccgtgagcaagcccggcctgatcacctgcctggagcagaggaaggccccctggaacctgaagaggagggaggccgtggacggccacatcttcttcgccgagtacggcggcccaagcagcggcgcccctcctcccagcggcggcagcccagccggctccccaacctctaccgaggagggcacctctgagtccgccacccccgagagcggccctggcacctccaccgagcccagcgagggcagcgcacccggcagccctgccggcagccccacctccacagaggagggaaccagcaccgagcccagcgaaggcagcgccccaggcaccagcaccgagcctagtgagcaggagattaaacggatcaacaagatcagaagaagacttgtgaaagacagcaacaccaagaaggccggcaagacaggccccatgaaaaccctgctggttagagtgatgacacccgatctgagagagcggctggaaaacctgagaaagaagcctgaaaatatcccccagcccatcagcaatacatctagagccaacctgaataagctgctgaccgattacaccgaaatgaagaaggcgatcctgcatgtgtactgggaagagttccagaaggaccctgtgggcctgatgagccgggtggcccagcctgccagcaagaagatcgatcagaacaagctgaaacctgagatggacgagaagggcaacctgaccaccgccggctttgcctgctctcagtgtggccagcccctgttcgtgtacaagctggagcaggtgtctgagaagggcaaggcttacaccaactacttcggacggtgcaatgtggccgagcacgaaaagctgatcctgctggcccagctgaagcccgagaaggatagcgacgaagccgtgacatatagcctgggaaagtttgggcagagggccctggatttctacagcattcatgtgaccaaggagtccacccaccccgtgaagcccctggcccagatcgccggaaacagatacgcctccggacctgtgggaaaggccctgagcgacgcatgtatgggcacaatcgcctccttcctgtctaagtaccaggacatcatcatcgaacaccagaaggtggtgaagggcaaccagaagagactggagagcctgcgggagctggccggcaaggaaaacctggaataccctagcgtgaccctgccacctcagcctcacaccaaggagggcgttgatgcctacaacgaagtgatcgcccgggtgcgaatgtgggtgaacctgaacctgtggcagaagctgaagctaagcagagatgatgccaagcctctgctgagactgaagggattcccttcctttcctctggtcgagagacaggccaacgaagtggactggtgggacatggtgtgtaacgtgaagaagctgatcaacgagaaaaaggaggatggcaaggtgttttggcagaatctggctggctacaagagacaggaagccctgagaccatacctgagcagcgaggaagatcggaagaagggaaagaaattcgctcggtaccagctgggcgacctgctgctgcacctggaaaagaagcacggcgaggactggggaaaggtgtacgacgaggcctgggagcggattgacaagaaagtggaaggcctgagcaagcacatcaagctggaagaggaacggagaagcgaggacgcccagagcaaggccgccctgaccgactggctgcgggctaaggccagcttcgtgatcgagggcctgaaggaggccgacaaggacgagttctgcagatgcgagctgaagctgcagaagtggtacggggacctgcggggaaagcccttcgccatcgaagccgagaacagcatcctggacatcagcggcttcagcaagcagtacaactgtgccttcatctggcagaaggacggcgtgaagaagctgaacctgtacctgatcatcaactacttcaagggcggcaagctgcggttcaagaagatcaaacctgaagccttcgaagccaacagattctacaccgtgatcaacaaaaagagcggcgagatcgtgcccatggaggtgaacttcaacttcgacgaccccaacctgatcatcctgcctctggcctttggcaagagacagggcagagaattcatctggaacgacctgctgtccctggaaaccggcagcctgaagctggccaacggaagagtgatcgagaagacactgtacaacagaagaacccggcaggatgagcctgccctgttcgtggccctgaccttcgagcggcgggaggtcctggactcctccaatatcaaaccaatgaacctgatcggcgtggcaagaggcgaaaacatccccgccgtgatcgccctgaccgaccccgagggctgcccactgagccggtttaaggatagcctgggaaacccaacccacatcctgagaatcggcgagagctataaggagaagcagcggaccatccaggccaagaaggaggtggagcagcggagagccggcggctacagccggaagtacgccagcaaagccaagaatctggcagacgatatggtgagaaacaccgctagagatctgctgtactacgccgtgacccaggatgccatgctgatcttcgccaacctgagccggggcttcggccggcagggcaagcggaccttcatggccgagagacagtacacacggatggaggactggctgaccgccaagctggcctacgagggcctgagcaagacctacctgtccaagacactggcccagtacacctccaagacatgcagcaactgtgggtttaccatcaccagcgccgactacgacagggtgctggagaagctgaagaagacagcaacaggctggatgaccacaattaacggcaaggagctgaaggtggagggccagattacctactacaacagatacaagagacagaacgtagtcaaggacctgtccgtcgagctggatagactgagcgaagaatctgtgaacaacgacatctcctcctggacaaagggcagaagcggagaagctctgagcctcctgaagaaaagattctcccatagacccgtgcaggagaagttcgtgtgcctgaactgcggcttcgagacacacgcagccgagcaagccgccctgaacatcgccagatcctggctgttcctgcggagccaggagtacaagaaataccagacaaacaagacaaccggcaacaccgataagagagccttcgtcgagacctggcagtccttttaccggaagaagcttaaggaggtgtggaaacctgccgtgcggtctggcggatctggcggaggctccaccagccccaagaaaaagagaaaagtctaagctgccttctgcggggcttgccttctggccatgcccttcttctctcccttgcacctgtacctcttggtctttgaataaagcctgagtaggaaggctagcaaaaaaaaaaaaaaaaaaaaaaaaaaaaaaaaaaaaaaaaaaaaaaaaaaaaaaaaaaaaaaaaaaaaaaaaaaaaaaaa

SEQ ID NO: 13633 - RNA, 5785 nt, synthetic construct
  source 1..5785: mol_type = other RNA
aggaaataagagagaaaagaagagtaagaagaaatataagagccaccatggcccctaagaagaagcgtaaagtgagccggatggaacgcctcgtctacgaggtgcggcagaagtgcagaaacatcgaggacatctgcatctcctgcggatctctgaacgtgaccctggagcacccactgttcatcggcggcatgtgccagaactgtaaaaactgttttctggagtgtgcctatcaatacgacgatgacggctaccagagctactgcaccatctgttgcggcggaagagaggtgctgatgtgtggaaataacaactgctgccggtgcttctgcgtggaatgcgtggacctgctggtgggccccggcgccgcccaggccgctattaaggaagatccttggaactgctacatgtgcggccacaagggcacatacggcctgctgagacggagagaggactggcctagcagactgcagatgttcttcgccaataaccacgaccaggagttcgacccccctaaggtgtaccctcccgtccccgccgagaagagaaagcccatccgggtcctgagcctgttcgatggcatcgccaccggtctgctggtgctgaaggacctgggcatccaggtggataggtacattgcctccgaggtgtgcgaggactccatcaccgtgggaatggtgcgtcatcagggcaagatcatgtacgtgggcgacgtgcggagcgtgacacagaagcatatccaggagtggggccctttcgacctggtgatcggcggcagcccttgcaatgacctgagcatcgtgaacccagcccggaagggcctgtacgagggaaccggcagactgttcttcgagttttacagactgctgcacgacgcccggcctaaggaaggcgacgaccggcccttcttttggctgttcgagaatgtggtggccatgggagtcagcgacaagcgggatattagccggttcctggagagcaaccccgtgatgatcgatgccaaggaagtgagcgccgcccaccgggccagatacttctggggcaatctgcctggcatgaacagacccctggccagcaccgtgaacgacaagctggagctgcaggagtgcctggagcacggccggatcgccaagttcagcaaggtgagaaccatcaccacccgaagcaacagcatcaaacaaggcaaggaccagcactttcctgtgttcatgaacgagaaggaggacatcctgtggtgtaccgagatggagagagtgttcgggttcccagtccactacacagatgtcagcaacatgtctagactggccagacagagactgctgggaagaagctggtccgtccctgtgatcagacacctgttcgcccctctgaaggagtacttcgcctgcgtgagcagcggcaacagcaacgccaacagccggggccccagcttctctagcggcctggtgccactgtccctgagagggagccacatgggccccatggagatctacaaaaccgtgagcgcctggaagcggcagcctgtgcgcgtgctgagcctgtttcggaatatcgataaagtcctgaaaagcctgggattcctggagagcggctctggctccggcggtggcaccctgaagtacgtggaggatgtgacaaacgtggtcagacgggatgtggagaagtggggccccttcgatctggtgtacggcagcacccaacccctgggcagctcttgtgaccggtgccctggctggtacatgtttcagttccaccggatcctgcagtacgccctgccgagacaggagtcccagcggccattcttttggattttcatggacaacttgctgctgaccgaggatgaccaggaaactaccactcggttcctgcagaccgaagccgtgaccctgcaggacgtgagaggccgggactaccagaacgccatgcgggtgtggtccaacatccctggactgaaaagcaagcacgcacctctgacccctaaagaagaggagtacctgcaggcccaggtgcggagcagaagcaagctggacgcccctaaggtggatctgctggtgaagaattgcctcctgcccctgagagagtacttcaagtatttcagccagaatagtctgcccctgggaggcagcggcggcggcaccatgaccaccgtgagcagcaccgccaggccccaggagagcgtggccttcgacgacgtggccgtgtacttcaccaagaaggagtgggccatcatggtgcccgaccagagggccctgtacagggacgtgatgctggagaactacgaggccgtggccttcgtggtgccccccaccagcaagcccgccctgatcagccacctggagcagggcaaggagccctgcttcacccagccccagggcgtgggcggcccaagcagcggcgcccctcctcccagcggcggcagcccagccggctccccaacctctaccgaggagggcacctctgagtccgccacccccgagagcggccctggcacctccaccgagcccagcgagggcagcgcacccggcagccctgccggcagccccacctccacagaggagggaaccagcaccgagcccagcgaaggcagcgccccaggcaccagcaccgagcctagtgagcaggagattaaacggatcaacaagatcagaagaagacttgtgaaagacagcaacaccaagaaggccggcaagacaggccccatgaaaaccctgctggttagagtgatgacacccgatctgagagagcggctggaaaacctgagaaagaagcctgaaaatatcccccagcccatcagcaatacatctagagccaacctgaataagctgctgaccgattacaccgaaatgaagaaggcgatcctgcatgtgtactgggaagagttccagaaggaccctgtgggcctgatgagccgggtggcccagcctgccagcaagaagatcgatcagaacaagctgaaacctgagatggacgagaagggcaacctgaccaccgccggctttgcctgctctcagtgtggccagcccctgttcgtgtacaagctggagcaggtgtctgagaagggcaaggcttacaccaactacttcggacggtgcaatgtggccgagcacgaaaagctgatcctgctggcccagctgaagcccgagaaggatagcgacgaagccgtgacatatagcctgggaaagtttgggcagagggccctggatttctacagcattcatgtgaccaaggagtccacccaccccgtgaagcccctggcccagatcgccggaaacagatacgcctccggacctgtgggaaaggccctgagcgacgcatgtatgggcacaatcgcctccttcctgtctaagtaccaggacatcatcatcgaacaccagaaggtggtgaagggcaaccagaagagactggagagcctgcgggagctggccggcaaggaaaacctggaataccctagcgtgaccctgccacctcagcctcacaccaaggagggcgttgatgcctacaacgaagtgatcgcccgggtgcgaatgtgggtgaacctgaacctgtggcagaagctgaagctaagcagagatgatgccaagcctctgctgagactgaagggattcccttcctttcctctggtcgagagacaggccaacgaagtggactggtgggacatggtgtgtaacgtgaagaagctgatcaacgagaaaaaggaggatggcaaggtgttttggcagaatctggctggctacaagagacaggaagccctgagaccatacctgagcagcgaggaagatcggaagaagggaaagaaattcgctcggtaccagctgggcgacctgctgctgcacctggaaaagaagcacggcgaggactggggaaaggtgtacgacgaggcctgggagcggattgacaagaaagtggaaggcctgagcaagcacatcaagctggaagaggaacggagaagcgaggacgcccagagcaaggccgccctgaccgactggctgcgggctaaggccagcttcgtgatcgagggcctgaaggaggccgacaaggacgagttctgcagatgcgagctgaagctgcagaagtggtacggggacctgcggggaaagcccttcgccatcgaagccgagaacagcatcctggacatcagcggcttcagcaagcagtacaactgtgccttcatctggcagaaggacggcgtgaagaagctgaacctgtacctgatcatcaactacttcaagggcggcaagctgcggttcaagaagatcaaacctgaagccttcgaagccaacagattctacaccgtgatcaacaaaaagagcggcgagatcgtgcccatggaggtgaacttcaacttcgacgaccccaacctgatcatcctgcctctggcctttggcaagagacagggcagagaattcatctggaacgacctgctgtccctggaaaccggcagcctgaagctggccaacggaagagtgatcgagaagacactgtacaacagaagaacccggcaggatgagcctgccctgttcgtggccctgaccttcgagcggcgggaggtcctggactcctccaatatcaaaccaatgaacctgatcggcgtggcaagaggcgaaaacatccccgccgtgatcgccctgaccgaccccgagggctgcccactgagccggtttaaggatagcctgggaaacccaacccacatcctgagaatcggcgagagctataaggagaagcagcggaccatccaggccaagaaggaggtggagcagcggagagccggcggctacagccggaagtacgccagcaaagccaagaatctggcagacgatatggtgagaaacaccgctagagatctgctgtactacgccgtgacccaggatgccatgctgatcttcgccaacctgagccggggcttcggccggcagggcaagcggaccttcatggccgagagacagtacacacggatggaggactggctgaccgccaagctggcctacgagggcctgagcaagacctacctgtccaagacactggcccagtacacctccaagacatgcagcaactgtgggtttaccatcaccagcgccgactacgacagggtgctggagaagctgaagaagacagcaacaggctggatgaccacaattaacggcaaggagctgaaggtggagggccagattacctactacaacagatacaagagacagaacgtagtcaaggacctgtccgtcgagctggatagactgagcgaagaatctgtgaacaacgacatctcctcctggacaaagggcagaagcggagaagctctgagcctcctgaagaaaagattctcccatagacccgtgcaggagaagttcgtgtgcctgaactgcggcttcgagacacacgcagccgagcaagccgccctgaacatcgccagatcctggctgttcctgcggagccaggagtacaagaaataccagacaaacaagacaaccggcaacaccgataagagagccttcgtcgagacctggcagtccttttaccggaagaagcttaaggaggtgtggaaacctgccgtgcggtctggcggatctggcggaggctccaccagccccaagaaaaagagaaaagtctaagctgccttctgcggggcttgccttctggccatgcccttcttctctcccttgcacctgtacctcttggtctttgaataaagcctgagtaggaaggctagcaaaaaaaaaaaaaaaaaaaaaaaaaaaaaaaaaaaaaaaaaaaaaaaaaaaaaaaaaaaaaaaaaaaaaaaaaaaaaaaa

SEQ ID NO: 13634 - RNA, 5785 nt, synthetic construct
  source 1..5785: mol_type = other RNA
aggaaataagagagaaaagaagagtaagaagaaatataagagccaccatggcccctaagaagaagcgtaaagtgagccggatggaacgcctcgtctacgaggtgcggcagaagtgcagaaacatcgaggacatctgcatctcctgcggatctctgaacgtgaccctggagcacccactgttcatcggcggcatgtgccagaactgtaaaaactgttttctggagtgtgcctatcaatacgacgatgacggctaccagagctactgcaccatctgttgcggcggaagagaggtgctgatgtgtggaaataacaactgctgccggtgcttctgcgtggaatgcgtggacctgctggtgggccccggcgccgcccaggccgctattaaggaagatccttggaactgctacatgtgcggccacaagggcacatacggcctgctgagacggagagaggactggcctagcagactgcagatgttcttcgccaataaccacgaccaggagttcgacccccctaaggtgtaccctcccgtccccgccgagaagagaaagcccatccgggtcctgagcctgttcgatggcatcgccaccggtctgctggtgctgaaggacctgggcatccaggtggataggtacattgcctccgaggtgtgcgaggactccatcaccgtgggaatggtgcgtcatcagggcaagatcatgtacgtgggcgacgtgcggagcgtgacacagaagcatatccaggagtggggccctttcgacctggtgatcggcggcagcccttgcaatgacctgagcatcgtgaacccagcccggaagggcctgtacgagggaaccggcagactgttcttcgagttttacagactgctgcacgacgcccggcctaaggaaggcgacgaccggcccttcttttggctgttcgagaatgtggtggccatgggagtcagcgacaagcgggatattagccggttcctggagagcaaccccgtgatgatcgatgccaaggaagtgagcgccgcccaccgggccagatacttctggggcaatctgcctggcatgaacagacccctggccagcaccgtgaacgacaagctggagctgcaggagtgcctggagcacggccggatcgccaagttcagcaaggtgagaaccatcaccacccgaagcaacagcatcaaacaaggcaaggaccagcactttcctgtgttcatgaacgagaaggaggacatcctgtggtgtaccgagatggagagagtgttcgggttcccagtccactacacagatgtcagcaacatgtctagactggccagacagagactgctgggaagaagctggtccgtccctgtgatcagacacctgttcgcccctctgaaggagtacttcgcctgcgtgagcagcggcaacagcaacgccaacagccggggccccagcttctctagcggcctggtgccactgtccctgagagggagccacatgggccccatggagatctacaaaaccgtgagcgcctggaagcggcagcctgtgcgcgtgctgagcctgtttcggaatatcgataaagtcctgaaaagcctgggattcctggagagcggctctggctccggcggtggcaccctgaagtacgtggaggatgtgacaaacgtggtcagacgggatgtggagaagtggggccccttcgatctggtgtacggcagcacccaacccctgggcagctcttgtgaccggtgccctggctggtacatgtttcagttccaccggatcctgcagtacgccctgccgagacaggagtcccagcggccattcttttggattttcatggacaacttgctgctgaccgaggatgaccaggaaactaccactcggttcctgcagaccgaagccgtgaccctgcaggacgtgagaggccgggactaccagaacgccatgcgggtgtggtccaacatccctggactgaaaagcaagcacgcacctctgacccctaaagaagaggagtacctgcaggcccaggtgcggagcagaagcaagctggacgcccctaaggtggatctgctggtgaagaattgcctcctgcccctgagagagtacttcaagtatttcagccagaatagtctgcccctgggaggcagcggcggcggcatgagccaggtgaccttcagcgacgtggccatcgacttcagccacgaggagtgggcctgcctggacagcgcccagagggacctgtacaaggacgtgatggtgcagaactacgagaacctggtgagcgtgggcctgagcgtgaccaagccctacgtgatcatgctgctggaggacggcaaggagccctggatgatggagaagaagctgagcaaggactgggagagcaggtgggagaacaaggagggcggcccaagcagcggcgcccctcctcccagcggcggcagcccagccggctccccaacctctaccgaggagggcacctctgagtccgccacccccgagagcggccctggcacctccaccgagcccagcgagggcagcgcacccggcagccctgccggcagccccacctccacagaggagggaaccagcaccgagcccagcgaaggcagcgccccaggcaccagcaccgagcctagtgagcaggagattaaacggatcaacaagatcagaagaagacttgtgaaagacagcaacaccaagaaggccggcaagacaggccccatgaaaaccctgctggttagagtgatgacacccgatctgagagagcggctggaaaacctgagaaagaagcctgaaaatatcccccagcccatcagcaatacatctagagccaacctgaataagctgctgaccgattacaccgaaatgaagaaggcgatcctgcatgtgtactgggaagagttccagaaggaccctgtgggcctgatgagccgggtggcccagcctgccagcaagaagatcgatcagaacaagctgaaacctgagatggacgagaagggcaacctgaccaccgccggctttgcctgctctcagtgtggccagcccctgttcgtgtacaagctggagcaggtgtctgagaagggcaaggcttacaccaactacttcggacggtgcaatgtggccgagcacgaaaagctgatcctgctggcccagctgaagcccgagaaggatagcgacgaagccgtgacatatagcctgggaaagtttgggcagagggccctggatttctacagcattcatgtgaccaaggagtccacccaccccgtgaagcccctggcccagatcgccggaaacagatacgcctccggacctgtgggaaaggccctgagcgacgcatgtatgggcacaatcgcctccttcctgtctaagtaccaggacatcatcatcgaacaccagaaggtggtgaagggcaaccagaagagactggagagcctgcgggagctggccggcaaggaaaacctggaataccctagcgtgaccctgccacctcagcctcacaccaaggagggcgttgatgcctacaacgaagtgatcgcccgggtgcgaatgtgggtgaacctgaacctgtggcagaagctgaagctaagcagagatgatgccaagcctctgctgagactgaagggattcccttcctttcctctggtcgagagacaggccaacgaagtggactggtgggacatggtgtgtaacgtgaagaagctgatcaacgagaaaaaggaggatggcaaggtgttttggcagaatctggctggctacaagagacaggaagccctgagaccatacctgagcagcgaggaagatcggaagaagggaaagaaattcgctcggtaccagctgggcgacctgctgctgcacctggaaaagaagcacggcgaggactggggaaaggtgtacgacgaggcctgggagcggattgacaagaaagtggaaggcctgagcaagcacatcaagctggaagaggaacggagaagcgaggacgcccagagcaaggccgccctgaccgactggctgcgggctaaggccagcttcgtgatcgagggcctgaaggaggccgacaaggacgagttctgcagatgcgagctgaagctgcagaagtggtacggggacctgcggggaaagcccttcgccatcgaagccgagaacagcatcctggacatcagcggcttcagcaagcagtacaactgtgccttcatctggcagaaggacggcgtgaagaagctgaacctgtacctgatcatcaactacttcaagggcggcaagctgcggttcaagaagatcaaacctgaagccttcgaagccaacagattctacaccgtgatcaacaaaaagagcggcgagatcgtgcccatggaggtgaacttcaacttcgacgaccccaacctgatcatcctgcctctggcctttggcaagagacagggcagagaattcatctggaacgacctgctgtccctggaaaccggcagcctgaagctggccaacggaagagtgatcgagaagacactgtacaacagaagaacccggcaggatgagcctgccctgttcgtggccctgaccttcgagcggcgggaggtcctggactcctccaatatcaaaccaatgaacctgatcggcgtggcaagaggcgaaaacatccccgccgtgatcgccctgaccgaccccgagggctgcccactgagccggtttaaggatagcctgggaaacccaacccacatcctgagaatcggcgagagctataaggagaagcagcggaccatccaggccaagaaggaggtggagcagcggagagccggcggctacagccggaagtacgccagcaaagccaagaatctggcagacgatatggtgagaaacaccgctagagatctgctgtactacgccgtgacccaggatgccatgctgatcttcgccaacctgagccggggcttcggccggcagggcaagcggaccttcatggccgagagacagtacacacggatggaggactggctgaccgccaagctggcctacgagggcctgagcaagacctacctgtccaagacactggcccagtacacctccaagacatgcagcaactgtgggtttaccatcaccagcgccgactacgacagggtgctggagaagctgaagaagacagcaacaggctggatgaccacaattaacggcaaggagctgaaggtggagggccagattacctactacaacagatacaagagacagaacgtagtcaaggacctgtccgtcgagctggatagactgagcgaagaatctgtgaacaacgacatctcctcctggacaaagggcagaagcggagaagctctgagcctcctgaagaaaagattctcccatagacccgtgcaggagaagttcgtgtgcctgaactgcggcttcgagacacacgcagccgagcaagccgccctgaacatcgccagatcctggctgttcctgcggagccaggagtacaagaaataccagacaaacaagacaaccggcaacaccgataagagagccttcgtcgagacctggcagtccttttaccggaagaagcttaaggaggtgtggaaacctgccgtgcggtctggcggatctggcggaggctccaccagccccaagaaaaagagaaaagtctaagctgccttctgcggggcttgccttctggccatgcccttcttctctcccttgcacctgtacctcttggtctttgaataaagcctgagtaggaaggctagcaaaaaaaaaaaaaaaaaaaaaaaaaaaaaaaaaaaaaaaaaaaaaaaaaaaaaaaaaaaaaaaaaaaaaaaaaaaaaaaa

SEQ ID NO: 13635 - RNA, 5785 nt, synthetic construct
  source 1..5785: mol_type = other RNA
aggaaataagagagaaaagaagagtaagaagaaatataagagccaccatggcccctaagaagaagcgtaaagtgagccggatggaacgcctcgtctacgaggtgcggcagaagtgcagaaacatcgaggacatctgcatctcctgcggatctctgaacgtgaccctggagcacccactgttcatcggcggcatgtgccagaactgtaaaaactgttttctggagtgtgcctatcaatacgacgatgacggctaccagagctactgcaccatctgttgcggcggaagagaggtgctgatgtgtggaaataacaactgctgccggtgcttctgcgtggaatgcgtggacctgctggtgggccccggcgccgcccaggccgctattaaggaagatccttggaactgctacatgtgcggccacaagggcacatacggcctgctgagacggagagaggactggcctagcagactgcagatgttcttcgccaataaccacgaccaggagttcgacccccctaaggtgtaccctcccgtccccgccgagaagagaaagcccatccgggtcctgagcctgttcgatggcatcgccaccggtctgctggtgctgaaggacctgggcatccaggtggataggtacattgcctccgaggtgtgcgaggactccatcaccgtgggaatggtgcgtcatcagggcaagatcatgtacgtgggcgacgtgcggagcgtgacacagaagcatatccaggagtggggccctttcgacctggtgatcggcggcagcccttgcaatgacctgagcatcgtgaacccagcccggaagggcctgtacgagggaaccggcagactgttcttcgagttttacagactgctgcacgacgcccggcctaaggaaggcgacgaccggcccttcttttggctgttcgagaatgtggtggccatgggagtcagcgacaagcgggatattagccggttcctggagagcaaccccgtgatgatcgatgccaaggaagtgagcgccgcccaccgggccagatacttctggggcaatctgcctggcatgaacagacccctggccagcaccgtgaacgacaagctggagctgcaggagtgcctggagcacggccggatcgccaagttcagcaaggtgagaaccatcaccacccgaagcaacagcatcaaacaaggcaaggaccagcactttcctgtgttcatgaacgagaaggaggacatcctgtggtgtaccgagatggagagagtgttcgggttcccagtccactacacagatgtcagcaacatgtctagactggccagacagagactgctgggaagaagctggtccgtccctgtgatcagacacctgttcgcccctctgaaggagtacttcgcctgcgtgagcagcggcaacagcaacgccaacagccggggccccagcttctctagcggcctggtgccactgtccctgagagggagccacatgggccccatggagatctacaaaaccgtgagcgcctggaagcggcagcctgtgcgcgtgctgagcctgtttcggaatatcgataaagtcctgaaaagcctgggattcctggagagcggctctggctccggcggtggcaccctgaagtacgtggaggatgtgacaaacgtggtcagacgggatgtggagaagtggggccccttcgatctggtgtacggcagcacccaacccctgggcagctcttgtgaccggtgccctggctggtacatgtttcagttccaccggatcctgcagtacgccctgccgagacaggagtcccagcggccattcttttggattttcatggacaacttgctgctgaccgaggatgaccaggaaactaccactcggttcctgcagaccgaagccgtgaccctgcaggacgtgagaggccgggactaccagaacgccatgcgggtgtggtccaacatccctggactgaaaagcaagcacgcacctctgacccctaaagaagaggagtacctgcaggcccaggtgcggagcagaagcaagctggacgcccctaaggtggatctgctggtgaagaattgcctcctgcccctgagagagtacttcaagtatttcagccagaatagtctgcccctgggaggcagcggcggcggcgcccagatgagggtgaccttcgaggacatcgccgtgagcttcagccccgaggagtgggagtacctggaccagggccagaaggagctgtacagggaggtgatgaaggagaactacgagatcctgatcagcctgggctgccccaacctgacccccgagatcatcagcaggatcgagaggggcgaggagccctacatcaggggcgagcccggcagcgaggagagggagaccggcaagagcagctgcggcggcccaagcagcggcgcccctcctcccagcggcggcagcccagccggctccccaacctctaccgaggagggcacctctgagtccgccacccccgagagcggccctggcacctccaccgagcccagcgagggcagcgcacccggcagccctgccggcagccccacctccacagaggagggaaccagcaccgagcccagcgaaggcagcgccccaggcaccagcaccgagcctagtgagcaggagattaaacggatcaacaagatcagaagaagacttgtgaaagacagcaacaccaagaaggccggcaagacaggccccatgaaaaccctgctggttagagtgatgacacccgatctgagagagcggctggaaaacctgagaaagaagcctgaaaatatcccccagcccatcagcaatacatctagagccaacctgaataagctgctgaccgattacaccgaaatgaagaaggcgatcctgcatgtgtactgggaagagttccagaaggaccctgtgggcctgatgagccgggtggcccagcctgccagcaagaagatcgatcagaacaagctgaaacctgagatggacgagaagggcaacctgaccaccgccggctttgcctgctctcagtgtggccagcccctgttcgtgtacaagctggagcaggtgtctgagaagggcaaggcttacaccaactacttcggacggtgcaatgtggccgagcacgaaaagctgatcctgctggcccagctgaagcccgagaaggatagcgacgaagccgtgacatatagcctgggaaagtttgggcagagggccctggatttctacagcattcatgtgaccaaggagtccacccaccccgtgaagcccctggcccagatcgccggaaacagatacgcctccggacctgtgggaaaggccctgagcgacgcatgtatgggcacaatcgcctccttcctgtctaagtaccaggacatcatcatcgaacaccagaaggtggtgaagggcaaccagaagagactggagagcctgcgggagctggccggcaaggaaaacctggaataccctagcgtgaccctgccacctcagcctcacaccaaggagggcgttgatgcctacaacgaagtgatcgcccgggtgcgaatgtgggtgaacctgaacctgtggcagaagctgaagctaagcagagatgatgccaagcctctgctgagactgaagggattcccttcctttcctctggtcgagagacaggccaacgaagtggactggtgggacatggtgtgtaacgtgaagaagctgatcaacgagaaaaaggaggatggcaaggtgttttggcagaatctggctggctacaagagacaggaagccctgagaccatacctgagcagcgaggaagatcggaagaagggaaagaaattcgctcggtaccagctgggcgacctgctgctgcacctggaaaagaagcacggcgaggactggggaaaggtgtacgacgaggcctgggagcggattgacaagaaagtggaaggcctgagcaagcacatcaagctggaagaggaacggagaagcgaggacgcccagagcaaggccgccctgaccgactggctgcgggctaaggccagcttcgtgatcgagggcctgaaggaggccgacaaggacgagttctgcagatgcgagctgaagctgcagaagtggtacggggacctgcggggaaagcccttcgccatcgaagccgagaacagcatcctggacatcagcggcttcagcaagcagtacaactgtgccttcatctggcagaaggacggcgtgaagaagctgaacctgtacctgatcatcaactacttcaagggcggcaagctgcggttcaagaagatcaaacctgaagccttcgaagccaacagattctacaccgtgatcaacaaaaagagcggcgagatcgtgcccatggaggtgaacttcaacttcgacgaccccaacctgatcatcctgcctctggcctttggcaagagacagggcagagaattcatctggaacgacctgctgtccctggaaaccggcagcctgaagctggccaacggaagagtgatcgagaagacactgtacaacagaagaacccggcaggatgagcctgccctgttcgtggccctgaccttcgagcggcgggaggtcctggactcctccaatatcaaaccaatgaacctgatcggcgtggcaagaggcgaaaacatccccgccgtgatcgccctgaccgaccccgagggctgcccactgagccggtttaaggatagcctgggaaacccaacccacatcctgagaatcggcgagagctataaggagaagcagcggaccatccaggccaagaaggaggtggagcagcggagagccggcggctacagccggaagtacgccagcaaagccaagaatctggcagacgatatggtgagaaacaccgctagagatctgctgtactacgccgtgacccaggatgccatgctgatcttcgccaacctgagccggggcttcggccggcagggcaagcggaccttcatggccgagagacagtacacacggatggaggactggctgaccgccaagctggcctacgagggcctgagcaagacctacctgtccaagacactggcccagtacacctccaagacatgcagcaactgtgggtttaccatcaccagcgccgactacgacagggtgctggagaagctgaagaagacagcaacaggctggatgaccacaattaacggcaaggagctgaaggtggagggccagattacctactacaacagatacaagagacagaacgtagtcaaggacctgtccgtcgagctggatagactgagcgaagaatctgtgaacaacgacatctcctcctggacaaagggcagaagcggagaagctctgagcctcctgaagaaaagattctcccatagacccgtgcaggagaagttcgtgtgcctgaactgcggcttcgagacacacgcagccgagcaagccgccctgaacatcgccagatcctggctgttcctgcggagccaggagtacaagaaataccagacaaacaagacaaccggcaacaccgataagagagccttcgtcgagacctggcagtccttttaccggaagaagcttaaggaggtgtggaaacctgccgtgcggtctggcggatctggcggaggctccaccagccccaagaaaaagagaaaagtctaagctgccttctgcggggcttgccttctggccatgcccttcttctctcccttgcacctgtacctcttggtctttgaataaagcctgagtaggaaggctagcaaaaaaaaaaaaaaaaaaaaaaaaaaaaaaaaaaaaaaaaaaaaaaaaaaaaaaaaaaaaaaaaaaaaaaaaaaaaaaaa

SEQ ID NO: 13636 - RNA, 5785 nt, synthetic construct
  source 1..5785: mol_type = other RNA
aggaaataagagagaaaagaagagtaagaagaaatataagagccaccatggcccctaagaagaagcgtaaagtgagccggatggaacgcctcgtctacgaggtgcggcagaagtgcagaaacatcgaggacatctgcatctcctgcggatctctgaacgtgaccctggagcacccactgttcatcggcggcatgtgccagaactgtaaaaactgttttctggagtgtgcctatcaatacgacgatgacggctaccagagctactgcaccatctgttgcggcggaagagaggtgctgatgtgtggaaataacaactgctgccggtgcttctgcgtggaatgcgtggacctgctggtgggccccggcgccgcccaggccgctattaaggaagatccttggaactgctacatgtgcggccacaagggcacatacggcctgctgagacggagagaggactggcctagcagactgcagatgttcttcgccaataaccacgaccaggagttcgacccccctaaggtgtaccctcccgtccccgccgagaagagaaagcccatccgggtcctgagcctgttcgatggcatcgccaccggtctgctggtgctgaaggacctgggcatccaggtggataggtacattgcctccgaggtgtgcgaggactccatcaccgtgggaatggtgcgtcatcagggcaagatcatgtacgtgggcgacgtgcggagcgtgacacagaagcatatccaggagtggggccctttcgacctggtgatcggcggcagcccttgcaatgacctgagcatcgtgaacccagcccggaagggcctgtacgagggaaccggcagactgttcttcgagttttacagactgctgcacgacgcccggcctaaggaaggcgacgaccggcccttcttttggctgttcgagaatgtggtggccatgggagtcagcgacaagcgggatattagccggttcctggagagcaaccccgtgatgatcgatgccaaggaagtgagcgccgcccaccgggccagatacttctggggcaatctgcctggcatgaacagacccctggccagcaccgtgaacgacaagctggagctgcaggagtgcctggagcacggccggatcgccaagttcagcaaggtgagaaccatcaccacccgaagcaacagcatcaaacaaggcaaggaccagcactttcctgtgttcatgaacgagaaggaggacatcctgtggtgtaccgagatggagagagtgttcgggttcccagtccactacacagatgtcagcaacatgtctagactggccagacagagactgctgggaagaagctggtccgtccctgtgatcagacacctgttcgcccctctgaaggagtacttcgcctgcgtgagcagcggcaacagcaacgccaacagccggggccccagcttctctagcggcctggtgccactgtccctgagagggagccacatgggccccatggagatctacaaaaccgtgagcgcctggaagcggcagcctgtgcgcgtgctgagcctgtttcggaatatcgataaagtcctgaaaagcctgggattcctggagagcggctctggctccggcggtggcaccctgaagtacgtggaggatgtgacaaacgtggtcagacgggatgtggagaagtggggccccttcgatctggtgtacggcagcacccaacccctgggcagctcttgtgaccggtgccctggctggtacatgtttcagttccaccggatcctgcagtacgccctgccgagacaggagtcccagcggccattcttttggattttcatggacaacttgctgctgaccgaggatgaccaggaaactaccactcggttcctgcagaccgaagccgtgaccctgcaggacgtgagaggccgggactaccagaacgccatgcgggtgtggtccaacatccctggactgaaaagcaagcacgcacctctgacccctaaagaagaggagtacctgcaggcccaggtgcggagcagaagcaagctggacgcccctaaggtggatctgctggtgaagaattgcctcctgcccctgagagagtacttcaagtatttcagccagaatagtctgcccctgggaggcagcggcggcggcatggacagcgtggccttcgaggacgtggccgtgaccttcacccaggaggagtgggccctgctggaccccagccagaagaccctgtacagggacgtgatgcaggagaccttcaggaacctggccagcgtgggcaagaagtggaaggcccagaacatgtacgtggagtacgagaacctgaagaggaacctgaggaccttcgtgggcgagaggctgttcgagagcaaggagggccaccagcacggcggcggcccaagcagcggcgcccctcctcccagcggcggcagcccagccggctccccaacctctaccgaggagggcacctctgagtccgccacccccgagagcggccctggcacctccaccgagcccagcgagggcagcgcacccggcagccctgccggcagccccacctccacagaggagggaaccagcaccgagcccagcgaaggcagcgccccaggcaccagcaccgagcctagtgagcaggagattaaacggatcaacaagatcagaagaagacttgtgaaagacagcaacaccaagaaggccggcaagacaggccccatgaaaaccctgctggttagagtgatgacacccgatctgagagagcggctggaaaacctgagaaagaagcctgaaaatatcccccagcccatcagcaatacatctagagccaacctgaataagctgctgaccgattacaccgaaatgaagaaggcgatcctgcatgtgtactgggaagagttccagaaggaccctgtgggcctgatgagccgggtggcccagcctgccagcaagaagatcgatcagaacaagctgaaacctgagatggacgagaagggcaacctgaccaccgccggctttgcctgctctcagtgtggccagcccctgttcgtgtacaagctggagcaggtgtctgagaagggcaaggcttacaccaactacttcggacggtgcaatgtggccgagcacgaaaagctgatcctgctggcccagctgaagcccgagaaggatagcgacgaagccgtgacatatagcctgggaaagtttgggcagagggccctggatttctacagcattcatgtgaccaaggagtccacccaccccgtgaagcccctggcccagatcgccggaaacagatacgcctccggacctgtgggaaaggccctgagcgacgcatgtatgggcacaatcgcctccttcctgtctaagtaccaggacatcatcatcgaacaccagaaggtggtgaagggcaaccagaagagactggagagcctgcgggagctggccggcaaggaaaacctggaataccctagcgtgaccctgccacctcagcctcacaccaaggagggcgttgatgcctacaacgaagtgatcgcccgggtgcgaatgtgggtgaacctgaacctgtggcagaagctgaagctaagcagagatgatgccaagcctctgctgagactgaagggattcccttcctttcctctggtcgagagacaggccaacgaagtggactggtgggacatggtgtgtaacgtgaagaagctgatcaacgagaaaaaggaggatggcaaggtgttttggcagaatctggctggctacaagagacaggaagccctgagaccatacctgagcagcgaggaagatcggaagaagggaaagaaattcgctcggtaccagctgggcgacctgctgctgcacctggaaaagaagcacggcgaggactggggaaaggtgtacgacgaggcctgggagcggattgacaagaaagtggaaggcctgagcaagcacatcaagctggaagaggaacggagaagcgaggacgcccagagcaaggccgccctgaccgactggctgcgggctaaggccagcttcgtgatcgagggcctgaaggaggccgacaaggacgagttctgcagatgcgagctgaagctgcagaagtggtacggggacctgcggggaaagcccttcgccatcgaagccgagaacagcatcctggacatcagcggcttcagcaagcagtacaactgtgccttcatctggcagaaggacggcgtgaagaagctgaacctgtacctgatcatcaactacttcaagggcggcaagctgcggttcaagaagatcaaacctgaagccttcgaagccaacagattctacaccgtgatcaacaaaaagagcggcgagatcgtgcccatggaggtgaacttcaacttcgacgaccccaacctgatcatcctgcctctggcctttggcaagagacagggcagagaattcatctggaacgacctgctgtccctggaaaccggcagcctgaagctggccaacggaagagtgatcgagaagacactgtacaacagaagaacccggcaggatgagcctgccctgttcgtggccctgaccttcgagcggcgggaggtcctggactcctccaatatcaaaccaatgaacctgatcggcgtggcaagaggcgaaaacatccccgccgtgatcgccctgaccgaccccgagggctgcccactgagccggtttaaggatagcctgggaaacccaacccacatcctgagaatcggcgagagctataaggagaagcagcggaccatccaggccaagaaggaggtggagcagcggagagccggcggctacagccggaagtacgccagcaaagccaagaatctggcagacgatatggtgagaaacaccgctagagatctgctgtactacgccgtgacccaggatgccatgctgatcttcgccaacctgagccggggcttcggccggcagggcaagcggaccttcatggccgagagacagtacacacggatggaggactggctgaccgccaagctggcctacgagggcctgagcaagacctacctgtccaagacactggcccagtacacctccaagacatgcagcaactgtgggtttaccatcaccagcgccgactacgacagggtgctggagaagctgaagaagacagcaacaggctggatgaccacaattaacggcaaggagctgaaggtggagggccagattacctactacaacagatacaagagacagaacgtagtcaaggacctgtccgtcgagctggatagactgagcgaagaatctgtgaacaacgacatctcctcctggacaaagggcagaagcggagaagctctgagcctcctgaagaaaagattctcccatagacccgtgcaggagaagttcgtgtgcctgaactgcggcttcgagacacacgcagccgagcaagccgccctgaacatcgccagatcctggctgttcctgcggagccaggagtacaagaaataccagacaaacaagacaaccggcaacaccgataagagagccttcgtcgagacctggcagtccttttaccggaagaagcttaaggaggtgtggaaacctgccgtgcggtctggcggatctggcggaggctccaccagccccaagaaaaagagaaaagtctaagctgccttctgcggggcttgccttctggccatgcccttcttctctcccttgcacctgtacctcttggtctttgaataaagcctgagtaggaaggctagcaaaaaaaaaaaaaaaaaaaaaaaaaaaaaaaaaaaaaaaaaaaaaaaaaaaaaaaaaaaaaaaaaaaaaaaaaaaaaaaa

SEQ ID NO: 13637 - RNA, 5785 nt, synthetic construct
  source 1..5785: mol_type = other RNA
aggaaataagagagaaaagaagagtaagaagaaatataagagccaccatggcccctaagaagaagcgtaaagtgagccggatggaacgcctcgtctacgaggtgcggcagaagtgcagaaacatcgaggacatctgcatctcctgcggatctctgaacgtgaccctggagcacccactgttcatcggcggcatgtgccagaactgtaaaaactgttttctggagtgtgcctatcaatacgacgatgacggctaccagagctactgcaccatctgttgcggcggaagagaggtgctgatgtgtggaaataacaactgctgccggtgcttctgcgtggaatgcgtggacctgctggtgggccccggcgccgcccaggccgctattaaggaagatccttggaactgctacatgtgcggccacaagggcacatacggcctgctgagacggagagaggactggcctagcagactgcagatgttcttcgccaataaccacgaccaggagttcgacccccctaaggtgtaccctcccgtccccgccgagaagagaaagcccatccgggtcctgagcctgttcgatggcatcgccaccggtctgctggtgctgaaggacctgggcatccaggtggataggtacattgcctccgaggtgtgcgaggactccatcaccgtgggaatggtgcgtcatcagggcaagatcatgtacgtgggcgacgtgcggagcgtgacacagaagcatatccaggagtggggccctttcgacctggtgatcggcggcagcccttgcaatgacctgagcatcgtgaacccagcccggaagggcctgtacgagggaaccggcagactgttcttcgagttttacagactgctgcacgacgcccggcctaaggaaggcgacgaccggcccttcttttggctgttcgagaatgtggtggccatgggagtcagcgacaagcgggatattagccggttcctggagagcaaccccgtgatgatcgatgccaaggaagtgagcgccgcccaccgggccagatacttctggggcaatctgcctggcatgaacagacccctggccagcaccgtgaacgacaagctggagctgcaggagtgcctggagcacggccggatcgccaagttcagcaaggtgagaaccatcaccacccgaagcaacagcatcaaacaaggcaaggaccagcactttcctgtgttcatgaacgagaaggaggacatcctgtggtgtaccgagatggagagagtgttcgggttcccagtccactacacagatgtcagcaacatgtctagactggccagacagagactgctgggaagaagctggtccgtccctgtgatcagacacctgttcgcccctctgaaggagtacttcgcctgcgtgagcagcggcaacagcaacgccaacagccggggccccagcttctctagcggcctggtgccactgtccctgagagggagccacatgggccccatggagatctacaaaaccgtgagcgcctggaagcggcagcctgtgcgcgtgctgagcctgtttcggaatatcgataaagtcctgaaaagcctgggattcctggagagcggctctggctccggcggtggcaccctgaagtacgtggaggatgtgacaaacgtggtcagacgggatgtggagaagtggggccccttcgatctggtgtacggcagcacccaacccctgggcagctcttgtgaccggtgccctggctggtacatgtttcagttccaccggatcctgcagtacgccctgccgagacaggagtcccagcggccattcttttggattttcatggacaacttgctgctgaccgaggatgaccaggaaactaccactcggttcctgcagaccgaagccgtgaccctgcaggacgtgagaggccgggactaccagaacgccatgcgggtgtggtccaacatccctggactgaaaagcaagcacgcacctctgacccctaaagaagaggagtacctgcaggcccaggtgcggagcagaagcaagctggacgcccctaaggtggatctgctggtgaagaattgcctcctgcccctgagagagtacttcaagtatttcagccagaatagtctgcccctgggaggcagcggcggcggcttccagatgcccgtgaccttcgaggaggtggccgtgtacttcacccagggccagggcgccctgctggaccccgcccagagggccctgtacagggacgtgatgcaggagaactacaagatggtgaccagcctgggcttccccctgcccaagcccgagctgatcagcaggctggagcagggcgaggagccctgggtgcccgacctgcaggcctgcgaggagagggagagcctgagcggcaaccacggcggcccaagcagcggcgcccctcctcccagcggcggcagcccagccggctccccaacctctaccgaggagggcacctctgagtccgccacccccgagagcggccctggcacctccaccgagcccagcgagggcagcgcacccggcagccctgccggcagccccacctccacagaggagggaaccagcaccgagcccagcgaaggcagcgccccaggcaccagcaccgagcctagtgagcaggagattaaacggatcaacaagatcagaagaagacttgtgaaagacagcaacaccaagaaggccggcaagacaggccccatgaaaaccctgctggttagagtgatgacacccgatctgagagagcggctggaaaacctgagaaagaagcctgaaaatatcccccagcccatcagcaatacatctagagccaacctgaataagctgctgaccgattacaccgaaatgaagaaggcgatcctgcatgtgtactgggaagagttccagaaggaccctgtgggcctgatgagccgggtggcccagcctgccagcaagaagatcgatcagaacaagctgaaacctgagatggacgagaagggcaacctgaccaccgccggctttgcctgctctcagtgtggccagcccctgttcgtgtacaagctggagcaggtgtctgagaagggcaaggcttacaccaactacttcggacggtgcaatgtggccgagcacgaaaagctgatcctgctggcccagctgaagcccgagaaggatagcgacgaagccgtgacatatagcctgggaaagtttgggcagagggccctggatttctacagcattcatgtgaccaaggagtccacccaccccgtgaagcccctggcccagatcgccggaaacagatacgcctccggacctgtgggaaaggccctgagcgacgcatgtatgggcacaatcgcctccttcctgtctaagtaccaggacatcatcatcgaacaccagaaggtggtgaagggcaaccagaagagactggagagcctgcgggagctggccggcaaggaaaacctggaataccctagcgtgaccctgccacctcagcctcacaccaaggagggcgttgatgcctacaacgaagtgatcgcccgggtgcgaatgtgggtgaacctgaacctgtggcagaagctgaagctaagcagagatgatgccaagcctctgctgagactgaagggattcccttcctttcctctggtcgagagacaggccaacgaagtggactggtgggacatggtgtgtaacgtgaagaagctgatcaacgagaaaaaggaggatggcaaggtgttttggcagaatctggctggctacaagagacaggaagccctgagaccatacctgagcagcgaggaagatcggaagaagggaaagaaattcgctcggtaccagctgggcgacctgctgctgcacctggaaaagaagcacggcgaggactggggaaaggtgtacgacgaggcctgggagcggattgacaagaaagtggaaggcctgagcaagcacatcaagctggaagaggaacggagaagcgaggacgcccagagcaaggccgccctgaccgactggctgcgggctaaggccagcttcgtgatcgagggcctgaaggaggccgacaaggacgagttctgcagatgcgagctgaagctgcagaagtggtacggggacctgcggggaaagcccttcgccatcgaagccgagaacagcatcctggacatcagcggcttcagcaagcagtacaactgtgccttcatctggcagaaggacggcgtgaagaagctgaacctgtacctgatcatcaactacttcaagggcggcaagctgcggttcaagaagatcaaacctgaagccttcgaagccaacagattctacaccgtgatcaacaaaaagagcggcgagatcgtgcccatggaggtgaacttcaacttcgacgaccccaacctgatcatcctgcctctggcctttggcaagagacagggcagagaattcatctggaacgacctgctgtccctggaaaccggcagcctgaagctggccaacggaagagtgatcgagaagacactgtacaacagaagaacccggcaggatgagcctgccctgttcgtggccctgaccttcgagcggcgggaggtcctggactcctccaatatcaaaccaatgaacctgatcggcgtggcaagaggcgaaaacatccccgccgtgatcgccctgaccgaccccgagggctgcccactgagccggtttaaggatagcctgggaaacccaacccacatcctgagaatcggcgagagctataaggagaagcagcggaccatccaggccaagaaggaggtggagcagcggagagccggcggctacagccggaagtacgccagcaaagccaagaatctggcagacgatatggtgagaaacaccgctagagatctgctgtactacgccgtgacccaggatgccatgctgatcttcgccaacctgagccggggcttcggccggcagggcaagcggaccttcatggccgagagacagtacacacggatggaggactggctgaccgccaagctggcctacgagggcctgagcaagacctacctgtccaagacactggcccagtacacctccaagacatgcagcaactgtgggtttaccatcaccagcgccgactacgacagggtgctggagaagctgaagaagacagcaacaggctggatgaccacaattaacggcaaggagctgaaggtggagggccagattacctactacaacagatacaagagacagaacgtagtcaaggacctgtccgtcgagctggatagactgagcgaagaatctgtgaacaacgacatctcctcctggacaaagggcagaagcggagaagctctgagcctcctgaagaaaagattctcccatagacccgtgcaggagaagttcgtgtgcctgaactgcggcttcgagacacacgcagccgagcaagccgccctgaacatcgccagatcctggctgttcctgcggagccaggagtacaagaaataccagacaaacaagacaaccggcaacaccgataagagagccttcgtcgagacctggcagtccttttaccggaagaagcttaaggaggtgtggaaacctgccgtgcggtctggcggatctggcggaggctccaccagccccaagaaaaagagaaaagtctaagctgccttctgcggggcttgccttctggccatgcccttcttctctcccttgcacctgtacctcttggtctttgaataaagcctgagtaggaaggctagcaaaaaaaaaaaaaaaaaaaaaaaaaaaaaaaaaaaaaaaaaaaaaaaaaaaaaaaaaaaaaaaaaaaaaaaaaaaaaaaa

SEQ ID NO: 13638 - RNA, 5785 nt, synthetic construct
  source 1..5785: mol_type = other RNA
aggaaataagagagaaaagaagagtaagaagaaatataagagccaccatggcccctaagaagaagcgtaaagtgagccggatggaacgcctcgtctacgaggtgcggcagaagtgcagaaacatcgaggacatctgcatctcctgcggatctctgaacgtgaccctggagcacccactgttcatcggcggcatgtgccagaactgtaaaaactgttttctggagtgtgcctatcaatacgacgatgacggctaccagagctactgcaccatctgttgcggcggaagagaggtgctgatgtgtggaaataacaactgctgccggtgcttctgcgtggaatgcgtggacctgctggtgggccccggcgccgcccaggccgctattaaggaagatccttggaactgctacatgtgcggccacaagggcacatacggcctgctgagacggagagaggactggcctagcagactgcagatgttcttcgccaataaccacgaccaggagttcgacccccctaaggtgtaccctcccgtccccgccgagaagagaaagcccatccgggtcctgagcctgttcgatggcatcgccaccggtctgctggtgctgaaggacctgggcatccaggtggataggtacattgcctccgaggtgtgcgaggactccatcaccgtgggaatggtgcgtcatcagggcaagatcatgtacgtgggcgacgtgcggagcgtgacacagaagcatatccaggagtggggccctttcgacctggtgatcggcggcagcccttgcaatgacctgagcatcgtgaacccagcccggaagggcctgtacgagggaaccggcagactgttcttcgagttttacagactgctgcacgacgcccggcctaaggaaggcgacgaccggcccttcttttggctgttcgagaatgtggtggccatgggagtcagcgacaagcgggatattagccggttcctggagagcaaccccgtgatgatcgatgccaaggaagtgagcgccgcccaccgggccagatacttctggggcaatctgcctggcatgaacagacccctggccagcaccgtgaacgacaagctggagctgcaggagtgcctggagcacggccggatcgccaagttcagcaaggtgagaaccatcaccacccgaagcaacagcatcaaacaaggcaaggaccagcactttcctgtgttcatgaacgagaaggaggacatcctgtggtgtaccgagatggagagagtgttcgggttcccagtccactacacagatgtcagcaacatgtctagactggccagacagagactgctgggaagaagctggtccgtccctgtgatcagacacctgttcgcccctctgaaggagtacttcgcctgcgtgagcagcggcaacagcaacgccaacagccggggccccagcttctctagcggcctggtgccactgtccctgagagggagccacatgggccccatggagatctacaaaaccgtgagcgcctggaagcggcagcctgtgcgcgtgctgagcctgtttcggaatatcgataaagtcctgaaaagcctgggattcctggagagcggctctggctccggcggtggcaccctgaagtacgtggaggatgtgacaaacgtggtcagacgggatgtggagaagtggggccccttcgatctggtgtacggcagcacccaacccctgggcagctcttgtgaccggtgccctggctggtacatgtttcagttccaccggatcctgcagtacgccctgccgagacaggagtcccagcggccattcttttggattttcatggacaacttgctgctgaccgaggatgaccaggaaactaccactcggttcctgcagaccgaagccgtgaccctgcaggacgtgagaggccgggactaccagaacgccatgcgggtgtggtccaacatccctggactgaaaagcaagcacgcacctctgacccctaaagaagaggagtacctgcaggcccaggtgcggagcagaagcaagctggacgcccctaaggtggatctgctggtgaagaattgcctcctgcccctgagagagtacttcaagtatttcagccagaatagtctgcccctgggaggcagcggcggcggcatggccaccgccctgaccgaccccgcccaggtgagcgtgaccttcgacgacgtggccgtgaccttcacccaggaggagtggggccagctggacctggcccagaggaccctgtaccaggaggtgatgctggagaactgcggcctgctggtgagcctgggctgccccgtgcccaggcccgagctgatctaccacctggagcacggccaggagccctggaccaggaaggaggacctgagccaggacggcggcccaagcagcggcgcccctcctcccagcggcggcagcccagccggctccccaacctctaccgaggagggcacctctgagtccgccacccccgagagcggccctggcacctccaccgagcccagcgagggcagcgcacccggcagccctgccggcagccccacctccacagaggagggaaccagcaccgagcccagcgaaggcagcgccccaggcaccagcaccgagcctagtgagcaggagattaaacggatcaacaagatcagaagaagacttgtgaaagacagcaacaccaagaaggccggcaagacaggccccatgaaaaccctgctggttagagtgatgacacccgatctgagagagcggctggaaaacctgagaaagaagcctgaaaatatcccccagcccatcagcaatacatctagagccaacctgaataagctgctgaccgattacaccgaaatgaagaaggcgatcctgcatgtgtactgggaagagttccagaaggaccctgtgggcctgatgagccgggtggcccagcctgccagcaagaagatcgatcagaacaagctgaaacctgagatggacgagaagggcaacctgaccaccgccggctttgcctgctctcagtgtggccagcccctgttcgtgtacaagctggagcaggtgtctgagaagggcaaggcttacaccaactacttcggacggtgcaatgtggccgagcacgaaaagctgatcctgctggcccagctgaagcccgagaaggatagcgacgaagccgtgacatatagcctgggaaagtttgggcagagggccctggatttctacagcattcatgtgaccaaggagtccacccaccccgtgaagcccctggcccagatcgccggaaacagatacgcctccggacctgtgggaaaggccctgagcgacgcatgtatgggcacaatcgcctccttcctgtctaagtaccaggacatcatcatcgaacaccagaaggtggtgaagggcaaccagaagagactggagagcctgcgggagctggccggcaaggaaaacctggaataccctagcgtgaccctgccacctcagcctcacaccaaggagggcgttgatgcctacaacgaagtgatcgcccgggtgcgaatgtgggtgaacctgaacctgtggcagaagctgaagctaagcagagatgatgccaagcctctgctgagactgaagggattcccttcctttcctctggtcgagagacaggccaacgaagtggactggtgggacatggtgtgtaacgtgaagaagctgatcaacgagaaaaaggaggatggcaaggtgttttggcagaatctggctggctacaagagacaggaagccctgagaccatacctgagcagcgaggaagatcggaagaagggaaagaaattcgctcggtaccagctgggcgacctgctgctgcacctggaaaagaagcacggcgaggactggggaaaggtgtacgacgaggcctgggagcggattgacaagaaagtggaaggcctgagcaagcacatcaagctggaagaggaacggagaagcgaggacgcccagagcaaggccgccctgaccgactggctgcgggctaaggccagcttcgtgatcgagggcctgaaggaggccgacaaggacgagttctgcagatgcgagctgaagctgcagaagtggtacggggacctgcggggaaagcccttcgccatcgaagccgagaacagcatcctggacatcagcggcttcagcaagcagtacaactgtgccttcatctggcagaaggacggcgtgaagaagctgaacctgtacctgatcatcaactacttcaagggcggcaagctgcggttcaagaagatcaaacctgaagccttcgaagccaacagattctacaccgtgatcaacaaaaagagcggcgagatcgtgcccatggaggtgaacttcaacttcgacgaccccaacctgatcatcctgcctctggcctttggcaagagacagggcagagaattcatctggaacgacctgctgtccctggaaaccggcagcctgaagctggccaacggaagagtgatcgagaagacactgtacaacagaagaacccggcaggatgagcctgccctgttcgtggccctgaccttcgagcggcgggaggtcctggactcctccaatatcaaaccaatgaacctgatcggcgtggcaagaggcgaaaacatccccgccgtgatcgccctgaccgaccccgagggctgcccactgagccggtttaaggatagcctgggaaacccaacccacatcctgagaatcggcgagagctataaggagaagcagcggaccatccaggccaagaaggaggtggagcagcggagagccggcggctacagccggaagtacgccagcaaagccaagaatctggcagacgatatggtgagaaacaccgctagagatctgctgtactacgccgtgacccaggatgccatgctgatcttcgccaacctgagccggggcttcggccggcagggcaagcggaccttcatggccgagagacagtacacacggatggaggactggctgaccgccaagctggcctacgagggcctgagcaagacctacctgtccaagacactggcccagtacacctccaagacatgcagcaactgtgggtttaccatcaccagcgccgactacgacagggtgctggagaagctgaagaagacagcaacaggctggatgaccacaattaacggcaaggagctgaaggtggagggccagattacctactacaacagatacaagagacagaacgtagtcaaggacctgtccgtcgagctggatagactgagcgaagaatctgtgaacaacgacatctcctcctggacaaagggcagaagcggagaagctctgagcctcctgaagaaaagattctcccatagacccgtgcaggagaagttcgtgtgcctgaactgcggcttcgagacacacgcagccgagcaagccgccctgaacatcgccagatcctggctgttcctgcggagccaggagtacaagaaataccagacaaacaagacaaccggcaacaccgataagagagccttcgtcgagacctggcagtccttttaccggaagaagcttaaggaggtgtggaaacctgccgtgcggtctggcggatctggcggaggctccaccagccccaagaaaaagagaaaagtctaagctgccttctgcggggcttgccttctggccatgcccttcttctctcccttgcacctgtacctcttggtctttgaataaagcctgagtaggaaggctagcaaaaaaaaaaaaaaaaaaaaaaaaaaaaaaaaaaaaaaaaaaaaaaaaaaaaaaaaaaaaaaaaaaaaaaaaaaaaaaaa

SEQ ID NO: 13639 - RNA, 5785 nt, synthetic construct
  source 1..5785: mol_type = other RNA
aggaaataagagagaaaagaagagtaagaagaaatataagagccaccatggcccctaagaagaagcgtaaagtgagccggatggaacgcctcgtctacgaggtgcggcagaagtgcagaaacatcgaggacatctgcatctcctgcggatctctgaacgtgaccctggagcacccactgttcatcggcggcatgtgccagaactgtaaaaactgttttctggagtgtgcctatcaatacgacgatgacggctaccagagctactgcaccatctgttgcggcggaagagaggtgctgatgtgtggaaataacaactgctgccggtgcttctgcgtggaatgcgtggacctgctggtgggccccggcgccgcccaggccgctattaaggaagatccttggaactgctacatgtgcggccacaagggcacatacggcctgctgagacggagagaggactggcctagcagactgcagatgttcttcgccaataaccacgaccaggagttcgacccccctaaggtgtaccctcccgtccccgccgagaagagaaagcccatccgggtcctgagcctgttcgatggcatcgccaccggtctgctggtgctgaaggacctgggcatccaggtggataggtacattgcctccgaggtgtgcgaggactccatcaccgtgggaatggtgcgtcatcagggcaagatcatgtacgtgggcgacgtgcggagcgtgacacagaagcatatccaggagtggggccctttcgacctggtgatcggcggcagcccttgcaatgacctgagcatcgtgaacccagcccggaagggcctgtacgagggaaccggcagactgttcttcgagttttacagactgctgcacgacgcccggcctaaggaaggcgacgaccggcccttcttttggctgttcgagaatgtggtggccatgggagtcagcgacaagcgggatattagccggttcctggagagcaaccccgtgatgatcgatgccaaggaagtgagcgccgcccaccgggccagatacttctggggcaatctgcctggcatgaacagacccctggccagcaccgtgaacgacaagctggagctgcaggagtgcctggagcacggccggatcgccaagttcagcaaggtgagaaccatcaccacccgaagcaacagcatcaaacaaggcaaggaccagcactttcctgtgttcatgaacgagaaggaggacatcctgtggtgtaccgagatggagagagtgttcgggttcccagtccactacacagatgtcagcaacatgtctagactggccagacagagactgctgggaagaagctggtccgtccctgtgatcagacacctgttcgcccctctgaaggagtacttcgcctgcgtgagcagcggcaacagcaacgccaacagccggggccccagcttctctagcggcctggtgccactgtccctgagagggagccacatgggccccatggagatctacaaaaccgtgagcgcctggaagcggcagcctgtgcgcgtgctgagcctgtttcggaatatcgataaagtcctgaaaagcctgggattcctggagagcggctctggctccggcggtggcaccctgaagtacgtggaggatgtgacaaacgtggtcagacgggatgtggagaagtggggccccttcgatctggtgtacggcagcacccaacccctgggcagctcttgtgaccggtgccctggctggtacatgtttcagttccaccggatcctgcagtacgccctgccgagacaggagtcccagcggccattcttttggattttcatggacaacttgctgctgaccgaggatgaccaggaaactaccactcggttcctgcagaccgaagccgtgaccctgcaggacgtgagaggccgggactaccagaacgccatgcgggtgtggtccaacatccctggactgaaaagcaagcacgcacctctgacccctaaagaagaggagtacctgcaggcccaggtgcggagcagaagcaagctggacgcccctaaggtggatctgctggtgaagaattgcctcctgcccctgagagagtacttcaagtatttcagccagaatagtctgcccctgggaggcagcggcggcggcaggcccgagagcgtgaccttcgaggacgtggccgtgtacttcagcgagaacgagtggatcggcctggcccccgcccagagggtgctgtacagggacgtgatgctggagaactacggcgtggtggccagcctggccttccccttccccaagcccgccctgatcagccagctggagaggggcgaggccccctggtgcaaggccccccagggcgccctggacggcgagtgccccaggggcgtgagcggcggcccaagcagcggcgcccctcctcccagcggcggcagcccagccggctccccaacctctaccgaggagggcacctctgagtccgccacccccgagagcggccctggcacctccaccgagcccagcgagggcagcgcacccggcagccctgccggcagccccacctccacagaggagggaaccagcaccgagcccagcgaaggcagcgccccaggcaccagcaccgagcctagtgagcaggagattaaacggatcaacaagatcagaagaagacttgtgaaagacagcaacaccaagaaggccggcaagacaggccccatgaaaaccctgctggttagagtgatgacacccgatctgagagagcggctggaaaacctgagaaagaagcctgaaaatatcccccagcccatcagcaatacatctagagccaacctgaataagctgctgaccgattacaccgaaatgaagaaggcgatcctgcatgtgtactgggaagagttccagaaggaccctgtgggcctgatgagccgggtggcccagcctgccagcaagaagatcgatcagaacaagctgaaacctgagatggacgagaagggcaacctgaccaccgccggctttgcctgctctcagtgtggccagcccctgttcgtgtacaagctggagcaggtgtctgagaagggcaaggcttacaccaactacttcggacggtgcaatgtggccgagcacgaaaagctgatcctgctggcccagctgaagcccgagaaggatagcgacgaagccgtgacatatagcctgggaaagtttgggcagagggccctggatttctacagcattcatgtgaccaaggagtccacccaccccgtgaagcccctggcccagatcgccggaaacagatacgcctccggacctgtgggaaaggccctgagcgacgcatgtatgggcacaatcgcctccttcctgtctaagtaccaggacatcatcatcgaacaccagaaggtggtgaagggcaaccagaagagactggagagcctgcgggagctggccggcaaggaaaacctggaataccctagcgtgaccctgccacctcagcctcacaccaaggagggcgttgatgcctacaacgaagtgatcgcccgggtgcgaatgtgggtgaacctgaacctgtggcagaagctgaagctaagcagagatgatgccaagcctctgctgagactgaagggattcccttcctttcctctggtcgagagacaggccaacgaagtggactggtgggacatggtgtgtaacgtgaagaagctgatcaacgagaaaaaggaggatggcaaggtgttttggcagaatctggctggctacaagagacaggaagccctgagaccatacctgagcagcgaggaagatcggaagaagggaaagaaattcgctcggtaccagctgggcgacctgctgctgcacctggaaaagaagcacggcgaggactggggaaaggtgtacgacgaggcctgggagcggattgacaagaaagtggaaggcctgagcaagcacatcaagctggaagaggaacggagaagcgaggacgcccagagcaaggccgccctgaccgactggctgcgggctaaggccagcttcgtgatcgagggcctgaaggaggccgacaaggacgagttctgcagatgcgagctgaagctgcagaagtggtacggggacctgcggggaaagcccttcgccatcgaagccgagaacagcatcctggacatcagcggcttcagcaagcagtacaactgtgccttcatctggcagaaggacggcgtgaagaagctgaacctgtacctgatcatcaactacttcaagggcggcaagctgcggttcaagaagatcaaacctgaagccttcgaagccaacagattctacaccgtgatcaacaaaaagagcggcgagatcgtgcccatggaggtgaacttcaacttcgacgaccccaacctgatcatcctgcctctggcctttggcaagagacagggcagagaattcatctggaacgacctgctgtccctggaaaccggcagcctgaagctggccaacggaagagtgatcgagaagacactgtacaacagaagaacccggcaggatgagcctgccctgttcgtggccctgaccttcgagcggcgggaggtcctggactcctccaatatcaaaccaatgaacctgatcggcgtggcaagaggcgaaaacatccccgccgtgatcgccctgaccgaccccgagggctgcccactgagccggtttaaggatagcctgggaaacccaacccacatcctgagaatcggcgagagctataaggagaagcagcggaccatccaggccaagaaggaggtggagcagcggagagccggcggctacagccggaagtacgccagcaaagccaagaatctggcagacgatatggtgagaaacaccgctagagatctgctgtactacgccgtgacccaggatgccatgctgatcttcgccaacctgagccggggcttcggccggcagggcaagcggaccttcatggccgagagacagtacacacggatggaggactggctgaccgccaagctggcctacgagggcctgagcaagacctacctgtccaagacactggcccagtacacctccaagacatgcagcaactgtgggtttaccatcaccagcgccgactacgacagggtgctggagaagctgaagaagacagcaacaggctggatgaccacaattaacggcaaggagctgaaggtggagggccagattacctactacaacagatacaagagacagaacgtagtcaaggacctgtccgtcgagctggatagactgagcgaagaatctgtgaacaacgacatctcctcctggacaaagggcagaagcggagaagctctgagcctcctgaagaaaagattctcccatagacccgtgcaggagaagttcgtgtgcctgaactgcggcttcgagacacacgcagccgagcaagccgccctgaacatcgccagatcctggctgttcctgcggagccaggagtacaagaaataccagacaaacaagacaaccggcaacaccgataagagagccttcgtcgagacctggcagtccttttaccggaagaagcttaaggaggtgtggaaacctgccgtgcggtctggcggatctggcggaggctccaccagccccaagaaaaagagaaaagtctaagctgccttctgcggggcttgccttctggccatgcccttcttctctcccttgcacctgtacctcttggtctttgaataaagcctgagtaggaaggctagcaaaaaaaaaaaaaaaaaaaaaaaaaaaaaaaaaaaaaaaaaaaaaaaaaaaaaaaaaaaaaaaaaaaaaaaaaaaaaaaa

SEQ ID NO: 13640 - RNA, 5785 nt, synthetic construct
  source 1..5785: mol_type = other RNA
aggaaataagagagaaaagaagagtaagaagaaatataagagccaccatggcccctaagaagaagcgtaaagtgagccggatggaacgcctcgtctacgaggtgcggcagaagtgcagaaacatcgaggacatctgcatctcctgcggatctctgaacgtgaccctggagcacccactgttcatcggcggcatgtgccagaactgtaaaaactgttttctggagtgtgcctatcaatacgacgatgacggctaccagagctactgcaccatctgttgcggcggaagagaggtgctgatgtgtggaaataacaactgctgccggtgcttctgcgtggaatgcgtggacctgctggtgggccccggcgccgcccaggccgctattaaggaagatccttggaactgctacatgtgcggccacaagggcacatacggcctgctgagacggagagaggactggcctagcagactgcagatgttcttcgccaataaccacgaccaggagttcgacccccctaaggtgtaccctcccgtccccgccgagaagagaaagcccatccgggtcctgagcctgttcgatggcatcgccaccggtctgctggtgctgaaggacctgggcatccaggtggataggtacattgcctccgaggtgtgcgaggactccatcaccgtgggaatggtgcgtcatcagggcaagatcatgtacgtgggcgacgtgcggagcgtgacacagaagcatatccaggagtggggccctttcgacctggtgatcggcggcagcccttgcaatgacctgagcatcgtgaacccagcccggaagggcctgtacgagggaaccggcagactgttcttcgagttttacagactgctgcacgacgcccggcctaaggaaggcgacgaccggcccttcttttggctgttcgagaatgtggtggccatgggagtcagcgacaagcgggatattagccggttcctggagagcaaccccgtgatgatcgatgccaaggaagtgagcgccgcccaccgggccagatacttctggggcaatctgcctggcatgaacagacccctggccagcaccgtgaacgacaagctggagctgcaggagtgcctggagcacggccggatcgccaagttcagcaaggtgagaaccatcaccacccgaagcaacagcatcaaacaaggcaaggaccagcactttcctgtgttcatgaacgagaaggaggacatcctgtggtgtaccgagatggagagagtgttcgggttcccagtccactacacagatgtcagcaacatgtctagactggccagacagagactgctgggaagaagctggtccgtccctgtgatcagacacctgttcgcccctctgaaggagtacttcgcctgcgtgagcagcggcaacagcaacgccaacagccggggccccagcttctctagcggcctggtgccactgtccctgagagggagccacatgggccccatggagatctacaaaaccgtgagcgcctggaagcggcagcctgtgcgcgtgctgagcctgtttcggaatatcgataaagtcctgaaaagcctgggattcctggagagcggctctggctccggcggtggcaccctgaagtacgtggaggatgtgacaaacgtggtcagacgggatgtggagaagtggggccccttcgatctggtgtacggcagcacccaacccctgggcagctcttgtgaccggtgccctggctggtacatgtttcagttccaccggatcctgcagtacgccctgccgagacaggagtcccagcggccattcttttggattttcatggacaacttgctgctgaccgaggatgaccaggaaactaccactcggttcctgcagaccgaagccgtgaccctgcaggacgtgagaggccgggactaccagaacgccatgcgggtgtggtccaacatccctggactgaaaagcaagcacgcacctctgacccctaaagaagaggagtacctgcaggcccaggtgcggagcagaagcaagctggacgcccctaaggtggatctgctggtgaagaattgcctcctgcccctgagagagtacttcaagtatttcagccagaatagtctgcccctgggaggcagcggcggcggcacccccgagcccgtgaggttcgccgacgtggccgtgtacttcagcctggaggagtggggctgcctgcagcccgcccagagggccctgtacagggacgtgatgagggagacctacggccacctgggcgccctgggcttcaggggcaccaagcccgccctgatcagctgggtggagaaggaggccgagctgtggggccccgacgccagggaccccgaggtgggcgagtgcctgaccgaggccgacggcggcccaagcagcggcgcccctcctcccagcggcggcagcccagccggctccccaacctctaccgaggagggcacctctgagtccgccacccccgagagcggccctggcacctccaccgagcccagcgagggcagcgcacccggcagccctgccggcagccccacctccacagaggagggaaccagcaccgagcccagcgaaggcagcgccccaggcaccagcaccgagcctagtgagcaggagattaaacggatcaacaagatcagaagaagacttgtgaaagacagcaacaccaagaaggccggcaagacaggccccatgaaaaccctgctggttagagtgatgacacccgatctgagagagcggctggaaaacctgagaaagaagcctgaaaatatcccccagcccatcagcaatacatctagagccaacctgaataagctgctgaccgattacaccgaaatgaagaaggcgatcctgcatgtgtactgggaagagttccagaaggaccctgtgggcctgatgagccgggtggcccagcctgccagcaagaagatcgatcagaacaagctgaaacctgagatggacgagaagggcaacctgaccaccgccggctttgcctgctctcagtgtggccagcccctgttcgtgtacaagctggagcaggtgtctgagaagggcaaggcttacaccaactacttcggacggtgcaatgtggccgagcacgaaaagctgatcctgctggcccagctgaagcccgagaaggatagcgacgaagccgtgacatatagcctgggaaagtttgggcagagggccctggatttctacagcattcatgtgaccaaggagtccacccaccccgtgaagcccctggcccagatcgccggaaacagatacgcctccggacctgtgggaaaggccctgagcgacgcatgtatgggcacaatcgcctccttcctgtctaagtaccaggacatcatcatcgaacaccagaaggtggtgaagggcaaccagaagagactggagagcctgcgggagctggccggcaaggaaaacctggaataccctagcgtgaccctgccacctcagcctcacaccaaggagggcgttgatgcctacaacgaagtgatcgcccgggtgcgaatgtgggtgaacctgaacctgtggcagaagctgaagctaagcagagatgatgccaagcctctgctgagactgaagggattcccttcctttcctctggtcgagagacaggccaacgaagtggactggtgggacatggtgtgtaacgtgaagaagctgatcaacgagaaaaaggaggatggcaaggtgttttggcagaatctggctggctacaagagacaggaagccctgagaccatacctgagcagcgaggaagatcggaagaagggaaagaaattcgctcggtaccagctgggcgacctgctgctgcacctggaaaagaagcacggcgaggactggggaaaggtgtacgacgaggcctgggagcggattgacaagaaagtggaaggcctgagcaagcacatcaagctggaagaggaacggagaagcgaggacgcccagagcaaggccgccctgaccgactggctgcgggctaaggccagcttcgtgatcgagggcctgaaggaggccgacaaggacgagttctgcagatgcgagctgaagctgcagaagtggtacggggacctgcggggaaagcccttcgccatcgaagccgagaacagcatcctggacatcagcggcttcagcaagcagtacaactgtgccttcatctggcagaaggacggcgtgaagaagctgaacctgtacctgatcatcaactacttcaagggcggcaagctgcggttcaagaagatcaaacctgaagccttcgaagccaacagattctacaccgtgatcaacaaaaagagcggcgagatcgtgcccatggaggtgaacttcaacttcgacgaccccaacctgatcatcctgcctctggcctttggcaagagacagggcagagaattcatctggaacgacctgctgtccctggaaaccggcagcctgaagctggccaacggaagagtgatcgagaagacactgtacaacagaagaacccggcaggatgagcctgccctgttcgtggccctgaccttcgagcggcgggaggtcctggactcctccaatatcaaaccaatgaacctgatcggcgtggcaagaggcgaaaacatccccgccgtgatcgccctgaccgaccccgagggctgcccactgagccggtttaaggatagcctgggaaacccaacccacatcctgagaatcggcgagagctataaggagaagcagcggaccatccaggccaagaaggaggtggagcagcggagagccggcggctacagccggaagtacgccagcaaagccaagaatctggcagacgatatggtgagaaacaccgctagagatctgctgtactacgccgtgacccaggatgccatgctgatcttcgccaacctgagccggggcttcggccggcagggcaagcggaccttcatggccgagagacagtacacacggatggaggactggctgaccgccaagctggcctacgagggcctgagcaagacctacctgtccaagacactggcccagtacacctccaagacatgcagcaactgtgggtttaccatcaccagcgccgactacgacagggtgctggagaagctgaagaagacagcaacaggctggatgaccacaattaacggcaaggagctgaaggtggagggccagattacctactacaacagatacaagagacagaacgtagtcaaggacctgtccgtcgagctggatagactgagcgaagaatctgtgaacaacgacatctcctcctggacaaagggcagaagcggagaagctctgagcctcctgaagaaaagattctcccatagacccgtgcaggagaagttcgtgtgcctgaactgcggcttcgagacacacgcagccgagcaagccgccctgaacatcgccagatcctggctgttcctgcggagccaggagtacaagaaataccagacaaacaagacaaccggcaacaccgataagagagccttcgtcgagacctggcagtccttttaccggaagaagcttaaggaggtgtggaaacctgccgtgcggtctggcggatctggcggaggctccaccagccccaagaaaaagagaaaagtctaagctgccttctgcggggcttgccttctggccatgcccttcttctctcccttgcacctgtacctcttggtctttgaataaagcctgagtaggaaggctagcaaaaaaaaaaaaaaaaaaaaaaaaaaaaaaaaaaaaaaaaaaaaaaaaaaaaaaaaaaaaaaaaaaaaaaaaaaaaaaaa

SEQ ID NO: 13641 - RNA, 5785 nt, synthetic construct
  source 1..5785: mol_type = other RNA
aggaaataagagagaaaagaagagtaagaagaaatataagagccaccatggcccctaagaagaagcgtaaagtgagccggatggaacgcctcgtctacgaggtgcggcagaagtgcagaaacatcgaggacatctgcatctcctgcggatctctgaacgtgaccctggagcacccactgttcatcggcggcatgtgccagaactgtaaaaactgttttctggagtgtgcctatcaatacgacgatgacggctaccagagctactgcaccatctgttgcggcggaagagaggtgctgatgtgtggaaataacaactgctgccggtgcttctgcgtggaatgcgtggacctgctggtgggccccggcgccgcccaggccgctattaaggaagatccttggaactgctacatgtgcggccacaagggcacatacggcctgctgagacggagagaggactggcctagcagactgcagatgttcttcgccaataaccacgaccaggagttcgacccccctaaggtgtaccctcccgtccccgccgagaagagaaagcccatccgggtcctgagcctgttcgatggcatcgccaccggtctgctggtgctgaaggacctgggcatccaggtggataggtacattgcctccgaggtgtgcgaggactccatcaccgtgggaatggtgcgtcatcagggcaagatcatgtacgtgggcgacgtgcggagcgtgacacagaagcatatccaggagtggggccctttcgacctggtgatcggcggcagcccttgcaatgacctgagcatcgtgaacccagcccggaagggcctgtacgagggaaccggcagactgttcttcgagttttacagactgctgcacgacgcccggcctaaggaaggcgacgaccggcccttcttttggctgttcgagaatgtggtggccatgggagtcagcgacaagcgggatattagccggttcctggagagcaaccccgtgatgatcgatgccaaggaagtgagcgccgcccaccgggccagatacttctggggcaatctgcctggcatgaacagacccctggccagcaccgtgaacgacaagctggagctgcaggagtgcctggagcacggccggatcgccaagttcagcaaggtgagaaccatcaccacccgaagcaacagcatcaaacaaggcaaggaccagcactttcctgtgttcatgaacgagaaggaggacatcctgtggtgtaccgagatggagagagtgttcgggttcccagtccactacacagatgtcagcaacatgtctagactggccagacagagactgctgggaagaagctggtccgtccctgtgatcagacacctgttcgcccctctgaaggagtacttcgcctgcgtgagcagcggcaacagcaacgccaacagccggggccccagcttctctagcggcctggtgccactgtccctgagagggagccacatgggccccatggagatctacaaaaccgtgagcgcctggaagcggcagcctgtgcgcgtgctgagcctgtttcggaatatcgataaagtcctgaaaagcctgggattcctggagagcggctctggctccggcggtggcaccctgaagtacgtggaggatgtgacaaacgtggtcagacgggatgtggagaagtggggccccttcgatctggtgtacggcagcacccaacccctgggcagctcttgtgaccggtgccctggctggtacatgtttcagttccaccggatcctgcagtacgccctgccgagacaggagtcccagcggccattcttttggattttcatggacaacttgctgctgaccgaggatgaccaggaaactaccactcggttcctgcagaccgaagccgtgaccctgcaggacgtgagaggccgggactaccagaacgccatgcgggtgtggtccaacatccctggactgaaaagcaagcacgcacctctgacccctaaagaagaggagtacctgcaggcccaggtgcggagcagaagcaagctggacgcccctaaggtggatctgctggtgaagaattgcctcctgcccctgagagagtacttcaagtatttcagccagaatagtctgcccctgggaggcagcggcggcggcaccatgaccaccgtgagcagcaccgccaggccccaggagagcgtggccttcgacgacgtggccgtgtacttcaccaagaaggagtgggccatcatggtgcccgaccagagggccctgtacagggacgtgatgctggagaactacgaggccgtggccttcgtggtgccccccaccagcaagcccgccctggtgagccacctggagcagggcaaggagccctgcttcacccagccccagggcgtgggcggcccaagcagcggcgcccctcctcccagcggcggcagcccagccggctccccaacctctaccgaggagggcacctctgagtccgccacccccgagagcggccctggcacctccaccgagcccagcgagggcagcgcacccggcagccctgccggcagccccacctccacagaggagggaaccagcaccgagcccagcgaaggcagcgccccaggcaccagcaccgagcctagtgagcaggagattaaacggatcaacaagatcagaagaagacttgtgaaagacagcaacaccaagaaggccggcaagacaggccccatgaaaaccctgctggttagagtgatgacacccgatctgagagagcggctggaaaacctgagaaagaagcctgaaaatatcccccagcccatcagcaatacatctagagccaacctgaataagctgctgaccgattacaccgaaatgaagaaggcgatcctgcatgtgtactgggaagagttccagaaggaccctgtgggcctgatgagccgggtggcccagcctgccagcaagaagatcgatcagaacaagctgaaacctgagatggacgagaagggcaacctgaccaccgccggctttgcctgctctcagtgtggccagcccctgttcgtgtacaagctggagcaggtgtctgagaagggcaaggcttacaccaactacttcggacggtgcaatgtggccgagcacgaaaagctgatcctgctggcccagctgaagcccgagaaggatagcgacgaagccgtgacatatagcctgggaaagtttgggcagagggccctggatttctacagcattcatgtgaccaaggagtccacccaccccgtgaagcccctggcccagatcgccggaaacagatacgcctccggacctgtgggaaaggccctgagcgacgcatgtatgggcacaatcgcctccttcctgtctaagtaccaggacatcatcatcgaacaccagaaggtggtgaagggcaaccagaagagactggagagcctgcgggagctggccggcaaggaaaacctggaataccctagcgtgaccctgccacctcagcctcacaccaaggagggcgttgatgcctacaacgaagtgatcgcccgggtgcgaatgtgggtgaacctgaacctgtggcagaagctgaagctaagcagagatgatgccaagcctctgctgagactgaagggattcccttcctttcctctggtcgagagacaggccaacgaagtggactggtgggacatggtgtgtaacgtgaagaagctgatcaacgagaaaaaggaggatggcaaggtgttttggcagaatctggctggctacaagagacaggaagccctgagaccatacctgagcagcgaggaagatcggaagaagggaaagaaattcgctcggtaccagctgggcgacctgctgctgcacctggaaaagaagcacggcgaggactggggaaaggtgtacgacgaggcctgggagcggattgacaagaaagtggaaggcctgagcaagcacatcaagctggaagaggaacggagaagcgaggacgcccagagcaaggccgccctgaccgactggctgcgggctaaggccagcttcgtgatcgagggcctgaaggaggccgacaaggacgagttctgcagatgcgagctgaagctgcagaagtggtacggggacctgcggggaaagcccttcgccatcgaagccgagaacagcatcctggacatcagcggcttcagcaagcagtacaactgtgccttcatctggcagaaggacggcgtgaagaagctgaacctgtacctgatcatcaactacttcaagggcggcaagctgcggttcaagaagatcaaacctgaagccttcgaagccaacagattctacaccgtgatcaacaaaaagagcggcgagatcgtgcccatggaggtgaacttcaacttcgacgaccccaacctgatcatcctgcctctggcctttggcaagagacagggcagagaattcatctggaacgacctgctgtccctggaaaccggcagcctgaagctggccaacggaagagtgatcgagaagacactgtacaacagaagaacccggcaggatgagcctgccctgttcgtggccctgaccttcgagcggcgggaggtcctggactcctccaatatcaaaccaatgaacctgatcggcgtggcaagaggcgaaaacatccccgccgtgatcgccctgaccgaccccgagggctgcccactgagccggtttaaggatagcctgggaaacccaacccacatcctgagaatcggcgagagctataaggagaagcagcggaccatccaggccaagaaggaggtggagcagcggagagccggcggctacagccggaagtacgccagcaaagccaagaatctggcagacgatatggtgagaaacaccgctagagatctgctgtactacgccgtgacccaggatgccatgctgatcttcgccaacctgagccggggcttcggccggcagggcaagcggaccttcatggccgagagacagtacacacggatggaggactggctgaccgccaagctggcctacgagggcctgagcaagacctacctgtccaagacactggcccagtacacctccaagacatgcagcaactgtgggtttaccatcaccagcgccgactacgacagggtgctggagaagctgaagaagacagcaacaggctggatgaccacaattaacggcaaggagctgaaggtggagggccagattacctactacaacagatacaagagacagaacgtagtcaaggacctgtccgtcgagctggatagactgagcgaagaatctgtgaacaacgacatctcctcctggacaaagggcagaagcggagaagctctgagcctcctgaagaaaagattctcccatagacccgtgcaggagaagttcgtgtgcctgaactgcggcttcgagacacacgcagccgagcaagccgccctgaacatcgccagatcctggctgttcctgcggagccaggagtacaagaaataccagacaaacaagacaaccggcaacaccgataagagagccttcgtcgagacctggcagtccttttaccggaagaagcttaaggaggtgtggaaacctgccgtgcggtctggcggatctggcggaggctccaccagccccaagaaaaagagaaaagtctaagctgccttctgcggggcttgccttctggccatgcccttcttctctcccttgcacctgtacctcttggtctttgaataaagcctgagtaggaaggctagcaaaaaaaaaaaaaaaaaaaaaaaaaaaaaaaaaaaaaaaaaaaaaaaaaaaaaaaaaaaaaaaaaaaaaaaaaaaaaaaa

SEQ ID NO: 13642 - RNA, 5785 nt, synthetic construct
  source 1..5785: mol_type = other RNA
aggaaataagagagaaaagaagagtaagaagaaatataagagccaccatggcccctaagaagaagcgtaaagtgagccggatggaacgcctcgtctacgaggtgcggcagaagtgcagaaacatcgaggacatctgcatctcctgcggatctctgaacgtgaccctggagcacccactgttcatcggcggcatgtgccagaactgtaaaaactgttttctggagtgtgcctatcaatacgacgatgacggctaccagagctactgcaccatctgttgcggcggaagagaggtgctgatgtgtggaaataacaactgctgccggtgcttctgcgtggaatgcgtggacctgctggtgggccccggcgccgcccaggccgctattaaggaagatccttggaactgctacatgtgcggccacaagggcacatacggcctgctgagacggagagaggactggcctagcagactgcagatgttcttcgccaataaccacgaccaggagttcgacccccctaaggtgtaccctcccgtccccgccgagaagagaaagcccatccgggtcctgagcctgttcgatggcatcgccaccggtctgctggtgctgaaggacctgggcatccaggtggataggtacattgcctccgaggtgtgcgaggactccatcaccgtgggaatggtgcgtcatcagggcaagatcatgtacgtgggcgacgtgcggagcgtgacacagaagcatatccaggagtggggccctttcgacctggtgatcggcggcagcccttgcaatgacctgagcatcgtgaacccagcccggaagggcctgtacgagggaaccggcagactgttcttcgagttttacagactgctgcacgacgcccggcctaaggaaggcgacgaccggcccttcttttggctgttcgagaatgtggtggccatgggagtcagcgacaagcgggatattagccggttcctggagagcaaccccgtgatgatcgatgccaaggaagtgagcgccgcccaccgggccagatacttctggggcaatctgcctggcatgaacagacccctggccagcaccgtgaacgacaagctggagctgcaggagtgcctggagcacggccggatcgccaagttcagcaaggtgagaaccatcaccacccgaagcaacagcatcaaacaaggcaaggaccagcactttcctgtgttcatgaacgagaaggaggacatcctgtggtgtaccgagatggagagagtgttcgggttcccagtccactacacagatgtcagcaacatgtctagactggccagacagagactgctgggaagaagctggtccgtccctgtgatcagacacctgttcgcccctctgaaggagtacttcgcctgcgtgagcagcggcaacagcaacgccaacagccggggccccagcttctctagcggcctggtgccactgtccctgagagggagccacatgggccccatggagatctacaaaaccgtgagcgcctggaagcggcagcctgtgcgcgtgctgagcctgtttcggaatatcgataaagtcctgaaaagcctgggattcctggagagcggctctggctccggcggtggcaccctgaagtacgtggaggatgtgacaaacgtggtcagacgggatgtggagaagtggggccccttcgatctggtgtacggcagcacccaacccctgggcagctcttgtgaccggtgccctggctggtacatgtttcagttccaccggatcctgcagtacgccctgccgagacaggagtcccagcggccattcttttggattttcatggacaacttgctgctgaccgaggatgaccaggaaactaccactcggttcctgcagaccgaagccgtgaccctgcaggacgtgagaggccgggactaccagaacgccatgcgggtgtggtccaacatccctggactgaaaagcaagcacgcacctctgacccctaaagaagaggagtacctgcaggcccaggtgcggagcagaagcaagctggacgcccctaaggtggatctgctggtgaagaattgcctcctgcccctgagagagtacttcaagtatttcagccagaatagtctgcccctgggaggcagcggcggcggcttccagggccccgtgaccttcagggacgtggccatcgacttcagccaggaggagtggaagtggctgcagcccgcccagagggacctgtacaggtgcgtgatgctggagaactacggccacctggtgagcctgggcctgagcatcagcaagcccgacgtggtgagcctgctggagcagggcaaggagccctggctggagcagggcgacgtgaggaggaacctgttcagcgtgagccagagcaacggcggcccaagcagcggcgcccctcctcccagcggcggcagcccagccggctccccaacctctaccgaggagggcacctctgagtccgccacccccgagagcggccctggcacctccaccgagcccagcgagggcagcgcacccggcagccctgccggcagccccacctccacagaggagggaaccagcaccgagcccagcgaaggcagcgccccaggcaccagcaccgagcctagtgagcaggagattaaacggatcaacaagatcagaagaagacttgtgaaagacagcaacaccaagaaggccggcaagacaggccccatgaaaaccctgctggttagagtgatgacacccgatctgagagagcggctggaaaacctgagaaagaagcctgaaaatatcccccagcccatcagcaatacatctagagccaacctgaataagctgctgaccgattacaccgaaatgaagaaggcgatcctgcatgtgtactgggaagagttccagaaggaccctgtgggcctgatgagccgggtggcccagcctgccagcaagaagatcgatcagaacaagctgaaacctgagatggacgagaagggcaacctgaccaccgccggctttgcctgctctcagtgtggccagcccctgttcgtgtacaagctggagcaggtgtctgagaagggcaaggcttacaccaactacttcggacggtgcaatgtggccgagcacgaaaagctgatcctgctggcccagctgaagcccgagaaggatagcgacgaagccgtgacatatagcctgggaaagtttgggcagagggccctggatttctacagcattcatgtgaccaaggagtccacccaccccgtgaagcccctggcccagatcgccggaaacagatacgcctccggacctgtgggaaaggccctgagcgacgcatgtatgggcacaatcgcctccttcctgtctaagtaccaggacatcatcatcgaacaccagaaggtggtgaagggcaaccagaagagactggagagcctgcgggagctggccggcaaggaaaacctggaataccctagcgtgaccctgccacctcagcctcacaccaaggagggcgttgatgcctacaacgaagtgatcgcccgggtgcgaatgtgggtgaacctgaacctgtggcagaagctgaagctaagcagagatgatgccaagcctctgctgagactgaagggattcccttcctttcctctggtcgagagacaggccaacgaagtggactggtgggacatggtgtgtaacgtgaagaagctgatcaacgagaaaaaggaggatggcaaggtgttttggcagaatctggctggctacaagagacaggaagccctgagaccatacctgagcagcgaggaagatcggaagaagggaaagaaattcgctcggtaccagctgggcgacctgctgctgcacctggaaaagaagcacggcgaggactggggaaaggtgtacgacgaggcctgggagcggattgacaagaaagtggaaggcctgagcaagcacatcaagctggaagaggaacggagaagcgaggacgcccagagcaaggccgccctgaccgactggctgcgggctaaggccagcttcgtgatcgagggcctgaaggaggccgacaaggacgagttctgcagatgcgagctgaagctgcagaagtggtacggggacctgcggggaaagcccttcgccatcgaagccgagaacagcatcctggacatcagcggcttcagcaagcagtacaactgtgccttcatctggcagaaggacggcgtgaagaagctgaacctgtacctgatcatcaactacttcaagggcggcaagctgcggttcaagaagatcaaacctgaagccttcgaagccaacagattctacaccgtgatcaacaaaaagagcggcgagatcgtgcccatggaggtgaacttcaacttcgacgaccccaacctgatcatcctgcctctggcctttggcaagagacagggcagagaattcatctggaacgacctgctgtccctggaaaccggcagcctgaagctggccaacggaagagtgatcgagaagacactgtacaacagaagaacccggcaggatgagcctgccctgttcgtggccctgaccttcgagcggcgggaggtcctggactcctccaatatcaaaccaatgaacctgatcggcgtggcaagaggcgaaaacatccccgccgtgatcgccctgaccgaccccgagggctgcccactgagccggtttaaggatagcctgggaaacccaacccacatcctgagaatcggcgagagctataaggagaagcagcggaccatccaggccaagaaggaggtggagcagcggagagccggcggctacagccggaagtacgccagcaaagccaagaatctggcagacgatatggtgagaaacaccgctagagatctgctgtactacgccgtgacccaggatgccatgctgatcttcgccaacctgagccggggcttcggccggcagggcaagcggaccttcatggccgagagacagtacacacggatggaggactggctgaccgccaagctggcctacgagggcctgagcaagacctacctgtccaagacactggcccagtacacctccaagacatgcagcaactgtgggtttaccatcaccagcgccgactacgacagggtgctggagaagctgaagaagacagcaacaggctggatgaccacaattaacggcaaggagctgaaggtggagggccagattacctactacaacagatacaagagacagaacgtagtcaaggacctgtccgtcgagctggatagactgagcgaagaatctgtgaacaacgacatctcctcctggacaaagggcagaagcggagaagctctgagcctcctgaagaaaagattctcccatagacccgtgcaggagaagttcgtgtgcctgaactgcggcttcgagacacacgcagccgagcaagccgccctgaacatcgccagatcctggctgttcctgcggagccaggagtacaagaaataccagacaaacaagacaaccggcaacaccgataagagagccttcgtcgagacctggcagtccttttaccggaagaagcttaaggaggtgtggaaacctgccgtgcggtctggcggatctggcggaggctccaccagccccaagaaaaagagaaaagtctaagctgccttctgcggggcttgccttctggccatgcccttcttctctcccttgcacctgtacctcttggtctttgaataaagcctgagtaggaaggctagcaaaaaaaaaaaaaaaaaaaaaaaaaaaaaaaaaaaaaaaaaaaaaaaaaaaaaaaaaaaaaaaaaaaaaaaaaaaaaaaa

SEQ ID NO: 13643 - RNA, 5785 nt, synthetic construct
  source 1..5785: mol_type = other RNA
aggaaataagagagaaaagaagagtaagaagaaatataagagccaccatggcccctaagaagaagcgtaaagtgagccggatggaacgcctcgtctacgaggtgcggcagaagtgcagaaacatcgaggacatctgcatctcctgcggatctctgaacgtgaccctggagcacccactgttcatcggcggcatgtgccagaactgtaaaaactgttttctggagtgtgcctatcaatacgacgatgacggctaccagagctactgcaccatctgttgcggcggaagagaggtgctgatgtgtggaaataacaactgctgccggtgcttctgcgtggaatgcgtggacctgctggtgggccccggcgccgcccaggccgctattaaggaagatccttggaactgctacatgtgcggccacaagggcacatacggcctgctgagacggagagaggactggcctagcagactgcagatgttcttcgccaataaccacgaccaggagttcgacccccctaaggtgtaccctcccgtccccgccgagaagagaaagcccatccgggtcctgagcctgttcgatggcatcgccaccggtctgctggtgctgaaggacctgggcatccaggtggataggtacattgcctccgaggtgtgcgaggactccatcaccgtgggaatggtgcgtcatcagggcaagatcatgtacgtgggcgacgtgcggagcgtgacacagaagcatatccaggagtggggccctttcgacctggtgatcggcggcagcccttgcaatgacctgagcatcgtgaacccagcccggaagggcctgtacgagggaaccggcagactgttcttcgagttttacagactgctgcacgacgcccggcctaaggaaggcgacgaccggcccttcttttggctgttcgagaatgtggtggccatgggagtcagcgacaagcgggatattagccggttcctggagagcaaccccgtgatgatcgatgccaaggaagtgagcgccgcccaccgggccagatacttctggggcaatctgcctggcatgaacagacccctggccagcaccgtgaacgacaagctggagctgcaggagtgcctggagcacggccggatcgccaagttcagcaaggtgagaaccatcaccacccgaagcaacagcatcaaacaaggcaaggaccagcactttcctgtgttcatgaacgagaaggaggacatcctgtggtgtaccgagatggagagagtgttcgggttcccagtccactacacagatgtcagcaacatgtctagactggccagacagagactgctgggaagaagctggtccgtccctgtgatcagacacctgttcgcccctctgaaggagtacttcgcctgcgtgagcagcggcaacagcaacgccaacagccggggccccagcttctctagcggcctggtgccactgtccctgagagggagccacatgggccccatggagatctacaaaaccgtgagcgcctggaagcggcagcctgtgcgcgtgctgagcctgtttcggaatatcgataaagtcctgaaaagcctgggattcctggagagcggctctggctccggcggtggcaccctgaagtacgtggaggatgtgacaaacgtggtcagacgggatgtggagaagtggggccccttcgatctggtgtacggcagcacccaacccctgggcagctcttgtgaccggtgccctggctggtacatgtttcagttccaccggatcctgcagtacgccctgccgagacaggagtcccagcggccattcttttggattttcatggacaacttgctgctgaccgaggatgaccaggaaactaccactcggttcctgcagaccgaagccgtgaccctgcaggacgtgagaggccgggactaccagaacgccatgcgggtgtggtccaacatccctggactgaaaagcaagcacgcacctctgacccctaaagaagaggagtacctgcaggcccaggtgcggagcagaagcaagctggacgcccctaaggtggatctgctggtgaagaattgcctcctgcccctgagagagtacttcaagtatttcagccagaatagtctgcccctgggaggcagcggcggcggcgcccagatgctggtgaccttcaaggacgtggccgtgaccttcacccaggaggagtggaggcagctggacctgacccagaggaccctgtacagggaggtgatgctggagacctgcggcctgctggtgagcctgggccacagggtgcccaagcccgagctggtgcacctgctggagcacggccaggagctgtggaccgtgaagaggggcctgagcgaccccacctgcgccggcgacaggacccagggcggcccaagcagcggcgcccctcctcccagcggcggcagcccagccggctccccaacctctaccgaggagggcacctctgagtccgccacccccgagagcggccctggcacctccaccgagcccagcgagggcagcgcacccggcagccctgccggcagccccacctccacagaggagggaaccagcaccgagcccagcgaaggcagcgccccaggcaccagcaccgagcctagtgagcaggagattaaacggatcaacaagatcagaagaagacttgtgaaagacagcaacaccaagaaggccggcaagacaggccccatgaaaaccctgctggttagagtgatgacacccgatctgagagagcggctggaaaacctgagaaagaagcctgaaaatatcccccagcccatcagcaatacatctagagccaacctgaataagctgctgaccgattacaccgaaatgaagaaggcgatcctgcatgtgtactgggaagagttccagaaggaccctgtgggcctgatgagccgggtggcccagcctgccagcaagaagatcgatcagaacaagctgaaacctgagatggacgagaagggcaacctgaccaccgccggctttgcctgctctcagtgtggccagcccctgttcgtgtacaagctggagcaggtgtctgagaagggcaaggcttacaccaactacttcggacggtgcaatgtggccgagcacgaaaagctgatcctgctggcccagctgaagcccgagaaggatagcgacgaagccgtgacatatagcctgggaaagtttgggcagagggccctggatttctacagcattcatgtgaccaaggagtccacccaccccgtgaagcccctggcccagatcgccggaaacagatacgcctccggacctgtgggaaaggccctgagcgacgcatgtatgggcacaatcgcctccttcctgtctaagtaccaggacatcatcatcgaacaccagaaggtggtgaagggcaaccagaagagactggagagcctgcgggagctggccggcaaggaaaacctggaataccctagcgtgaccctgccacctcagcctcacaccaaggagggcgttgatgcctacaacgaagtgatcgcccgggtgcgaatgtgggtgaacctgaacctgtggcagaagctgaagctaagcagagatgatgccaagcctctgctgagactgaagggattcccttcctttcctctggtcgagagacaggccaacgaagtggactggtgggacatggtgtgtaacgtgaagaagctgatcaacgagaaaaaggaggatggcaaggtgttttggcagaatctggctggctacaagagacaggaagccctgagaccatacctgagcagcgaggaagatcggaagaagggaaagaaattcgctcggtaccagctgggcgacctgctgctgcacctggaaaagaagcacggcgaggactggggaaaggtgtacgacgaggcctgggagcggattgacaagaaagtggaaggcctgagcaagcacatcaagctggaagaggaacggagaagcgaggacgcccagagcaaggccgccctgaccgactggctgcgggctaaggccagcttcgtgatcgagggcctgaaggaggccgacaaggacgagttctgcagatgcgagctgaagctgcagaagtggtacggggacctgcggggaaagcccttcgccatcgaagccgagaacagcatcctggacatcagcggcttcagcaagcagtacaactgtgccttcatctggcagaaggacggcgtgaagaagctgaacctgtacctgatcatcaactacttcaagggcggcaagctgcggttcaagaagatcaaacctgaagccttcgaagccaacagattctacaccgtgatcaacaaaaagagcggcgagatcgtgcccatggaggtgaacttcaacttcgacgaccccaacctgatcatcctgcctctggcctttggcaagagacagggcagagaattcatctggaacgacctgctgtccctggaaaccggcagcctgaagctggccaacggaagagtgatcgagaagacactgtacaacagaagaacccggcaggatgagcctgccctgttcgtggccctgaccttcgagcggcgggaggtcctggactcctccaatatcaaaccaatgaacctgatcggcgtggcaagaggcgaaaacatccccgccgtgatcgccctgaccgaccccgagggctgcccactgagccggtttaaggatagcctgggaaacccaacccacatcctgagaatcggcgagagctataaggagaagcagcggaccatccaggccaagaaggaggtggagcagcggagagccggcggctacagccggaagtacgccagcaaagccaagaatctggcagacgatatggtgagaaacaccgctagagatctgctgtactacgccgtgacccaggatgccatgctgatcttcgccaacctgagccggggcttcggccggcagggcaagcggaccttcatggccgagagacagtacacacggatggaggactggctgaccgccaagctggcctacgagggcctgagcaagacctacctgtccaagacactggcccagtacacctccaagacatgcagcaactgtgggtttaccatcaccagcgccgactacgacagggtgctggagaagctgaagaagacagcaacaggctggatgaccacaattaacggcaaggagctgaaggtggagggccagattacctactacaacagatacaagagacagaacgtagtcaaggacctgtccgtcgagctggatagactgagcgaagaatctgtgaacaacgacatctcctcctggacaaagggcagaagcggagaagctctgagcctcctgaagaaaagattctcccatagacccgtgcaggagaagttcgtgtgcctgaactgcggcttcgagacacacgcagccgagcaagccgccctgaacatcgccagatcctggctgttcctgcggagccaggagtacaagaaataccagacaaacaagacaaccggcaacaccgataagagagccttcgtcgagacctggcagtccttttaccggaagaagcttaaggaggtgtggaaacctgccgtgcggtctggcggatctggcggaggctccaccagccccaagaaaaagagaaaagtctaagctgccttctgcggggcttgccttctggccatgcccttcttctctcccttgcacctgtacctcttggtctttgaataaagcctgagtaggaaggctagcaaaaaaaaaaaaaaaaaaaaaaaaaaaaaaaaaaaaaaaaaaaaaaaaaaaaaaaaaaaaaaaaaaaaaaaaaaaaaaaa

SEQ ID NO: 13644 - RNA, 5785 nt, synthetic construct
  source 1..5785: mol_type = other RNA
aggaaataagagagaaaagaagagtaagaagaaatataagagccaccatggcccctaagaagaagcgtaaagtgagccggatggaacgcctcgtctacgaggtgcggcagaagtgcagaaacatcgaggacatctgcatctcctgcggatctctgaacgtgaccctggagcacccactgttcatcggcggcatgtgccagaactgtaaaaactgttttctggagtgtgcctatcaatacgacgatgacggctaccagagctactgcaccatctgttgcggcggaagagaggtgctgatgtgtggaaataacaactgctgccggtgcttctgcgtggaatgcgtggacctgctggtgggccccggcgccgcccaggccgctattaaggaagatccttggaactgctacatgtgcggccacaagggcacatacggcctgctgagacggagagaggactggcctagcagactgcagatgttcttcgccaataaccacgaccaggagttcgacccccctaaggtgtaccctcccgtccccgccgagaagagaaagcccatccgggtcctgagcctgttcgatggcatcgccaccggtctgctggtgctgaaggacctgggcatccaggtggataggtacattgcctccgaggtgtgcgaggactccatcaccgtgggaatggtgcgtcatcagggcaagatcatgtacgtgggcgacgtgcggagcgtgacacagaagcatatccaggagtggggccctttcgacctggtgatcggcggcagcccttgcaatgacctgagcatcgtgaacccagcccggaagggcctgtacgagggaaccggcagactgttcttcgagttttacagactgctgcacgacgcccggcctaaggaaggcgacgaccggcccttcttttggctgttcgagaatgtggtggccatgggagtcagcgacaagcgggatattagccggttcctggagagcaaccccgtgatgatcgatgccaaggaagtgagcgccgcccaccgggccagatacttctggggcaatctgcctggcatgaacagacccctggccagcaccgtgaacgacaagctggagctgcaggagtgcctggagcacggccggatcgccaagttcagcaaggtgagaaccatcaccacccgaagcaacagcatcaaacaaggcaaggaccagcactttcctgtgttcatgaacgagaaggaggacatcctgtggtgtaccgagatggagagagtgttcgggttcccagtccactacacagatgtcagcaacatgtctagactggccagacagagactgctgggaagaagctggtccgtccctgtgatcagacacctgttcgcccctctgaaggagtacttcgcctgcgtgagcagcggcaacagcaacgccaacagccggggccccagcttctctagcggcctggtgccactgtccctgagagggagccacatgggccccatggagatctacaaaaccgtgagcgcctggaagcggcagcctgtgcgcgtgctgagcctgtttcggaatatcgataaagtcctgaaaagcctgggattcctggagagcggctctggctccggcggtggcaccctgaagtacgtggaggatgtgacaaacgtggtcagacgggatgtggagaagtggggccccttcgatctggtgtacggcagcacccaacccctgggcagctcttgtgaccggtgccctggctggtacatgtttcagttccaccggatcctgcagtacgccctgccgagacaggagtcccagcggccattcttttggattttcatggacaacttgctgctgaccgaggatgaccaggaaactaccactcggttcctgcagaccgaagccgtgaccctgcaggacgtgagaggccgggactaccagaacgccatgcgggtgtggtccaacatccctggactgaaaagcaagcacgcacctctgacccctaaagaagaggagtacctgcaggcccaggtgcggagcagaagcaagctggacgcccctaaggtggatctgctggtgaagaattgcctcctgcccctgagagagtacttcaagtatttcagccagaatagtctgcccctgggaggcagcggcggcggcaggcccagggccctgaagttcgtggacgtggccgtgtacttcagcagcgaggagtggggctgcctgaggcccgcccagagggccctgtacagggacgtgatgagggagacctacggccacctgggcgccctgggcttccccggccccaagcccgccctgatcagctggatggagcaggagagcgaggcctggagcagcgccgcccaggaccccgagaacggcgagagcctgggcggcgccaggggcggcccaagcagcggcgcccctcctcccagcggcggcagcccagccggctccccaacctctaccgaggagggcacctctgagtccgccacccccgagagcggccctggcacctccaccgagcccagcgagggcagcgcacccggcagccctgccggcagccccacctccacagaggagggaaccagcaccgagcccagcgaaggcagcgccccaggcaccagcaccgagcctagtgagcaggagattaaacggatcaacaagatcagaagaagacttgtgaaagacagcaacaccaagaaggccggcaagacaggccccatgaaaaccctgctggttagagtgatgacacccgatctgagagagcggctggaaaacctgagaaagaagcctgaaaatatcccccagcccatcagcaatacatctagagccaacctgaataagctgctgaccgattacaccgaaatgaagaaggcgatcctgcatgtgtactgggaagagttccagaaggaccctgtgggcctgatgagccgggtggcccagcctgccagcaagaagatcgatcagaacaagctgaaacctgagatggacgagaagggcaacctgaccaccgccggctttgcctgctctcagtgtggccagcccctgttcgtgtacaagctggagcaggtgtctgagaagggcaaggcttacaccaactacttcggacggtgcaatgtggccgagcacgaaaagctgatcctgctggcccagctgaagcccgagaaggatagcgacgaagccgtgacatatagcctgggaaagtttgggcagagggccctggatttctacagcattcatgtgaccaaggagtccacccaccccgtgaagcccctggcccagatcgccggaaacagatacgcctccggacctgtgggaaaggccctgagcgacgcatgtatgggcacaatcgcctccttcctgtctaagtaccaggacatcatcatcgaacaccagaaggtggtgaagggcaaccagaagagactggagagcctgcgggagctggccggcaaggaaaacctggaataccctagcgtgaccctgccacctcagcctcacaccaaggagggcgttgatgcctacaacgaagtgatcgcccgggtgcgaatgtgggtgaacctgaacctgtggcagaagctgaagctaagcagagatgatgccaagcctctgctgagactgaagggattcccttcctttcctctggtcgagagacaggccaacgaagtggactggtgggacatggtgtgtaacgtgaagaagctgatcaacgagaaaaaggaggatggcaaggtgttttggcagaatctggctggctacaagagacaggaagccctgagaccatacctgagcagcgaggaagatcggaagaagggaaagaaattcgctcggtaccagctgggcgacctgctgctgcacctggaaaagaagcacggcgaggactggggaaaggtgtacgacgaggcctgggagcggattgacaagaaagtggaaggcctgagcaagcacatcaagctggaagaggaacggagaagcgaggacgcccagagcaaggccgccctgaccgactggctgcgggctaaggccagcttcgtgatcgagggcctgaaggaggccgacaaggacgagttctgcagatgcgagctgaagctgcagaagtggtacggggacctgcggggaaagcccttcgccatcgaagccgagaacagcatcctggacatcagcggcttcagcaagcagtacaactgtgccttcatctggcagaaggacggcgtgaagaagctgaacctgtacctgatcatcaactacttcaagggcggcaagctgcggttcaagaagatcaaacctgaagccttcgaagccaacagattctacaccgtgatcaacaaaaagagcggcgagatcgtgcccatggaggtgaacttcaacttcgacgaccccaacctgatcatcctgcctctggcctttggcaagagacagggcagagaattcatctggaacgacctgctgtccctggaaaccggcagcctgaagctggccaacggaagagtgatcgagaagacactgtacaacagaagaacccggcaggatgagcctgccctgttcgtggccctgaccttcgagcggcgggaggtcctggactcctccaatatcaaaccaatgaacctgatcggcgtggcaagaggcgaaaacatccccgccgtgatcgccctgaccgaccccgagggctgcccactgagccggtttaaggatagcctgggaaacccaacccacatcctgagaatcggcgagagctataaggagaagcagcggaccatccaggccaagaaggaggtggagcagcggagagccggcggctacagccggaagtacgccagcaaagccaagaatctggcagacgatatggtgagaaacaccgctagagatctgctgtactacgccgtgacccaggatgccatgctgatcttcgccaacctgagccggggcttcggccggcagggcaagcggaccttcatggccgagagacagtacacacggatggaggactggctgaccgccaagctggcctacgagggcctgagcaagacctacctgtccaagacactggcccagtacacctccaagacatgcagcaactgtgggtttaccatcaccagcgccgactacgacagggtgctggagaagctgaagaagacagcaacaggctggatgaccacaattaacggcaaggagctgaaggtggagggccagattacctactacaacagatacaagagacagaacgtagtcaaggacctgtccgtcgagctggatagactgagcgaagaatctgtgaacaacgacatctcctcctggacaaagggcagaagcggagaagctctgagcctcctgaagaaaagattctcccatagacccgtgcaggagaagttcgtgtgcctgaactgcggcttcgagacacacgcagccgagcaagccgccctgaacatcgccagatcctggctgttcctgcggagccaggagtacaagaaataccagacaaacaagacaaccggcaacaccgataagagagccttcgtcgagacctggcagtccttttaccggaagaagcttaaggaggtgtggaaacctgccgtgcggtctggcggatctggcggaggctccaccagccccaagaaaaagagaaaagtctaagctgccttctgcggggcttgccttctggccatgcccttcttctctcccttgcacctgtacctcttggtctttgaataaagcctgagtaggaaggctagcaaaaaaaaaaaaaaaaaaaaaaaaaaaaaaaaaaaaaaaaaaaaaaaaaaaaaaaaaaaaaaaaaaaaaaaaaaaaaaaa

SEQ ID NO: 13645 - RNA, 5785 nt, synthetic construct
  source 1..5785: mol_type = other RNA
aggaaataagagagaaaagaagagtaagaagaaatataagagccaccatggcccctaagaagaagcgtaaagtgagccggatggaacgcctcgtctacgaggtgcggcagaagtgcagaaacatcgaggacatctgcatctcctgcggatctctgaacgtgaccctggagcacccactgttcatcggcggcatgtgccagaactgtaaaaactgttttctggagtgtgcctatcaatacgacgatgacggctaccagagctactgcaccatctgttgcggcggaagagaggtgctgatgtgtggaaataacaactgctgccggtgcttctgcgtggaatgcgtggacctgctggtgggccccggcgccgcccaggccgctattaaggaagatccttggaactgctacatgtgcggccacaagggcacatacggcctgctgagacggagagaggactggcctagcagactgcagatgttcttcgccaataaccacgaccaggagttcgacccccctaaggtgtaccctcccgtccccgccgagaagagaaagcccatccgggtcctgagcctgttcgatggcatcgccaccggtctgctggtgctgaaggacctgggcatccaggtggataggtacattgcctccgaggtgtgcgaggactccatcaccgtgggaatggtgcgtcatcagggcaagatcatgtacgtgggcgacgtgcggagcgtgacacagaagcatatccaggagtggggccctttcgacctggtgatcggcggcagcccttgcaatgacctgagcatcgtgaacccagcccggaagggcctgtacgagggaaccggcagactgttcttcgagttttacagactgctgcacgacgcccggcctaaggaaggcgacgaccggcccttcttttggctgttcgagaatgtggtggccatgggagtcagcgacaagcgggatattagccggttcctggagagcaaccccgtgatgatcgatgccaaggaagtgagcgccgcccaccgggccagatacttctggggcaatctgcctggcatgaacagacccctggccagcaccgtgaacgacaagctggagctgcaggagtgcctggagcacggccggatcgccaagttcagcaaggtgagaaccatcaccacccgaagcaacagcatcaaacaaggcaaggaccagcactttcctgtgttcatgaacgagaaggaggacatcctgtggtgtaccgagatggagagagtgttcgggttcccagtccactacacagatgtcagcaacatgtctagactggccagacagagactgctgggaagaagctggtccgtccctgtgatcagacacctgttcgcccctctgaaggagtacttcgcctgcgtgagcagcggcaacagcaacgccaacagccggggccccagcttctctagcggcctggtgccactgtccctgagagggagccacatgggccccatggagatctacaaaaccgtgagcgcctggaagcggcagcctgtgcgcgtgctgagcctgtttcggaatatcgataaagtcctgaaaagcctgggattcctggagagcggctctggctccggcggtggcaccctgaagtacgtggaggatgtgacaaacgtggtcagacgggatgtggagaagtggggccccttcgatctggtgtacggcagcacccaacccctgggcagctcttgtgaccggtgccctggctggtacatgtttcagttccaccggatcctgcagtacgccctgccgagacaggagtcccagcggccattcttttggattttcatggacaacttgctgctgaccgaggatgaccaggaaactaccactcggttcctgcagaccgaagccgtgaccctgcaggacgtgagaggccgggactaccagaacgccatgcgggtgtggtccaacatccctggactgaaaagcaagcacgcacctctgacccctaaagaagaggagtacctgcaggcccaggtgcggagcagaagcaagctggacgcccctaaggtggatctgctggtgaagaattgcctcctgcccctgagagagtacttcaagtatttcagccagaatagtctgcccctgggaggcagcggcggcggcttccagggccccgtgaccttcgacgaggtggccgtgtacttcaccaaggaggagtgggccctgctggaccccgcccagagggccctgtacagggacgtgatgcaggagaactacgagaccgtgaccagcctgggcctgcccgtgagcaggcccgacgtgatcagccagatggagcagggcgaggagccctgggccagcgccctgcagggcagcgaggacaggctgatcctgaggggcatctgcggcggcccaagcagcggcgcccctcctcccagcggcggcagcccagccggctccccaacctctaccgaggagggcacctctgagtccgccacccccgagagcggccctggcacctccaccgagcccagcgagggcagcgcacccggcagccctgccggcagccccacctccacagaggagggaaccagcaccgagcccagcgaaggcagcgccccaggcaccagcaccgagcctagtgagcaggagattaaacggatcaacaagatcagaagaagacttgtgaaagacagcaacaccaagaaggccggcaagacaggccccatgaaaaccctgctggttagagtgatgacacccgatctgagagagcggctggaaaacctgagaaagaagcctgaaaatatcccccagcccatcagcaatacatctagagccaacctgaataagctgctgaccgattacaccgaaatgaagaaggcgatcctgcatgtgtactgggaagagttccagaaggaccctgtgggcctgatgagccgggtggcccagcctgccagcaagaagatcgatcagaacaagctgaaacctgagatggacgagaagggcaacctgaccaccgccggctttgcctgctctcagtgtggccagcccctgttcgtgtacaagctggagcaggtgtctgagaagggcaaggcttacaccaactacttcggacggtgcaatgtggccgagcacgaaaagctgatcctgctggcccagctgaagcccgagaaggatagcgacgaagccgtgacatatagcctgggaaagtttgggcagagggccctggatttctacagcattcatgtgaccaaggagtccacccaccccgtgaagcccctggcccagatcgccggaaacagatacgcctccggacctgtgggaaaggccctgagcgacgcatgtatgggcacaatcgcctccttcctgtctaagtaccaggacatcatcatcgaacaccagaaggtggtgaagggcaaccagaagagactggagagcctgcgggagctggccggcaaggaaaacctggaataccctagcgtgaccctgccacctcagcctcacaccaaggagggcgttgatgcctacaacgaagtgatcgcccgggtgcgaatgtgggtgaacctgaacctgtggcagaagctgaagctaagcagagatgatgccaagcctctgctgagactgaagggattcccttcctttcctctggtcgagagacaggccaacgaagtggactggtgggacatggtgtgtaacgtgaagaagctgatcaacgagaaaaaggaggatggcaaggtgttttggcagaatctggctggctacaagagacaggaagccctgagaccatacctgagcagcgaggaagatcggaagaagggaaagaaattcgctcggtaccagctgggcgacctgctgctgcacctggaaaagaagcacggcgaggactggggaaaggtgtacgacgaggcctgggagcggattgacaagaaagtggaaggcctgagcaagcacatcaagctggaagaggaacggagaagcgaggacgcccagagcaaggccgccctgaccgactggctgcgggctaaggccagcttcgtgatcgagggcctgaaggaggccgacaaggacgagttctgcagatgcgagctgaagctgcagaagtggtacggggacctgcggggaaagcccttcgccatcgaagccgagaacagcatcctggacatcagcggcttcagcaagcagtacaactgtgccttcatctggcagaaggacggcgtgaagaagctgaacctgtacctgatcatcaactacttcaagggcggcaagctgcggttcaagaagatcaaacctgaagccttcgaagccaacagattctacaccgtgatcaacaaaaagagcggcgagatcgtgcccatggaggtgaacttcaacttcgacgaccccaacctgatcatcctgcctctggcctttggcaagagacagggcagagaattcatctggaacgacctgctgtccctggaaaccggcagcctgaagctggccaacggaagagtgatcgagaagacactgtacaacagaagaacccggcaggatgagcctgccctgttcgtggccctgaccttcgagcggcgggaggtcctggactcctccaatatcaaaccaatgaacctgatcggcgtggcaagaggcgaaaacatccccgccgtgatcgccctgaccgaccccgagggctgcccactgagccggtttaaggatagcctgggaaacccaacccacatcctgagaatcggcgagagctataaggagaagcagcggaccatccaggccaagaaggaggtggagcagcggagagccggcggctacagccggaagtacgccagcaaagccaagaatctggcagacgatatggtgagaaacaccgctagagatctgctgtactacgccgtgacccaggatgccatgctgatcttcgccaacctgagccggggcttcggccggcagggcaagcggaccttcatggccgagagacagtacacacggatggaggactggctgaccgccaagctggcctacgagggcctgagcaagacctacctgtccaagacactggcccagtacacctccaagacatgcagcaactgtgggtttaccatcaccagcgccgactacgacagggtgctggagaagctgaagaagacagcaacaggctggatgaccacaattaacggcaaggagctgaaggtggagggccagattacctactacaacagatacaagagacagaacgtagtcaaggacctgtccgtcgagctggatagactgagcgaagaatctgtgaacaacgacatctcctcctggacaaagggcagaagcggagaagctctgagcctcctgaagaaaagattctcccatagacccgtgcaggagaagttcgtgtgcctgaactgcggcttcgagacacacgcagccgagcaagccgccctgaacatcgccagatcctggctgttcctgcggagccaggagtacaagaaataccagacaaacaagacaaccggcaacaccgataagagagccttcgtcgagacctggcagtccttttaccggaagaagcttaaggaggtgtggaaacctgccgtgcggtctggcggatctggcggaggctccaccagccccaagaaaaagagaaaagtctaagctgccttctgcggggcttgccttctggccatgcccttcttctctcccttgcacctgtacctcttggtctttgaataaagcctgagtaggaaggctagcaaaaaaaaaaaaaaaaaaaaaaaaaaaaaaaaaaaaaaaaaaaaaaaaaaaaaaaaaaaaaaaaaaaaaaaaaaaaaaaa

SEQ ID NO: 13646 - RNA, 5785 nt, synthetic construct
  source 1..5785: mol_type = other RNA
aggaaataagagagaaaagaagagtaagaagaaatataagagccaccatggcccctaagaagaagcgtaaagtgagccggatggaacgcctcgtctacgaggtgcggcagaagtgcagaaacatcgaggacatctgcatctcctgcggatctctgaacgtgaccctggagcacccactgttcatcggcggcatgtgccagaactgtaaaaactgttttctggagtgtgcctatcaatacgacgatgacggctaccagagctactgcaccatctgttgcggcggaagagaggtgctgatgtgtggaaataacaactgctgccggtgcttctgcgtggaatgcgtggacctgctggtgggccccggcgccgcccaggccgctattaaggaagatccttggaactgctacatgtgcggccacaagggcacatacggcctgctgagacggagagaggactggcctagcagactgcagatgttcttcgccaataaccacgaccaggagttcgacccccctaaggtgtaccctcccgtccccgccgagaagagaaagcccatccgggtcctgagcctgttcgatggcatcgccaccggtctgctggtgctgaaggacctgggcatccaggtggataggtacattgcctccgaggtgtgcgaggactccatcaccgtgggaatggtgcgtcatcagggcaagatcatgtacgtgggcgacgtgcggagcgtgacacagaagcatatccaggagtggggccctttcgacctggtgatcggcggcagcccttgcaatgacctgagcatcgtgaacccagcccggaagggcctgtacgagggaaccggcagactgttcttcgagttttacagactgctgcacgacgcccggcctaaggaaggcgacgaccggcccttcttttggctgttcgagaatgtggtggccatgggagtcagcgacaagcgggatattagccggttcctggagagcaaccccgtgatgatcgatgccaaggaagtgagcgccgcccaccgggccagatacttctggggcaatctgcctggcatgaacagacccctggccagcaccgtgaacgacaagctggagctgcaggagtgcctggagcacggccggatcgccaagttcagcaaggtgagaaccatcaccacccgaagcaacagcatcaaacaaggcaaggaccagcactttcctgtgttcatgaacgagaaggaggacatcctgtggtgtaccgagatggagagagtgttcgggttcccagtccactacacagatgtcagcaacatgtctagactggccagacagagactgctgggaagaagctggtccgtccctgtgatcagacacctgttcgcccctctgaaggagtacttcgcctgcgtgagcagcggcaacagcaacgccaacagccggggccccagcttctctagcggcctggtgccactgtccctgagagggagccacatgggccccatggagatctacaaaaccgtgagcgcctggaagcggcagcctgtgcgcgtgctgagcctgtttcggaatatcgataaagtcctgaaaagcctgggattcctggagagcggctctggctccggcggtggcaccctgaagtacgtggaggatgtgacaaacgtggtcagacgggatgtggagaagtggggccccttcgatctggtgtacggcagcacccaacccctgggcagctcttgtgaccggtgccctggctggtacatgtttcagttccaccggatcctgcagtacgccctgccgagacaggagtcccagcggccattcttttggattttcatggacaacttgctgctgaccgaggatgaccaggaaactaccactcggttcctgcagaccgaagccgtgaccctgcaggacgtgagaggccgggactaccagaacgccatgcgggtgtggtccaacatccctggactgaaaagcaagcacgcacctctgacccctaaagaagaggagtacctgcaggcccaggtgcggagcagaagcaagctggacgcccctaaggtggatctgctggtgaagaattgcctcctgcccctgagagagtacttcaagtatttcagccagaatagtctgcccctgggaggcagcggcggcggcatgaccatgctgcaggacagcttcagcttcgacgacctgagcgtggacttcacccagaaggagtggcagctgctggaccccagccagaagaacctgtacaaggacgtgatgctggagaactacagcagcctggtgagcctgggctacgaggccatgaagcccgacgtgatcttcaagctggagcagggcgaggagccctggatcggcgacgaggagatccccagcagctggagccccgacatcggcggcccaagcagcggcgcccctcctcccagcggcggcagcccagccggctccccaacctctaccgaggagggcacctctgagtccgccacccccgagagcggccctggcacctccaccgagcccagcgagggcagcgcacccggcagccctgccggcagccccacctccacagaggagggaaccagcaccgagcccagcgaaggcagcgccccaggcaccagcaccgagcctagtgagcaggagattaaacggatcaacaagatcagaagaagacttgtgaaagacagcaacaccaagaaggccggcaagacaggccccatgaaaaccctgctggttagagtgatgacacccgatctgagagagcggctggaaaacctgagaaagaagcctgaaaatatcccccagcccatcagcaatacatctagagccaacctgaataagctgctgaccgattacaccgaaatgaagaaggcgatcctgcatgtgtactgggaagagttccagaaggaccctgtgggcctgatgagccgggtggcccagcctgccagcaagaagatcgatcagaacaagctgaaacctgagatggacgagaagggcaacctgaccaccgccggctttgcctgctctcagtgtggccagcccctgttcgtgtacaagctggagcaggtgtctgagaagggcaaggcttacaccaactacttcggacggtgcaatgtggccgagcacgaaaagctgatcctgctggcccagctgaagcccgagaaggatagcgacgaagccgtgacatatagcctgggaaagtttgggcagagggccctggatttctacagcattcatgtgaccaaggagtccacccaccccgtgaagcccctggcccagatcgccggaaacagatacgcctccggacctgtgggaaaggccctgagcgacgcatgtatgggcacaatcgcctccttcctgtctaagtaccaggacatcatcatcgaacaccagaaggtggtgaagggcaaccagaagagactggagagcctgcgggagctggccggcaaggaaaacctggaataccctagcgtgaccctgccacctcagcctcacaccaaggagggcgttgatgcctacaacgaagtgatcgcccgggtgcgaatgtgggtgaacctgaacctgtggcagaagctgaagctaagcagagatgatgccaagcctctgctgagactgaagggattcccttcctttcctctggtcgagagacaggccaacgaagtggactggtgggacatggtgtgtaacgtgaagaagctgatcaacgagaaaaaggaggatggcaaggtgttttggcagaatctggctggctacaagagacaggaagccctgagaccatacctgagcagcgaggaagatcggaagaagggaaagaaattcgctcggtaccagctgggcgacctgctgctgcacctggaaaagaagcacggcgaggactggggaaaggtgtacgacgaggcctgggagcggattgacaagaaagtggaaggcctgagcaagcacatcaagctggaagaggaacggagaagcgaggacgcccagagcaaggccgccctgaccgactggctgcgggctaaggccagcttcgtgatcgagggcctgaaggaggccgacaaggacgagttctgcagatgcgagctgaagctgcagaagtggtacggggacctgcggggaaagcccttcgccatcgaagccgagaacagcatcctggacatcagcggcttcagcaagcagtacaactgtgccttcatctggcagaaggacggcgtgaagaagctgaacctgtacctgatcatcaactacttcaagggcggcaagctgcggttcaagaagatcaaacctgaagccttcgaagccaacagattctacaccgtgatcaacaaaaagagcggcgagatcgtgcccatggaggtgaacttcaacttcgacgaccccaacctgatcatcctgcctctggcctttggcaagagacagggcagagaattcatctggaacgacctgctgtccctggaaaccggcagcctgaagctggccaacggaagagtgatcgagaagacactgtacaacagaagaacccggcaggatgagcctgccctgttcgtggccctgaccttcgagcggcgggaggtcctggactcctccaatatcaaaccaatgaacctgatcggcgtggcaagaggcgaaaacatccccgccgtgatcgccctgaccgaccccgagggctgcccactgagccggtttaaggatagcctgggaaacccaacccacatcctgagaatcggcgagagctataaggagaagcagcggaccatccaggccaagaaggaggtggagcagcggagagccggcggctacagccggaagtacgccagcaaagccaagaatctggcagacgatatggtgagaaacaccgctagagatctgctgtactacgccgtgacccaggatgccatgctgatcttcgccaacctgagccggggcttcggccggcagggcaagcggaccttcatggccgagagacagtacacacggatggaggactggctgaccgccaagctggcctacgagggcctgagcaagacctacctgtccaagacactggcccagtacacctccaagacatgcagcaactgtgggtttaccatcaccagcgccgactacgacagggtgctggagaagctgaagaagacagcaacaggctggatgaccacaattaacggcaaggagctgaaggtggagggccagattacctactacaacagatacaagagacagaacgtagtcaaggacctgtccgtcgagctggatagactgagcgaagaatctgtgaacaacgacatctcctcctggacaaagggcagaagcggagaagctctgagcctcctgaagaaaagattctcccatagacccgtgcaggagaagttcgtgtgcctgaactgcggcttcgagacacacgcagccgagcaagccgccctgaacatcgccagatcctggctgttcctgcggagccaggagtacaagaaataccagacaaacaagacaaccggcaacaccgataagagagccttcgtcgagacctggcagtccttttaccggaagaagcttaaggaggtgtggaaacctgccgtgcggtctggcggatctggcggaggctccaccagccccaagaaaaagagaaaagtctaagctgccttctgcggggcttgccttctggccatgcccttcttctctcccttgcacctgtacctcttggtctttgaataaagcctgagtaggaaggctagcaaaaaaaaaaaaaaaaaaaaaaaaaaaaaaaaaaaaaaaaaaaaaaaaaaaaaaaaaaaaaaaaaaaaaaaaaaaaaaaa

SEQ ID NO: 13647 - RNA, 5785 nt, synthetic construct
  source 1..5785: mol_type = other RNA
aggaaataagagagaaaagaagagtaagaagaaatataagagccaccatggcccctaagaagaagcgtaaagtgagccggatggaacgcctcgtctacgaggtgcggcagaagtgcagaaacatcgaggacatctgcatctcctgcggatctctgaacgtgaccctggagcacccactgttcatcggcggcatgtgccagaactgtaaaaactgttttctggagtgtgcctatcaatacgacgatgacggctaccagagctactgcaccatctgttgcggcggaagagaggtgctgatgtgtggaaataacaactgctgccggtgcttctgcgtggaatgcgtggacctgctggtgggccccggcgccgcccaggccgctattaaggaagatccttggaactgctacatgtgcggccacaagggcacatacggcctgctgagacggagagaggactggcctagcagactgcagatgttcttcgccaataaccacgaccaggagttcgacccccctaaggtgtaccctcccgtccccgccgagaagagaaagcccatccgggtcctgagcctgttcgatggcatcgccaccggtctgctggtgctgaaggacctgggcatccaggtggataggtacattgcctccgaggtgtgcgaggactccatcaccgtgggaatggtgcgtcatcagggcaagatcatgtacgtgggcgacgtgcggagcgtgacacagaagcatatccaggagtggggccctttcgacctggtgatcggcggcagcccttgcaatgacctgagcatcgtgaacccagcccggaagggcctgtacgagggaaccggcagactgttcttcgagttttacagactgctgcacgacgcccggcctaaggaaggcgacgaccggcccttcttttggctgttcgagaatgtggtggccatgggagtcagcgacaagcgggatattagccggttcctggagagcaaccccgtgatgatcgatgccaaggaagtgagcgccgcccaccgggccagatacttctggggcaatctgcctggcatgaacagacccctggccagcaccgtgaacgacaagctggagctgcaggagtgcctggagcacggccggatcgccaagttcagcaaggtgagaaccatcaccacccgaagcaacagcatcaaacaaggcaaggaccagcactttcctgtgttcatgaacgagaaggaggacatcctgtggtgtaccgagatggagagagtgttcgggttcccagtccactacacagatgtcagcaacatgtctagactggccagacagagactgctgggaagaagctggtccgtccctgtgatcagacacctgttcgcccctctgaaggagtacttcgcctgcgtgagcagcggcaacagcaacgccaacagccggggccccagcttctctagcggcctggtgccactgtccctgagagggagccacatgggccccatggagatctacaaaaccgtgagcgcctggaagcggcagcctgtgcgcgtgctgagcctgtttcggaatatcgataaagtcctgaaaagcctgggattcctggagagcggctctggctccggcggtggcaccctgaagtacgtggaggatgtgacaaacgtggtcagacgggatgtggagaagtggggccccttcgatctggtgtacggcagcacccaacccctgggcagctcttgtgaccggtgccctggctggtacatgtttcagttccaccggatcctgcagtacgccctgccgagacaggagtcccagcggccattcttttggattttcatggacaacttgctgctgaccgaggatgaccaggaaactaccactcggttcctgcagaccgaagccgtgaccctgcaggacgtgagaggccgggactaccagaacgccatgcgggtgtggtccaacatccctggactgaaaagcaagcacgcacctctgacccctaaagaagaggagtacctgcaggcccaggtgcggagcagaagcaagctggacgcccctaaggtggatctgctggtgaagaattgcctcctgcccctgagagagtacttcaagtatttcagccagaatagtctgcccctgggaggcagcggcggcggcttccccatgcccgtgaccttcgaggaggtggccgtgtacttcacccagggccagggcgccctgctggaccccgcccagagggccctgtacagggacgtgatgcaggagaactacaagatggtgaccagcctggccggcttccccatccccaagcccgacctgatcgcccagctggagaggggcgaggagccctgggtgcccgacctgcaggccgacgaggagagggagagccccaggggcaccggcggcccaagcagcggcgcccctcctcccagcggcggcagcccagccggctccccaacctctaccgaggagggcacctctgagtccgccacccccgagagcggccctggcacctccaccgagcccagcgagggcagcgcacccggcagccctgccggcagccccacctccacagaggagggaaccagcaccgagcccagcgaaggcagcgccccaggcaccagcaccgagcctagtgagcaggagattaaacggatcaacaagatcagaagaagacttgtgaaagacagcaacaccaagaaggccggcaagacaggccccatgaaaaccctgctggttagagtgatgacacccgatctgagagagcggctggaaaacctgagaaagaagcctgaaaatatcccccagcccatcagcaatacatctagagccaacctgaataagctgctgaccgattacaccgaaatgaagaaggcgatcctgcatgtgtactgggaagagttccagaaggaccctgtgggcctgatgagccgggtggcccagcctgccagcaagaagatcgatcagaacaagctgaaacctgagatggacgagaagggcaacctgaccaccgccggctttgcctgctctcagtgtggccagcccctgttcgtgtacaagctggagcaggtgtctgagaagggcaaggcttacaccaactacttcggacggtgcaatgtggccgagcacgaaaagctgatcctgctggcccagctgaagcccgagaaggatagcgacgaagccgtgacatatagcctgggaaagtttgggcagagggccctggatttctacagcattcatgtgaccaaggagtccacccaccccgtgaagcccctggcccagatcgccggaaacagatacgcctccggacctgtgggaaaggccctgagcgacgcatgtatgggcacaatcgcctccttcctgtctaagtaccaggacatcatcatcgaacaccagaaggtggtgaagggcaaccagaagagactggagagcctgcgggagctggccggcaaggaaaacctggaataccctagcgtgaccctgccacctcagcctcacaccaaggagggcgttgatgcctacaacgaagtgatcgcccgggtgcgaatgtgggtgaacctgaacctgtggcagaagctgaagctaagcagagatgatgccaagcctctgctgagactgaagggattcccttcctttcctctggtcgagagacaggccaacgaagtggactggtgggacatggtgtgtaacgtgaagaagctgatcaacgagaaaaaggaggatggcaaggtgttttggcagaatctggctggctacaagagacaggaagccctgagaccatacctgagcagcgaggaagatcggaagaagggaaagaaattcgctcggtaccagctgggcgacctgctgctgcacctggaaaagaagcacggcgaggactggggaaaggtgtacgacgaggcctgggagcggattgacaagaaagtggaaggcctgagcaagcacatcaagctggaagaggaacggagaagcgaggacgcccagagcaaggccgccctgaccgactggctgcgggctaaggccagcttcgtgatcgagggcctgaaggaggccgacaaggacgagttctgcagatgcgagctgaagctgcagaagtggtacggggacctgcggggaaagcccttcgccatcgaagccgagaacagcatcctggacatcagcggcttcagcaagcagtacaactgtgccttcatctggcagaaggacggcgtgaagaagctgaacctgtacctgatcatcaactacttcaagggcggcaagctgcggttcaagaagatcaaacctgaagccttcgaagccaacagattctacaccgtgatcaacaaaaagagcggcgagatcgtgcccatggaggtgaacttcaacttcgacgaccccaacctgatcatcctgcctctggcctttggcaagagacagggcagagaattcatctggaacgacctgctgtccctggaaaccggcagcctgaagctggccaacggaagagtgatcgagaagacactgtacaacagaagaacccggcaggatgagcctgccctgttcgtggccctgaccttcgagcggcgggaggtcctggactcctccaatatcaaaccaatgaacctgatcggcgtggcaagaggcgaaaacatccccgccgtgatcgccctgaccgaccccgagggctgcccactgagccggtttaaggatagcctgggaaacccaacccacatcctgagaatcggcgagagctataaggagaagcagcggaccatccaggccaagaaggaggtggagcagcggagagccggcggctacagccggaagtacgccagcaaagccaagaatctggcagacgatatggtgagaaacaccgctagagatctgctgtactacgccgtgacccaggatgccatgctgatcttcgccaacctgagccggggcttcggccggcagggcaagcggaccttcatggccgagagacagtacacacggatggaggactggctgaccgccaagctggcctacgagggcctgagcaagacctacctgtccaagacactggcccagtacacctccaagacatgcagcaactgtgggtttaccatcaccagcgccgactacgacagggtgctggagaagctgaagaagacagcaacaggctggatgaccacaattaacggcaaggagctgaaggtggagggccagattacctactacaacagatacaagagacagaacgtagtcaaggacctgtccgtcgagctggatagactgagcgaagaatctgtgaacaacgacatctcctcctggacaaagggcagaagcggagaagctctgagcctcctgaagaaaagattctcccatagacccgtgcaggagaagttcgtgtgcctgaactgcggcttcgagacacacgcagccgagcaagccgccctgaacatcgccagatcctggctgttcctgcggagccaggagtacaagaaataccagacaaacaagacaaccggcaacaccgataagagagccttcgtcgagacctggcagtccttttaccggaagaagcttaaggaggtgtggaaacctgccgtgcggtctggcggatctggcggaggctccaccagccccaagaaaaagagaaaagtctaagctgccttctgcggggcttgccttctggccatgcccttcttctctcccttgcacctgtacctcttggtctttgaataaagcctgagtaggaaggctagcaaaaaaaaaaaaaaaaaaaaaaaaaaaaaaaaaaaaaaaaaaaaaaaaaaaaaaaaaaaaaaaaaaaaaaaaaaaaaaaa

SEQ ID NO: 13648 - RNA, 5785 nt, synthetic construct
  source 1..5785: mol_type = other RNA
aggaaataagagagaaaagaagagtaagaagaaatataagagccaccatggcccctaagaagaagcgtaaagtgagccggatggaacgcctcgtctacgaggtgcggcagaagtgcagaaacatcgaggacatctgcatctcctgcggatctctgaacgtgaccctggagcacccactgttcatcggcggcatgtgccagaactgtaaaaactgttttctggagtgtgcctatcaatacgacgatgacggctaccagagctactgcaccatctgttgcggcggaagagaggtgctgatgtgtggaaataacaactgctgccggtgcttctgcgtggaatgcgtggacctgctggtgggccccggcgccgcccaggccgctattaaggaagatccttggaactgctacatgtgcggccacaagggcacatacggcctgctgagacggagagaggactggcctagcagactgcagatgttcttcgccaataaccacgaccaggagttcgacccccctaaggtgtaccctcccgtccccgccgagaagagaaagcccatccgggtcctgagcctgttcgatggcatcgccaccggtctgctggtgctgaaggacctgggcatccaggtggataggtacattgcctccgaggtgtgcgaggactccatcaccgtgggaatggtgcgtcatcagggcaagatcatgtacgtgggcgacgtgcggagcgtgacacagaagcatatccaggagtggggccctttcgacctggtgatcggcggcagcccttgcaatgacctgagcatcgtgaacccagcccggaagggcctgtacgagggaaccggcagactgttcttcgagttttacagactgctgcacgacgcccggcctaaggaaggcgacgaccggcccttcttttggctgttcgagaatgtggtggccatgggagtcagcgacaagcgggatattagccggttcctggagagcaaccccgtgatgatcgatgccaaggaagtgagcgccgcccaccgggccagatacttctggggcaatctgcctggcatgaacagacccctggccagcaccgtgaacgacaagctggagctgcaggagtgcctggagcacggccggatcgccaagttcagcaaggtgagaaccatcaccacccgaagcaacagcatcaaacaaggcaaggaccagcactttcctgtgttcatgaacgagaaggaggacatcctgtggtgtaccgagatggagagagtgttcgggttcccagtccactacacagatgtcagcaacatgtctagactggccagacagagactgctgggaagaagctggtccgtccctgtgatcagacacctgttcgcccctctgaaggagtacttcgcctgcgtgagcagcggcaacagcaacgccaacagccggggccccagcttctctagcggcctggtgccactgtccctgagagggagccacatgggccccatggagatctacaaaaccgtgagcgcctggaagcggcagcctgtgcgcgtgctgagcctgtttcggaatatcgataaagtcctgaaaagcctgggattcctggagagcggctctggctccggcggtggcaccctgaagtacgtggaggatgtgacaaacgtggtcagacgggatgtggagaagtggggccccttcgatctggtgtacggcagcacccaacccctgggcagctcttgtgaccggtgccctggctggtacatgtttcagttccaccggatcctgcagtacgccctgccgagacaggagtcccagcggccattcttttggattttcatggacaacttgctgctgaccgaggatgaccaggaaactaccactcggttcctgcagaccgaagccgtgaccctgcaggacgtgagaggccgggactaccagaacgccatgcgggtgtggtccaacatccctggactgaaaagcaagcacgcacctctgacccctaaagaagaggagtacctgcaggcccaggtgcggagcagaagcaagctggacgcccctaaggtggatctgctggtgaagaattgcctcctgcccctgagagagtacttcaagtatttcagccagaatagtctgcccctgggaggcagcggcggcggcctgctgaccttcgaggacgtggccgtgttcttcagcgaggaggagtggaagctgctgaaccccacccagaagatcctgtacagcgacgtgatgcaggagaactacgagaccgtgatcagcctgggcctgaagctgaagaacgacaccggcaacgaccagcccatcagcctgagcaccctggagctgcaggccagcggctgcaaggtgctgaggaaggccagggtgaaggtggcccagaagaccggcggcccaagcagcggcgcccctcctcccagcggcggcagcccagccggctccccaacctctaccgaggagggcacctctgagtccgccacccccgagagcggccctggcacctccaccgagcccagcgagggcagcgcacccggcagccctgccggcagccccacctccacagaggagggaaccagcaccgagcccagcgaaggcagcgccccaggcaccagcaccgagcctagtgagcaggagattaaacggatcaacaagatcagaagaagacttgtgaaagacagcaacaccaagaaggccggcaagacaggccccatgaaaaccctgctggttagagtgatgacacccgatctgagagagcggctggaaaacctgagaaagaagcctgaaaatatcccccagcccatcagcaatacatctagagccaacctgaataagctgctgaccgattacaccgaaatgaagaaggcgatcctgcatgtgtactgggaagagttccagaaggaccctgtgggcctgatgagccgggtggcccagcctgccagcaagaagatcgatcagaacaagctgaaacctgagatggacgagaagggcaacctgaccaccgccggctttgcctgctctcagtgtggccagcccctgttcgtgtacaagctggagcaggtgtctgagaagggcaaggcttacaccaactacttcggacggtgcaatgtggccgagcacgaaaagctgatcctgctggcccagctgaagcccgagaaggatagcgacgaagccgtgacatatagcctgggaaagtttgggcagagggccctggatttctacagcattcatgtgaccaaggagtccacccaccccgtgaagcccctggcccagatcgccggaaacagatacgcctccggacctgtgggaaaggccctgagcgacgcatgtatgggcacaatcgcctccttcctgtctaagtaccaggacatcatcatcgaacaccagaaggtggtgaagggcaaccagaagagactggagagcctgcgggagctggccggcaaggaaaacctggaataccctagcgtgaccctgccacctcagcctcacaccaaggagggcgttgatgcctacaacgaagtgatcgcccgggtgcgaatgtgggtgaacctgaacctgtggcagaagctgaagctaagcagagatgatgccaagcctctgctgagactgaagggattcccttcctttcctctggtcgagagacaggccaacgaagtggactggtgggacatggtgtgtaacgtgaagaagctgatcaacgagaaaaaggaggatggcaaggtgttttggcagaatctggctggctacaagagacaggaagccctgagaccatacctgagcagcgaggaagatcggaagaagggaaagaaattcgctcggtaccagctgggcgacctgctgctgcacctggaaaagaagcacggcgaggactggggaaaggtgtacgacgaggcctgggagcggattgacaagaaagtggaaggcctgagcaagcacatcaagctggaagaggaacggagaagcgaggacgcccagagcaaggccgccctgaccgactggctgcgggctaaggccagcttcgtgatcgagggcctgaaggaggccgacaaggacgagttctgcagatgcgagctgaagctgcagaagtggtacggggacctgcggggaaagcccttcgccatcgaagccgagaacagcatcctggacatcagcggcttcagcaagcagtacaactgtgccttcatctggcagaaggacggcgtgaagaagctgaacctgtacctgatcatcaactacttcaagggcggcaagctgcggttcaagaagatcaaacctgaagccttcgaagccaacagattctacaccgtgatcaacaaaaagagcggcgagatcgtgcccatggaggtgaacttcaacttcgacgaccccaacctgatcatcctgcctctggcctttggcaagagacagggcagagaattcatctggaacgacctgctgtccctggaaaccggcagcctgaagctggccaacggaagagtgatcgagaagacactgtacaacagaagaacccggcaggatgagcctgccctgttcgtggccctgaccttcgagcggcgggaggtcctggactcctccaatatcaaaccaatgaacctgatcggcgtggcaagaggcgaaaacatccccgccgtgatcgccctgaccgaccccgagggctgcccactgagccggtttaaggatagcctgggaaacccaacccacatcctgagaatcggcgagagctataaggagaagcagcggaccatccaggccaagaaggaggtggagcagcggagagccggcggctacagccggaagtacgccagcaaagccaagaatctggcagacgatatggtgagaaacaccgctagagatctgctgtactacgccgtgacccaggatgccatgctgatcttcgccaacctgagccggggcttcggccggcagggcaagcggaccttcatggccgagagacagtacacacggatggaggactggctgaccgccaagctggcctacgagggcctgagcaagacctacctgtccaagacactggcccagtacacctccaagacatgcagcaactgtgggtttaccatcaccagcgccgactacgacagggtgctggagaagctgaagaagacagcaacaggctggatgaccacaattaacggcaaggagctgaaggtggagggccagattacctactacaacagatacaagagacagaacgtagtcaaggacctgtccgtcgagctggatagactgagcgaagaatctgtgaacaacgacatctcctcctggacaaagggcagaagcggagaagctctgagcctcctgaagaaaagattctcccatagacccgtgcaggagaagttcgtgtgcctgaactgcggcttcgagacacacgcagccgagcaagccgccctgaacatcgccagatcctggctgttcctgcggagccaggagtacaagaaataccagacaaacaagacaaccggcaacaccgataagagagccttcgtcgagacctggcagtccttttaccggaagaagcttaaggaggtgtggaaacctgccgtgcggtctggcggatctggcggaggctccaccagccccaagaaaaagagaaaagtctaagctgccttctgcggggcttgccttctggccatgcccttcttctctcccttgcacctgtacctcttggtctttgaataaagcctgagtaggaaggctagcaaaaaaaaaaaaaaaaaaaaaaaaaaaaaaaaaaaaaaaaaaaaaaaaaaaaaaaaaaaaaaaaaaaaaaaaaaaaaaaa

SEQ ID NO: 13649 - RNA, 5785 nt, synthetic construct
  source 1..5785: mol_type = other RNA
aggaaataagagagaaaagaagagtaagaagaaatataagagccaccatggcccctaagaagaagcgtaaagtgagccggatggaacgcctcgtctacgaggtgcggcagaagtgcagaaacatcgaggacatctgcatctcctgcggatctctgaacgtgaccctggagcacccactgttcatcggcggcatgtgccagaactgtaaaaactgttttctggagtgtgcctatcaatacgacgatgacggctaccagagctactgcaccatctgttgcggcggaagagaggtgctgatgtgtggaaataacaactgctgccggtgcttctgcgtggaatgcgtggacctgctggtgggccccggcgccgcccaggccgctattaaggaagatccttggaactgctacatgtgcggccacaagggcacatacggcctgctgagacggagagaggactggcctagcagactgcagatgttcttcgccaataaccacgaccaggagttcgacccccctaaggtgtaccctcccgtccccgccgagaagagaaagcccatccgggtcctgagcctgttcgatggcatcgccaccggtctgctggtgctgaaggacctgggcatccaggtggataggtacattgcctccgaggtgtgcgaggactccatcaccgtgggaatggtgcgtcatcagggcaagatcatgtacgtgggcgacgtgcggagcgtgacacagaagcatatccaggagtggggccctttcgacctggtgatcggcggcagcccttgcaatgacctgagcatcgtgaacccagcccggaagggcctgtacgagggaaccggcagactgttcttcgagttttacagactgctgcacgacgcccggcctaaggaaggcgacgaccggcccttcttttggctgttcgagaatgtggtggccatgggagtcagcgacaagcgggatattagccggttcctggagagcaaccccgtgatgatcgatgccaaggaagtgagcgccgcccaccgggccagatacttctggggcaatctgcctggcatgaacagacccctggccagcaccgtgaacgacaagctggagctgcaggagtgcctggagcacggccggatcgccaagttcagcaaggtgagaaccatcaccacccgaagcaacagcatcaaacaaggcaaggaccagcactttcctgtgttcatgaacgagaaggaggacatcctgtggtgtaccgagatggagagagtgttcgggttcccagtccactacacagatgtcagcaacatgtctagactggccagacagagactgctgggaagaagctggtccgtccctgtgatcagacacctgttcgcccctctgaaggagtacttcgcctgcgtgagcagcggcaacagcaacgccaacagccggggccccagcttctctagcggcctggtgccactgtccctgagagggagccacatgggccccatggagatctacaaaaccgtgagcgcctggaagcggcagcctgtgcgcgtgctgagcctgtttcggaatatcgataaagtcctgaaaagcctgggattcctggagagcggctctggctccggcggtggcaccctgaagtacgtggaggatgtgacaaacgtggtcagacgggatgtggagaagtggggccccttcgatctggtgtacggcagcacccaacccctgggcagctcttgtgaccggtgccctggctggtacatgtttcagttccaccggatcctgcagtacgccctgccgagacaggagtcccagcggccattcttttggattttcatggacaacttgctgctgaccgaggatgaccaggaaactaccactcggttcctgcagaccgaagccgtgaccctgcaggacgtgagaggccgggactaccagaacgccatgcgggtgtggtccaacatccctggactgaaaagcaagcacgcacctctgacccctaaagaagaggagtacctgcaggcccaggtgcggagcagaagcaagctggacgcccctaaggtggatctgctggtgaagaattgcctcctgcccctgagagagtacttcaagtatttcagccagaatagtctgcccctgggaggcagcggcggcggctggaaggagctgctgagcttcgaggacgtggccctgttcttcaccagggaggagtggaaccagctggactgggcccagaaggacctgtacagggacgtgatgctggagaactacaggaacctgatcctgctgggcttccagttccccaagcccgaggtgatctgccagctggagcagtgggaggagccctggatcctggacctgcccagggccggcaccaggaaggccagcggcagcgcctgcggcggcccaagcagcggcgcccctcctcccagcggcggcagcccagccggctccccaacctctaccgaggagggcacctctgagtccgccacccccgagagcggccctggcacctccaccgagcccagcgagggcagcgcacccggcagccctgccggcagccccacctccacagaggagggaaccagcaccgagcccagcgaaggcagcgccccaggcaccagcaccgagcctagtgagcaggagattaaacggatcaacaagatcagaagaagacttgtgaaagacagcaacaccaagaaggccggcaagacaggccccatgaaaaccctgctggttagagtgatgacacccgatctgagagagcggctggaaaacctgagaaagaagcctgaaaatatcccccagcccatcagcaatacatctagagccaacctgaataagctgctgaccgattacaccgaaatgaagaaggcgatcctgcatgtgtactgggaagagttccagaaggaccctgtgggcctgatgagccgggtggcccagcctgccagcaagaagatcgatcagaacaagctgaaacctgagatggacgagaagggcaacctgaccaccgccggctttgcctgctctcagtgtggccagcccctgttcgtgtacaagctggagcaggtgtctgagaagggcaaggcttacaccaactacttcggacggtgcaatgtggccgagcacgaaaagctgatcctgctggcccagctgaagcccgagaaggatagcgacgaagccgtgacatatagcctgggaaagtttgggcagagggccctggatttctacagcattcatgtgaccaaggagtccacccaccccgtgaagcccctggcccagatcgccggaaacagatacgcctccggacctgtgggaaaggccctgagcgacgcatgtatgggcacaatcgcctccttcctgtctaagtaccaggacatcatcatcgaacaccagaaggtggtgaagggcaaccagaagagactggagagcctgcgggagctggccggcaaggaaaacctggaataccctagcgtgaccctgccacctcagcctcacaccaaggagggcgttgatgcctacaacgaagtgatcgcccgggtgcgaatgtgggtgaacctgaacctgtggcagaagctgaagctaagcagagatgatgccaagcctctgctgagactgaagggattcccttcctttcctctggtcgagagacaggccaacgaagtggactggtgggacatggtgtgtaacgtgaagaagctgatcaacgagaaaaaggaggatggcaaggtgttttggcagaatctggctggctacaagagacaggaagccctgagaccatacctgagcagcgaggaagatcggaagaagggaaagaaattcgctcggtaccagctgggcgacctgctgctgcacctggaaaagaagcacggcgaggactggggaaaggtgtacgacgaggcctgggagcggattgacaagaaagtggaaggcctgagcaagcacatcaagctggaagaggaacggagaagcgaggacgcccagagcaaggccgccctgaccgactggctgcgggctaaggccagcttcgtgatcgagggcctgaaggaggccgacaaggacgagttctgcagatgcgagctgaagctgcagaagtggtacggggacctgcggggaaagcccttcgccatcgaagccgagaacagcatcctggacatcagcggcttcagcaagcagtacaactgtgccttcatctggcagaaggacggcgtgaagaagctgaacctgtacctgatcatcaactacttcaagggcggcaagctgcggttcaagaagatcaaacctgaagccttcgaagccaacagattctacaccgtgatcaacaaaaagagcggcgagatcgtgcccatggaggtgaacttcaacttcgacgaccccaacctgatcatcctgcctctggcctttggcaagagacagggcagagaattcatctggaacgacctgctgtccctggaaaccggcagcctgaagctggccaacggaagagtgatcgagaagacactgtacaacagaagaacccggcaggatgagcctgccctgttcgtggccctgaccttcgagcggcgggaggtcctggactcctccaatatcaaaccaatgaacctgatcggcgtggcaagaggcgaaaacatccccgccgtgatcgccctgaccgaccccgagggctgcccactgagccggtttaaggatagcctgggaaacccaacccacatcctgagaatcggcgagagctataaggagaagcagcggaccatccaggccaagaaggaggtggagcagcggagagccggcggctacagccggaagtacgccagcaaagccaagaatctggcagacgatatggtgagaaacaccgctagagatctgctgtactacgccgtgacccaggatgccatgctgatcttcgccaacctgagccggggcttcggccggcagggcaagcggaccttcatggccgagagacagtacacacggatggaggactggctgaccgccaagctggcctacgagggcctgagcaagacctacctgtccaagacactggcccagtacacctccaagacatgcagcaactgtgggtttaccatcaccagcgccgactacgacagggtgctggagaagctgaagaagacagcaacaggctggatgaccacaattaacggcaaggagctgaaggtggagggccagattacctactacaacagatacaagagacagaacgtagtcaaggacctgtccgtcgagctggatagactgagcgaagaatctgtgaacaacgacatctcctcctggacaaagggcagaagcggagaagctctgagcctcctgaagaaaagattctcccatagacccgtgcaggagaagttcgtgtgcctgaactgcggcttcgagacacacgcagccgagcaagccgccctgaacatcgccagatcctggctgttcctgcggagccaggagtacaagaaataccagacaaacaagacaaccggcaacaccgataagagagccttcgtcgagacctggcagtccttttaccggaagaagcttaaggaggtgtggaaacctgccgtgcggtctggcggatctggcggaggctccaccagccccaagaaaaagagaaaagtctaagctgccttctgcggggcttgccttctggccatgcccttcttctctcccttgcacctgtacctcttggtctttgaataaagcctgagtaggaaggctagcaaaaaaaaaaaaaaaaaaaaaaaaaaaaaaaaaaaaaaaaaaaaaaaaaaaaaaaaaaaaaaaaaaaaaaaaaaaaaaaa

SEQ ID NO: 13650 - RNA, 5785 nt, synthetic construct
  source 1..5785: mol_type = other RNA
aggaaataagagagaaaagaagagtaagaagaaatataagagccaccatggcccctaagaagaagcgtaaagtgagccggatggaacgcctcgtctacgaggtgcggcagaagtgcagaaacatcgaggacatctgcatctcctgcggatctctgaacgtgaccctggagcacccactgttcatcggcggcatgtgccagaactgtaaaaactgttttctggagtgtgcctatcaatacgacgatgacggctaccagagctactgcaccatctgttgcggcggaagagaggtgctgatgtgtggaaataacaactgctgccggtgcttctgcgtggaatgcgtggacctgctggtgggccccggcgccgcccaggccgctattaaggaagatccttggaactgctacatgtgcggccacaagggcacatacggcctgctgagacggagagaggactggcctagcagactgcagatgttcttcgccaataaccacgaccaggagttcgacccccctaaggtgtaccctcccgtccccgccgagaagagaaagcccatccgggtcctgagcctgttcgatggcatcgccaccggtctgctggtgctgaaggacctgggcatccaggtggataggtacattgcctccgaggtgtgcgaggactccatcaccgtgggaatggtgcgtcatcagggcaagatcatgtacgtgggcgacgtgcggagcgtgacacagaagcatatccaggagtggggccctttcgacctggtgatcggcggcagcccttgcaatgacctgagcatcgtgaacccagcccggaagggcctgtacgagggaaccggcagactgttcttcgagttttacagactgctgcacgacgcccggcctaaggaaggcgacgaccggcccttcttttggctgttcgagaatgtggtggccatgggagtcagcgacaagcgggatattagccggttcctggagagcaaccccgtgatgatcgatgccaaggaagtgagcgccgcccaccgggccagatacttctggggcaatctgcctggcatgaacagacccctggccagcaccgtgaacgacaagctggagctgcaggagtgcctggagcacggccggatcgccaagttcagcaaggtgagaaccatcaccacccgaagcaacagcatcaaacaaggcaaggaccagcactttcctgtgttcatgaacgagaaggaggacatcctgtggtgtaccgagatggagagagtgttcgggttcccagtccactacacagatgtcagcaacatgtctagactggccagacagagactgctgggaagaagctggtccgtccctgtgatcagacacctgttcgcccctctgaaggagtacttcgcctgcgtgagcagcggcaacagcaacgccaacagccggggccccagcttctctagcggcctggtgccactgtccctgagagggagccacatgggccccatggagatctacaaaaccgtgagcgcctggaagcggcagcctgtgcgcgtgctgagcctgtttcggaatatcgataaagtcctgaaaagcctgggattcctggagagcggctctggctccggcggtggcaccctgaagtacgtggaggatgtgacaaacgtggtcagacgggatgtggagaagtggggccccttcgatctggtgtacggcagcacccaacccctgggcagctcttgtgaccggtgccctggctggtacatgtttcagttccaccggatcctgcagtacgccctgccgagacaggagtcccagcggccattcttttggattttcatggacaacttgctgctgaccgaggatgaccaggaaactaccactcggttcctgcagaccgaagccgtgaccctgcaggacgtgagaggccgggactaccagaacgccatgcgggtgtggtccaacatccctggactgaaaagcaagcacgcacctctgacccctaaagaagaggagtacctgcaggcccaggtgcggagcagaagcaagctggacgcccctaaggtggatctgctggtgaagaattgcctcctgcccctgagagagtacttcaagtatttcagccagaatagtctgcccctgggaggcagcggcggcggccagggcctgctgaccttcggcgacgtggccatcgagttcagccaggaggagtggaggtgcctgagccacacccagagggagctgtacagggacgtgatgctggagaactacggccacctgctgttcctgggcctgatcgtgagcaagcccgacctggtgagcctgctggagcagaggaaggagccctgggacgtgaagaggaagaagaccgtggtgttcgaccccgccgtgagcagccacggcggcggcccaagcagcggcgcccctcctcccagcggcggcagcccagccggctccccaacctctaccgaggagggcacctctgagtccgccacccccgagagcggccctggcacctccaccgagcccagcgagggcagcgcacccggcagccctgccggcagccccacctccacagaggagggaaccagcaccgagcccagcgaaggcagcgccccaggcaccagcaccgagcctagtgagcaggagattaaacggatcaacaagatcagaagaagacttgtgaaagacagcaacaccaagaaggccggcaagacaggccccatgaaaaccctgctggttagagtgatgacacccgatctgagagagcggctggaaaacctgagaaagaagcctgaaaatatcccccagcccatcagcaatacatctagagccaacctgaataagctgctgaccgattacaccgaaatgaagaaggcgatcctgcatgtgtactgggaagagttccagaaggaccctgtgggcctgatgagccgggtggcccagcctgccagcaagaagatcgatcagaacaagctgaaacctgagatggacgagaagggcaacctgaccaccgccggctttgcctgctctcagtgtggccagcccctgttcgtgtacaagctggagcaggtgtctgagaagggcaaggcttacaccaactacttcggacggtgcaatgtggccgagcacgaaaagctgatcctgctggcccagctgaagcccgagaaggatagcgacgaagccgtgacatatagcctgggaaagtttgggcagagggccctggatttctacagcattcatgtgaccaaggagtccacccaccccgtgaagcccctggcccagatcgccggaaacagatacgcctccggacctgtgggaaaggccctgagcgacgcatgtatgggcacaatcgcctccttcctgtctaagtaccaggacatcatcatcgaacaccagaaggtggtgaagggcaaccagaagagactggagagcctgcgggagctggccggcaaggaaaacctggaataccctagcgtgaccctgccacctcagcctcacaccaaggagggcgttgatgcctacaacgaagtgatcgcccgggtgcgaatgtgggtgaacctgaacctgtggcagaagctgaagctaagcagagatgatgccaagcctctgctgagactgaagggattcccttcctttcctctggtcgagagacaggccaacgaagtggactggtgggacatggtgtgtaacgtgaagaagctgatcaacgagaaaaaggaggatggcaaggtgttttggcagaatctggctggctacaagagacaggaagccctgagaccatacctgagcagcgaggaagatcggaagaagggaaagaaattcgctcggtaccagctgggcgacctgctgctgcacctggaaaagaagcacggcgaggactggggaaaggtgtacgacgaggcctgggagcggattgacaagaaagtggaaggcctgagcaagcacatcaagctggaagaggaacggagaagcgaggacgcccagagcaaggccgccctgaccgactggctgcgggctaaggccagcttcgtgatcgagggcctgaaggaggccgacaaggacgagttctgcagatgcgagctgaagctgcagaagtggtacggggacctgcggggaaagcccttcgccatcgaagccgagaacagcatcctggacatcagcggcttcagcaagcagtacaactgtgccttcatctggcagaaggacggcgtgaagaagctgaacctgtacctgatcatcaactacttcaagggcggcaagctgcggttcaagaagatcaaacctgaagccttcgaagccaacagattctacaccgtgatcaacaaaaagagcggcgagatcgtgcccatggaggtgaacttcaacttcgacgaccccaacctgatcatcctgcctctggcctttggcaagagacagggcagagaattcatctggaacgacctgctgtccctggaaaccggcagcctgaagctggccaacggaagagtgatcgagaagacactgtacaacagaagaacccggcaggatgagcctgccctgttcgtggccctgaccttcgagcggcgggaggtcctggactcctccaatatcaaaccaatgaacctgatcggcgtggcaagaggcgaaaacatccccgccgtgatcgccctgaccgaccccgagggctgcccactgagccggtttaaggatagcctgggaaacccaacccacatcctgagaatcggcgagagctataaggagaagcagcggaccatccaggccaagaaggaggtggagcagcggagagccggcggctacagccggaagtacgccagcaaagccaagaatctggcagacgatatggtgagaaacaccgctagagatctgctgtactacgccgtgacccaggatgccatgctgatcttcgccaacctgagccggggcttcggccggcagggcaagcggaccttcatggccgagagacagtacacacggatggaggactggctgaccgccaagctggcctacgagggcctgagcaagacctacctgtccaagacactggcccagtacacctccaagacatgcagcaactgtgggtttaccatcaccagcgccgactacgacagggtgctggagaagctgaagaagacagcaacaggctggatgaccacaattaacggcaaggagctgaaggtggagggccagattacctactacaacagatacaagagacagaacgtagtcaaggacctgtccgtcgagctggatagactgagcgaagaatctgtgaacaacgacatctcctcctggacaaagggcagaagcggagaagctctgagcctcctgaagaaaagattctcccatagacccgtgcaggagaagttcgtgtgcctgaactgcggcttcgagacacacgcagccgagcaagccgccctgaacatcgccagatcctggctgttcctgcggagccaggagtacaagaaataccagacaaacaagacaaccggcaacaccgataagagagccttcgtcgagacctggcagtccttttaccggaagaagcttaaggaggtgtggaaacctgccgtgcggtctggcggatctggcggaggctccaccagccccaagaaaaagagaaaagtctaagctgccttctgcggggcttgccttctggccatgcccttcttctctcccttgcacctgtacctcttggtctttgaataaagcctgagtaggaaggctagcaaaaaaaaaaaaaaaaaaaaaaaaaaaaaaaaaaaaaaaaaaaaaaaaaaaaaaaaaaaaaaaaaaaaaaaaaaaaaaaa

SEQ ID NO: 13651 - RNA, 5785 nt, synthetic construct
  source 1..5785: mol_type = other RNA
aggaaataagagagaaaagaagagtaagaagaaatataagagccaccatggcccctaagaagaagcgtaaagtgagccggatggaacgcctcgtctacgaggtgcggcagaagtgcagaaacatcgaggacatctgcatctcctgcggatctctgaacgtgaccctggagcacccactgttcatcggcggcatgtgccagaactgtaaaaactgttttctggagtgtgcctatcaatacgacgatgacggctaccagagctactgcaccatctgttgcggcggaagagaggtgctgatgtgtggaaataacaactgctgccggtgcttctgcgtggaatgcgtggacctgctggtgggccccggcgccgcccaggccgctattaaggaagatccttggaactgctacatgtgcggccacaagggcacatacggcctgctgagacggagagaggactggcctagcagactgcagatgttcttcgccaataaccacgaccaggagttcgacccccctaaggtgtaccctcccgtccccgccgagaagagaaagcccatccgggtcctgagcctgttcgatggcatcgccaccggtctgctggtgctgaaggacctgggcatccaggtggataggtacattgcctccgaggtgtgcgaggactccatcaccgtgggaatggtgcgtcatcagggcaagatcatgtacgtgggcgacgtgcggagcgtgacacagaagcatatccaggagtggggccctttcgacctggtgatcggcggcagcccttgcaatgacctgagcatcgtgaacccagcccggaagggcctgtacgagggaaccggcagactgttcttcgagttttacagactgctgcacgacgcccggcctaaggaaggcgacgaccggcccttcttttggctgttcgagaatgtggtggccatgggagtcagcgacaagcgggatattagccggttcctggagagcaaccccgtgatgatcgatgccaaggaagtgagcgccgcccaccgggccagatacttctggggcaatctgcctggcatgaacagacccctggccagcaccgtgaacgacaagctggagctgcaggagtgcctggagcacggccggatcgccaagttcagcaaggtgagaaccatcaccacccgaagcaacagcatcaaacaaggcaaggaccagcactttcctgtgttcatgaacgagaaggaggacatcctgtggtgtaccgagatggagagagtgttcgggttcccagtccactacacagatgtcagcaacatgtctagactggccagacagagactgctgggaagaagctggtccgtccctgtgatcagacacctgttcgcccctctgaaggagtacttcgcctgcgtgagcagcggcaacagcaacgccaacagccggggccccagcttctctagcggcctggtgccactgtccctgagagggagccacatgggccccatggagatctacaaaaccgtgagcgcctggaagcggcagcctgtgcgcgtgctgagcctgtttcggaatatcgataaagtcctgaaaagcctgggattcctggagagcggctctggctccggcggtggcaccctgaagtacgtggaggatgtgacaaacgtggtcagacgggatgtggagaagtggggccccttcgatctggtgtacggcagcacccaacccctgggcagctcttgtgaccggtgccctggctggtacatgtttcagttccaccggatcctgcagtacgccctgccgagacaggagtcccagcggccattcttttggattttcatggacaacttgctgctgaccgaggatgaccaggaaactaccactcggttcctgcagaccgaagccgtgaccctgcaggacgtgagaggccgggactaccagaacgccatgcgggtgtggtccaacatccctggactgaaaagcaagcacgcacctctgacccctaaagaagaggagtacctgcaggcccaggtgcggagcagaagcaagctggacgcccctaaggtggatctgctggtgaagaattgcctcctgcccctgagagagtacttcaagtatttcagccagaatagtctgcccctgggaggcagcggcggcggcgccaggggcctgatggccttcgaggacgtggccgtgtacttcagccaggaggagtggatgttcctgaacgccgcccagagggccctgtacaggcacgtgatgctggagaacttcgccctggtggacagcatcggccccagcgtgagcaggcccagggtgatcatccagctgcagaggggcgaggagccctgggtgcccaacaggaccatcgccggccccggcaggggcacccacaggaggagcggcggcccaagcagcggcgcccctcctcccagcggcggcagcccagccggctccccaacctctaccgaggagggcacctctgagtccgccacccccgagagcggccctggcacctccaccgagcccagcgagggcagcgcacccggcagccctgccggcagccccacctccacagaggagggaaccagcaccgagcccagcgaaggcagcgccccaggcaccagcaccgagcctagtgagcaggagattaaacggatcaacaagatcagaagaagacttgtgaaagacagcaacaccaagaaggccggcaagacaggccccatgaaaaccctgctggttagagtgatgacacccgatctgagagagcggctggaaaacctgagaaagaagcctgaaaatatcccccagcccatcagcaatacatctagagccaacctgaataagctgctgaccgattacaccgaaatgaagaaggcgatcctgcatgtgtactgggaagagttccagaaggaccctgtgggcctgatgagccgggtggcccagcctgccagcaagaagatcgatcagaacaagctgaaacctgagatggacgagaagggcaacctgaccaccgccggctttgcctgctctcagtgtggccagcccctgttcgtgtacaagctggagcaggtgtctgagaagggcaaggcttacaccaactacttcggacggtgcaatgtggccgagcacgaaaagctgatcctgctggcccagctgaagcccgagaaggatagcgacgaagccgtgacatatagcctgggaaagtttgggcagagggccctggatttctacagcattcatgtgaccaaggagtccacccaccccgtgaagcccctggcccagatcgccggaaacagatacgcctccggacctgtgggaaaggccctgagcgacgcatgtatgggcacaatcgcctccttcctgtctaagtaccaggacatcatcatcgaacaccagaaggtggtgaagggcaaccagaagagactggagagcctgcgggagctggccggcaaggaaaacctggaataccctagcgtgaccctgccacctcagcctcacaccaaggagggcgttgatgcctacaacgaagtgatcgcccgggtgcgaatgtgggtgaacctgaacctgtggcagaagctgaagctaagcagagatgatgccaagcctctgctgagactgaagggattcccttcctttcctctggtcgagagacaggccaacgaagtggactggtgggacatggtgtgtaacgtgaagaagctgatcaacgagaaaaaggaggatggcaaggtgttttggcagaatctggctggctacaagagacaggaagccctgagaccatacctgagcagcgaggaagatcggaagaagggaaagaaattcgctcggtaccagctgggcgacctgctgctgcacctggaaaagaagcacggcgaggactggggaaaggtgtacgacgaggcctgggagcggattgacaagaaagtggaaggcctgagcaagcacatcaagctggaagaggaacggagaagcgaggacgcccagagcaaggccgccctgaccgactggctgcgggctaaggccagcttcgtgatcgagggcctgaaggaggccgacaaggacgagttctgcagatgcgagctgaagctgcagaagtggtacggggacctgcggggaaagcccttcgccatcgaagccgagaacagcatcctggacatcagcggcttcagcaagcagtacaactgtgccttcatctggcagaaggacggcgtgaagaagctgaacctgtacctgatcatcaactacttcaagggcggcaagctgcggttcaagaagatcaaacctgaagccttcgaagccaacagattctacaccgtgatcaacaaaaagagcggcgagatcgtgcccatggaggtgaacttcaacttcgacgaccccaacctgatcatcctgcctctggcctttggcaagagacagggcagagaattcatctggaacgacctgctgtccctggaaaccggcagcctgaagctggccaacggaagagtgatcgagaagacactgtacaacagaagaacccggcaggatgagcctgccctgttcgtggccctgaccttcgagcggcgggaggtcctggactcctccaatatcaaaccaatgaacctgatcggcgtggcaagaggcgaaaacatccccgccgtgatcgccctgaccgaccccgagggctgcccactgagccggtttaaggatagcctgggaaacccaacccacatcctgagaatcggcgagagctataaggagaagcagcggaccatccaggccaagaaggaggtggagcagcggagagccggcggctacagccggaagtacgccagcaaagccaagaatctggcagacgatatggtgagaaacaccgctagagatctgctgtactacgccgtgacccaggatgccatgctgatcttcgccaacctgagccggggcttcggccggcagggcaagcggaccttcatggccgagagacagtacacacggatggaggactggctgaccgccaagctggcctacgagggcctgagcaagacctacctgtccaagacactggcccagtacacctccaagacatgcagcaactgtgggtttaccatcaccagcgccgactacgacagggtgctggagaagctgaagaagacagcaacaggctggatgaccacaattaacggcaaggagctgaaggtggagggccagattacctactacaacagatacaagagacagaacgtagtcaaggacctgtccgtcgagctggatagactgagcgaagaatctgtgaacaacgacatctcctcctggacaaagggcagaagcggagaagctctgagcctcctgaagaaaagattctcccatagacccgtgcaggagaagttcgtgtgcctgaactgcggcttcgagacacacgcagccgagcaagccgccctgaacatcgccagatcctggctgttcctgcggagccaggagtacaagaaataccagacaaacaagacaaccggcaacaccgataagagagccttcgtcgagacctggcagtccttttaccggaagaagcttaaggaggtgtggaaacctgccgtgcggtctggcggatctggcggaggctccaccagccccaagaaaaagagaaaagtctaagctgccttctgcggggcttgccttctggccatgcccttcttctctcccttgcacctgtacctcttggtctttgaataaagcctgagtaggaaggctagcaaaaaaaaaaaaaaaaaaaaaaaaaaaaaaaaaaaaaaaaaaaaaaaaaaaaaaaaaaaaaaaaaaaaaaaaaaaaaaaa

SEQ ID NO: 13652 - RNA, 5785 nt, synthetic construct
  source 1..5785: mol_type = other RNA
aggaaataagagagaaaagaagagtaagaagaaatataagagccaccatggcccctaagaagaagcgtaaagtgagccggatggaacgcctcgtctacgaggtgcggcagaagtgcagaaacatcgaggacatctgcatctcctgcggatctctgaacgtgaccctggagcacccactgttcatcggcggcatgtgccagaactgtaaaaactgttttctggagtgtgcctatcaatacgacgatgacggctaccagagctactgcaccatctgttgcggcggaagagaggtgctgatgtgtggaaataacaactgctgccggtgcttctgcgtggaatgcgtggacctgctggtgggccccggcgccgcccaggccgctattaaggaagatccttggaactgctacatgtgcggccacaagggcacatacggcctgctgagacggagagaggactggcctagcagactgcagatgttcttcgccaataaccacgaccaggagttcgacccccctaaggtgtaccctcccgtccccgccgagaagagaaagcccatccgggtcctgagcctgttcgatggcatcgccaccggtctgctggtgctgaaggacctgggcatccaggtggataggtacattgcctccgaggtgtgcgaggactccatcaccgtgggaatggtgcgtcatcagggcaagatcatgtacgtgggcgacgtgcggagcgtgacacagaagcatatccaggagtggggccctttcgacctggtgatcggcggcagcccttgcaatgacctgagcatcgtgaacccagcccggaagggcctgtacgagggaaccggcagactgttcttcgagttttacagactgctgcacgacgcccggcctaaggaaggcgacgaccggcccttcttttggctgttcgagaatgtggtggccatgggagtcagcgacaagcgggatattagccggttcctggagagcaaccccgtgatgatcgatgccaaggaagtgagcgccgcccaccgggccagatacttctggggcaatctgcctggcatgaacagacccctggccagcaccgtgaacgacaagctggagctgcaggagtgcctggagcacggccggatcgccaagttcagcaaggtgagaaccatcaccacccgaagcaacagcatcaaacaaggcaaggaccagcactttcctgtgttcatgaacgagaaggaggacatcctgtggtgtaccgagatggagagagtgttcgggttcccagtccactacacagatgtcagcaacatgtctagactggccagacagagactgctgggaagaagctggtccgtccctgtgatcagacacctgttcgcccctctgaaggagtacttcgcctgcgtgagcagcggcaacagcaacgccaacagccggggccccagcttctctagcggcctggtgccactgtccctgagagggagccacatgggccccatggagatctacaaaaccgtgagcgcctggaagcggcagcctgtgcgcgtgctgagcctgtttcggaatatcgataaagtcctgaaaagcctgggattcctggagagcggctctggctccggcggtggcaccctgaagtacgtggaggatgtgacaaacgtggtcagacgggatgtggagaagtggggccccttcgatctggtgtacggcagcacccaacccctgggcagctcttgtgaccggtgccctggctggtacatgtttcagttccaccggatcctgcagtacgccctgccgagacaggagtcccagcggccattcttttggattttcatggacaacttgctgctgaccgaggatgaccaggaaactaccactcggttcctgcagaccgaagccgtgaccctgcaggacgtgagaggccgggactaccagaacgccatgcgggtgtggtccaacatccctggactgaaaagcaagcacgcacctctgacccctaaagaagaggagtacctgcaggcccaggtgcggagcagaagcaagctggacgcccctaaggtggatctgctggtgaagaattgcctcctgcccctgagagagtacttcaagtatttcagccagaatagtctgcccctgggaggcagcggcggcggcgcccaggagagcatgaccttcagggacgtggccgtgttcttcagccaggacgagtggctgcacctggacagcgcccagagggccctgtacagggaggtgatgctggagaactacagcaccctggtgagcctgggcatccccttcagcatgcccaaggtgatccaccagctgcagcagggccaggacccctgcaccgtggagggcgacgtgcccagcaacacctgcctgggcttcaagacctggggcggcccaagcagcggcgcccctcctcccagcggcggcagcccagccggctccccaacctctaccgaggagggcacctctgagtccgccacccccgagagcggccctggcacctccaccgagcccagcgagggcagcgcacccggcagccctgccggcagccccacctccacagaggagggaaccagcaccgagcccagcgaaggcagcgccccaggcaccagcaccgagcctagtgagcaggagattaaacggatcaacaagatcagaagaagacttgtgaaagacagcaacaccaagaaggccggcaagacaggccccatgaaaaccctgctggttagagtgatgacacccgatctgagagagcggctggaaaacctgagaaagaagcctgaaaatatcccccagcccatcagcaatacatctagagccaacctgaataagctgctgaccgattacaccgaaatgaagaaggcgatcctgcatgtgtactgggaagagttccagaaggaccctgtgggcctgatgagccgggtggcccagcctgccagcaagaagatcgatcagaacaagctgaaacctgagatggacgagaagggcaacctgaccaccgccggctttgcctgctctcagtgtggccagcccctgttcgtgtacaagctggagcaggtgtctgagaagggcaaggcttacaccaactacttcggacggtgcaatgtggccgagcacgaaaagctgatcctgctggcccagctgaagcccgagaaggatagcgacgaagccgtgacatatagcctgggaaagtttgggcagagggccctggatttctacagcattcatgtgaccaaggagtccacccaccccgtgaagcccctggcccagatcgccggaaacagatacgcctccggacctgtgggaaaggccctgagcgacgcatgtatgggcacaatcgcctccttcctgtctaagtaccaggacatcatcatcgaacaccagaaggtggtgaagggcaaccagaagagactggagagcctgcgggagctggccggcaaggaaaacctggaataccctagcgtgaccctgccacctcagcctcacaccaaggagggcgttgatgcctacaacgaagtgatcgcccgggtgcgaatgtgggtgaacctgaacctgtggcagaagctgaagctaagcagagatgatgccaagcctctgctgagactgaagggattcccttcctttcctctggtcgagagacaggccaacgaagtggactggtgggacatggtgtgtaacgtgaagaagctgatcaacgagaaaaaggaggatggcaaggtgttttggcagaatctggctggctacaagagacaggaagccctgagaccatacctgagcagcgaggaagatcggaagaagggaaagaaattcgctcggtaccagctgggcgacctgctgctgcacctggaaaagaagcacggcgaggactggggaaaggtgtacgacgaggcctgggagcggattgacaagaaagtggaaggcctgagcaagcacatcaagctggaagaggaacggagaagcgaggacgcccagagcaaggccgccctgaccgactggctgcgggctaaggccagcttcgtgatcgagggcctgaaggaggccgacaaggacgagttctgcagatgcgagctgaagctgcagaagtggtacggggacctgcggggaaagcccttcgccatcgaagccgagaacagcatcctggacatcagcggcttcagcaagcagtacaactgtgccttcatctggcagaaggacggcgtgaagaagctgaacctgtacctgatcatcaactacttcaagggcggcaagctgcggttcaagaagatcaaacctgaagccttcgaagccaacagattctacaccgtgatcaacaaaaagagcggcgagatcgtgcccatggaggtgaacttcaacttcgacgaccccaacctgatcatcctgcctctggcctttggcaagagacagggcagagaattcatctggaacgacctgctgtccctggaaaccggcagcctgaagctggccaacggaagagtgatcgagaagacactgtacaacagaagaacccggcaggatgagcctgccctgttcgtggccctgaccttcgagcggcgggaggtcctggactcctccaatatcaaaccaatgaacctgatcggcgtggcaagaggcgaaaacatccccgccgtgatcgccctgaccgaccccgagggctgcccactgagccggtttaaggatagcctgggaaacccaacccacatcctgagaatcggcgagagctataaggagaagcagcggaccatccaggccaagaaggaggtggagcagcggagagccggcggctacagccggaagtacgccagcaaagccaagaatctggcagacgatatggtgagaaacaccgctagagatctgctgtactacgccgtgacccaggatgccatgctgatcttcgccaacctgagccggggcttcggccggcagggcaagcggaccttcatggccgagagacagtacacacggatggaggactggctgaccgccaagctggcctacgagggcctgagcaagacctacctgtccaagacactggcccagtacacctccaagacatgcagcaactgtgggtttaccatcaccagcgccgactacgacagggtgctggagaagctgaagaagacagcaacaggctggatgaccacaattaacggcaaggagctgaaggtggagggccagattacctactacaacagatacaagagacagaacgtagtcaaggacctgtccgtcgagctggatagactgagcgaagaatctgtgaacaacgacatctcctcctggacaaagggcagaagcggagaagctctgagcctcctgaagaaaagattctcccatagacccgtgcaggagaagttcgtgtgcctgaactgcggcttcgagacacacgcagccgagcaagccgccctgaacatcgccagatcctggctgttcctgcggagccaggagtacaagaaataccagacaaacaagacaaccggcaacaccgataagagagccttcgtcgagacctggcagtccttttaccggaagaagcttaaggaggtgtggaaacctgccgtgcggtctggcggatctggcggaggctccaccagccccaagaaaaagagaaaagtctaagctgccttctgcggggcttgccttctggccatgcccttcttctctcccttgcacctgtacctcttggtctttgaataaagcctgagtaggaaggctagcaaaaaaaaaaaaaaaaaaaaaaaaaaaaaaaaaaaaaaaaaaaaaaaaaaaaaaaaaaaaaaaaaaaaaaaaaaaaaaaa

SEQ ID NO: 13653 - RNA, 5785 nt, synthetic construct
  source 1..5785: mol_type = other RNA
aggaaataagagagaaaagaagagtaagaagaaatataagagccaccatggcccctaagaagaagcgtaaagtgagccggatggaacgcctcgtctacgaggtgcggcagaagtgcagaaacatcgaggacatctgcatctcctgcggatctctgaacgtgaccctggagcacccactgttcatcggcggcatgtgccagaactgtaaaaactgttttctggagtgtgcctatcaatacgacgatgacggctaccagagctactgcaccatctgttgcggcggaagagaggtgctgatgtgtggaaataacaactgctgccggtgcttctgcgtggaatgcgtggacctgctggtgggccccggcgccgcccaggccgctattaaggaagatccttggaactgctacatgtgcggccacaagggcacatacggcctgctgagacggagagaggactggcctagcagactgcagatgttcttcgccaataaccacgaccaggagttcgacccccctaaggtgtaccctcccgtccccgccgagaagagaaagcccatccgggtcctgagcctgttcgatggcatcgccaccggtctgctggtgctgaaggacctgggcatccaggtggataggtacattgcctccgaggtgtgcgaggactccatcaccgtgggaatggtgcgtcatcagggcaagatcatgtacgtgggcgacgtgcggagcgtgacacagaagcatatccaggagtggggccctttcgacctggtgatcggcggcagcccttgcaatgacctgagcatcgtgaacccagcccggaagggcctgtacgagggaaccggcagactgttcttcgagttttacagactgctgcacgacgcccggcctaaggaaggcgacgaccggcccttcttttggctgttcgagaatgtggtggccatgggagtcagcgacaagcgggatattagccggttcctggagagcaaccccgtgatgatcgatgccaaggaagtgagcgccgcccaccgggccagatacttctggggcaatctgcctggcatgaacagacccctggccagcaccgtgaacgacaagctggagctgcaggagtgcctggagcacggccggatcgccaagttcagcaaggtgagaaccatcaccacccgaagcaacagcatcaaacaaggcaaggaccagcactttcctgtgttcatgaacgagaaggaggacatcctgtggtgtaccgagatggagagagtgttcgggttcccagtccactacacagatgtcagcaacatgtctagactggccagacagagactgctgggaagaagctggtccgtccctgtgatcagacacctgttcgcccctctgaaggagtacttcgcctgcgtgagcagcggcaacagcaacgccaacagccggggccccagcttctctagcggcctggtgccactgtccctgagagggagccacatgggccccatggagatctacaaaaccgtgagcgcctggaagcggcagcctgtgcgcgtgctgagcctgtttcggaatatcgataaagtcctgaaaagcctgggattcctggagagcggctctggctccggcggtggcaccctgaagtacgtggaggatgtgacaaacgtggtcagacgggatgtggagaagtggggccccttcgatctggtgtacggcagcacccaacccctgggcagctcttgtgaccggtgccctggctggtacatgtttcagttccaccggatcctgcagtacgccctgccgagacaggagtcccagcggccattcttttggattttcatggacaacttgctgctgaccgaggatgaccaggaaactaccactcggttcctgcagaccgaagccgtgaccctgcaggacgtgagaggccgggactaccagaacgccatgcgggtgtggtccaacatccctggactgaaaagcaagcacgcacctctgacccctaaagaagaggagtacctgcaggcccaggtgcggagcagaagcaagctggacgcccctaaggtggatctgctggtgaagaattgcctcctgcccctgagagagtacttcaagtatttcagccagaatagtctgcccctgggaggcagcggcggcggcccccagggctgcgccatcagcgaggacgtgttcgtgtacttcagcagggaggagtgggtgctgctggacgaggaccagaggctgctgtacagggacgtgatgctggagaacttcgccctgctggccagcctgggcatcaccagcagcaggagctacctggtgacccagctggagcagggcgaggagccctggatgcccgcccaggtggacatgaccgccgccaccgagaaggaggcccagaagggcggcccaagcagcggcgcccctcctcccagcggcggcagcccagccggctccccaacctctaccgaggagggcacctctgagtccgccacccccgagagcggccctggcacctccaccgagcccagcgagggcagcgcacccggcagccctgccggcagccccacctccacagaggagggaaccagcaccgagcccagcgaaggcagcgccccaggcaccagcaccgagcctagtgagcaggagattaaacggatcaacaagatcagaagaagacttgtgaaagacagcaacaccaagaaggccggcaagacaggccccatgaaaaccctgctggttagagtgatgacacccgatctgagagagcggctggaaaacctgagaaagaagcctgaaaatatcccccagcccatcagcaatacatctagagccaacctgaataagctgctgaccgattacaccgaaatgaagaaggcgatcctgcatgtgtactgggaagagttccagaaggaccctgtgggcctgatgagccgggtggcccagcctgccagcaagaagatcgatcagaacaagctgaaacctgagatggacgagaagggcaacctgaccaccgccggctttgcctgctctcagtgtggccagcccctgttcgtgtacaagctggagcaggtgtctgagaagggcaaggcttacaccaactacttcggacggtgcaatgtggccgagcacgaaaagctgatcctgctggcccagctgaagcccgagaaggatagcgacgaagccgtgacatatagcctgggaaagtttgggcagagggccctggatttctacagcattcatgtgaccaaggagtccacccaccccgtgaagcccctggcccagatcgccggaaacagatacgcctccggacctgtgggaaaggccctgagcgacgcatgtatgggcacaatcgcctccttcctgtctaagtaccaggacatcatcatcgaacaccagaaggtggtgaagggcaaccagaagagactggagagcctgcgggagctggccggcaaggaaaacctggaataccctagcgtgaccctgccacctcagcctcacaccaaggagggcgttgatgcctacaacgaagtgatcgcccgggtgcgaatgtgggtgaacctgaacctgtggcagaagctgaagctaagcagagatgatgccaagcctctgctgagactgaagggattcccttcctttcctctggtcgagagacaggccaacgaagtggactggtgggacatggtgtgtaacgtgaagaagctgatcaacgagaaaaaggaggatggcaaggtgttttggcagaatctggctggctacaagagacaggaagccctgagaccatacctgagcagcgaggaagatcggaagaagggaaagaaattcgctcggtaccagctgggcgacctgctgctgcacctggaaaagaagcacggcgaggactggggaaaggtgtacgacgaggcctgggagcggattgacaagaaagtggaaggcctgagcaagcacatcaagctggaagaggaacggagaagcgaggacgcccagagcaaggccgccctgaccgactggctgcgggctaaggccagcttcgtgatcgagggcctgaaggaggccgacaaggacgagttctgcagatgcgagctgaagctgcagaagtggtacggggacctgcggggaaagcccttcgccatcgaagccgagaacagcatcctggacatcagcggcttcagcaagcagtacaactgtgccttcatctggcagaaggacggcgtgaagaagctgaacctgtacctgatcatcaactacttcaagggcggcaagctgcggttcaagaagatcaaacctgaagccttcgaagccaacagattctacaccgtgatcaacaaaaagagcggcgagatcgtgcccatggaggtgaacttcaacttcgacgaccccaacctgatcatcctgcctctggcctttggcaagagacagggcagagaattcatctggaacgacctgctgtccctggaaaccggcagcctgaagctggccaacggaagagtgatcgagaagacactgtacaacagaagaacccggcaggatgagcctgccctgttcgtggccctgaccttcgagcggcgggaggtcctggactcctccaatatcaaaccaatgaacctgatcggcgtggcaagaggcgaaaacatccccgccgtgatcgccctgaccgaccccgagggctgcccactgagccggtttaaggatagcctgggaaacccaacccacatcctgagaatcggcgagagctataaggagaagcagcggaccatccaggccaagaaggaggtggagcagcggagagccggcggctacagccggaagtacgccagcaaagccaagaatctggcagacgatatggtgagaaacaccgctagagatctgctgtactacgccgtgacccaggatgccatgctgatcttcgccaacctgagccggggcttcggccggcagggcaagcggaccttcatggccgagagacagtacacacggatggaggactggctgaccgccaagctggcctacgagggcctgagcaagacctacctgtccaagacactggcccagtacacctccaagacatgcagcaactgtgggtttaccatcaccagcgccgactacgacagggtgctggagaagctgaagaagacagcaacaggctggatgaccacaattaacggcaaggagctgaaggtggagggccagattacctactacaacagatacaagagacagaacgtagtcaaggacctgtccgtcgagctggatagactgagcgaagaatctgtgaacaacgacatctcctcctggacaaagggcagaagcggagaagctctgagcctcctgaagaaaagattctcccatagacccgtgcaggagaagttcgtgtgcctgaactgcggcttcgagacacacgcagccgagcaagccgccctgaacatcgccagatcctggctgttcctgcggagccaggagtacaagaaataccagacaaacaagacaaccggcaacaccgataagagagccttcgtcgagacctggcagtccttttaccggaagaagcttaaggaggtgtggaaacctgccgtgcggtctggcggatctggcggaggctccaccagccccaagaaaaagagaaaagtctaagctgccttctgcggggcttgccttctggccatgcccttcttctctcccttgcacctgtacctcttggtctttgaataaagcctgagtaggaaggctagcaaaaaaaaaaaaaaaaaaaaaaaaaaaaaaaaaaaaaaaaaaaaaaaaaaaaaaaaaaaaaaaaaaaaaaaaaaaaaaaa

SEQ ID NO: 13654 - RNA, 5785 nt, synthetic construct
  source 1..5785: mol_type = other RNA
aggaaataagagagaaaagaagagtaagaagaaatataagagccaccatggcccctaagaagaagcgtaaagtgagccggatggaacgcctcgtctacgaggtgcggcagaagtgcagaaacatcgaggacatctgcatctcctgcggatctctgaacgtgaccctggagcacccactgttcatcggcggcatgtgccagaactgtaaaaactgttttctggagtgtgcctatcaatacgacgatgacggctaccagagctactgcaccatctgttgcggcggaagagaggtgctgatgtgtggaaataacaactgctgccggtgcttctgcgtggaatgcgtggacctgctggtgggccccggcgccgcccaggccgctattaaggaagatccttggaactgctacatgtgcggccacaagggcacatacggcctgctgagacggagagaggactggcctagcagactgcagatgttcttcgccaataaccacgaccaggagttcgacccccctaaggtgtaccctcccgtccccgccgagaagagaaagcccatccgggtcctgagcctgttcgatggcatcgccaccggtctgctggtgctgaaggacctgggcatccaggtggataggtacattgcctccgaggtgtgcgaggactccatcaccgtgggaatggtgcgtcatcagggcaagatcatgtacgtgggcgacgtgcggagcgtgacacagaagcatatccaggagtggggccctttcgacctggtgatcggcggcagcccttgcaatgacctgagcatcgtgaacccagcccggaagggcctgtacgagggaaccggcagactgttcttcgagttttacagactgctgcacgacgcccggcctaaggaaggcgacgaccggcccttcttttggctgttcgagaatgtggtggccatgggagtcagcgacaagcgggatattagccggttcctggagagcaaccccgtgatgatcgatgccaaggaagtgagcgccgcccaccgggccagatacttctggggcaatctgcctggcatgaacagacccctggccagcaccgtgaacgacaagctggagctgcaggagtgcctggagcacggccggatcgccaagttcagcaaggtgagaaccatcaccacccgaagcaacagcatcaaacaaggcaaggaccagcactttcctgtgttcatgaacgagaaggaggacatcctgtggtgtaccgagatggagagagtgttcgggttcccagtccactacacagatgtcagcaacatgtctagactggccagacagagactgctgggaagaagctggtccgtccctgtgatcagacacctgttcgcccctctgaaggagtacttcgcctgcgtgagcagcggcaacagcaacgccaacagccggggccccagcttctctagcggcctggtgccactgtccctgagagggagccacatgggccccatggagatctacaaaaccgtgagcgcctggaagcggcagcctgtgcgcgtgctgagcctgtttcggaatatcgataaagtcctgaaaagcctgggattcctggagagcggctctggctccggcggtggcaccctgaagtacgtggaggatgtgacaaacgtggtcagacgggatgtggagaagtggggccccttcgatctggtgtacggcagcacccaacccctgggcagctcttgtgaccggtgccctggctggtacatgtttcagttccaccggatcctgcagtacgccctgccgagacaggagtcccagcggccattcttttggattttcatggacaacttgctgctgaccgaggatgaccaggaaactaccactcggttcctgcagaccgaagccgtgaccctgcaggacgtgagaggccgggactaccagaacgccatgcgggtgtggtccaacatccctggactgaaaagcaagcacgcacctctgacccctaaagaagaggagtacctgcaggcccaggtgcggagcagaagcaagctggacgcccctaaggtggatctgctggtgaagaattgcctcctgcccctgagagagtacttcaagtatttcagccagaatagtctgcccctgggaggcagcggcggcggcgtgcacggcagcgtgaccttcagggacgtggccatcgacttcagccaggaggagtgggagtgcctgcagcccgaccagaggaccctgtacagggacgtgatgctggagaactacagccacctgatcagcctgggcagcagcatcagcaagcccgacgtgatcaccctgctggagcaggagcaggagccctggatggtggtgaggaaggagaccaacaggtggtaccccgacctggagagcaagggcggcccaagcagcggcgcccctcctcccagcggcggcagcccagccggctccccaacctctaccgaggagggcacctctgagtccgccacccccgagagcggccctggcacctccaccgagcccagcgagggcagcgcacccggcagccctgccggcagccccacctccacagaggagggaaccagcaccgagcccagcgaaggcagcgccccaggcaccagcaccgagcctagtgagcaggagattaaacggatcaacaagatcagaagaagacttgtgaaagacagcaacaccaagaaggccggcaagacaggccccatgaaaaccctgctggttagagtgatgacacccgatctgagagagcggctggaaaacctgagaaagaagcctgaaaatatcccccagcccatcagcaatacatctagagccaacctgaataagctgctgaccgattacaccgaaatgaagaaggcgatcctgcatgtgtactgggaagagttccagaaggaccctgtgggcctgatgagccgggtggcccagcctgccagcaagaagatcgatcagaacaagctgaaacctgagatggacgagaagggcaacctgaccaccgccggctttgcctgctctcagtgtggccagcccctgttcgtgtacaagctggagcaggtgtctgagaagggcaaggcttacaccaactacttcggacggtgcaatgtggccgagcacgaaaagctgatcctgctggcccagctgaagcccgagaaggatagcgacgaagccgtgacatatagcctgggaaagtttgggcagagggccctggatttctacagcattcatgtgaccaaggagtccacccaccccgtgaagcccctggcccagatcgccggaaacagatacgcctccggacctgtgggaaaggccctgagcgacgcatgtatgggcacaatcgcctccttcctgtctaagtaccaggacatcatcatcgaacaccagaaggtggtgaagggcaaccagaagagactggagagcctgcgggagctggccggcaaggaaaacctggaataccctagcgtgaccctgccacctcagcctcacaccaaggagggcgttgatgcctacaacgaagtgatcgcccgggtgcgaatgtgggtgaacctgaacctgtggcagaagctgaagctaagcagagatgatgccaagcctctgctgagactgaagggattcccttcctttcctctggtcgagagacaggccaacgaagtggactggtgggacatggtgtgtaacgtgaagaagctgatcaacgagaaaaaggaggatggcaaggtgttttggcagaatctggctggctacaagagacaggaagccctgagaccatacctgagcagcgaggaagatcggaagaagggaaagaaattcgctcggtaccagctgggcgacctgctgctgcacctggaaaagaagcacggcgaggactggggaaaggtgtacgacgaggcctgggagcggattgacaagaaagtggaaggcctgagcaagcacatcaagctggaagaggaacggagaagcgaggacgcccagagcaaggccgccctgaccgactggctgcgggctaaggccagcttcgtgatcgagggcctgaaggaggccgacaaggacgagttctgcagatgcgagctgaagctgcagaagtggtacggggacctgcggggaaagcccttcgccatcgaagccgagaacagcatcctggacatcagcggcttcagcaagcagtacaactgtgccttcatctggcagaaggacggcgtgaagaagctgaacctgtacctgatcatcaactacttcaagggcggcaagctgcggttcaagaagatcaaacctgaagccttcgaagccaacagattctacaccgtgatcaacaaaaagagcggcgagatcgtgcccatggaggtgaacttcaacttcgacgaccccaacctgatcatcctgcctctggcctttggcaagagacagggcagagaattcatctggaacgacctgctgtccctggaaaccggcagcctgaagctggccaacggaagagtgatcgagaagacactgtacaacagaagaacccggcaggatgagcctgccctgttcgtggccctgaccttcgagcggcgggaggtcctggactcctccaatatcaaaccaatgaacctgatcggcgtggcaagaggcgaaaacatccccgccgtgatcgccctgaccgaccccgagggctgcccactgagccggtttaaggatagcctgggaaacccaacccacatcctgagaatcggcgagagctataaggagaagcagcggaccatccaggccaagaaggaggtggagcagcggagagccggcggctacagccggaagtacgccagcaaagccaagaatctggcagacgatatggtgagaaacaccgctagagatctgctgtactacgccgtgacccaggatgccatgctgatcttcgccaacctgagccggggcttcggccggcagggcaagcggaccttcatggccgagagacagtacacacggatggaggactggctgaccgccaagctggcctacgagggcctgagcaagacctacctgtccaagacactggcccagtacacctccaagacatgcagcaactgtgggtttaccatcaccagcgccgactacgacagggtgctggagaagctgaagaagacagcaacaggctggatgaccacaattaacggcaaggagctgaaggtggagggccagattacctactacaacagatacaagagacagaacgtagtcaaggacctgtccgtcgagctggatagactgagcgaagaatctgtgaacaacgacatctcctcctggacaaagggcagaagcggagaagctctgagcctcctgaagaaaagattctcccatagacccgtgcaggagaagttcgtgtgcctgaactgcggcttcgagacacacgcagccgagcaagccgccctgaacatcgccagatcctggctgttcctgcggagccaggagtacaagaaataccagacaaacaagacaaccggcaacaccgataagagagccttcgtcgagacctggcagtccttttaccggaagaagcttaaggaggtgtggaaacctgccgtgcggtctggcggatctggcggaggctccaccagccccaagaaaaagagaaaagtctaagctgccttctgcggggcttgccttctggccatgcccttcttctctcccttgcacctgtacctcttggtctttgaataaagcctgagtaggaaggctagcaaaaaaaaaaaaaaaaaaaaaaaaaaaaaaaaaaaaaaaaaaaaaaaaaaaaaaaaaaaaaaaaaaaaaaaaaaaaaaaa

SEQ ID NO: 13655 - RNA, 5785 nt, synthetic construct
  source 1..5785: mol_type = other RNA
aggaaataagagagaaaagaagagtaagaagaaatataagagccaccatggcccctaagaagaagcgtaaagtgagccggatggaacgcctcgtctacgaggtgcggcagaagtgcagaaacatcgaggacatctgcatctcctgcggatctctgaacgtgaccctggagcacccactgttcatcggcggcatgtgccagaactgtaaaaactgttttctggagtgtgcctatcaatacgacgatgacggctaccagagctactgcaccatctgttgcggcggaagagaggtgctgatgtgtggaaataacaactgctgccggtgcttctgcgtggaatgcgtggacctgctggtgggccccggcgccgcccaggccgctattaaggaagatccttggaactgctacatgtgcggccacaagggcacatacggcctgctgagacggagagaggactggcctagcagactgcagatgttcttcgccaataaccacgaccaggagttcgacccccctaaggtgtaccctcccgtccccgccgagaagagaaagcccatccgggtcctgagcctgttcgatggcatcgccaccggtctgctggtgctgaaggacctgggcatccaggtggataggtacattgcctccgaggtgtgcgaggactccatcaccgtgggaatggtgcgtcatcagggcaagatcatgtacgtgggcgacgtgcggagcgtgacacagaagcatatccaggagtggggccctttcgacctggtgatcggcggcagcccttgcaatgacctgagcatcgtgaacccagcccggaagggcctgtacgagggaaccggcagactgttcttcgagttttacagactgctgcacgacgcccggcctaaggaaggcgacgaccggcccttcttttggctgttcgagaatgtggtggccatgggagtcagcgacaagcgggatattagccggttcctggagagcaaccccgtgatgatcgatgccaaggaagtgagcgccgcccaccgggccagatacttctggggcaatctgcctggcatgaacagacccctggccagcaccgtgaacgacaagctggagctgcaggagtgcctggagcacggccggatcgccaagttcagcaaggtgagaaccatcaccacccgaagcaacagcatcaaacaaggcaaggaccagcactttcctgtgttcatgaacgagaaggaggacatcctgtggtgtaccgagatggagagagtgttcgggttcccagtccactacacagatgtcagcaacatgtctagactggccagacagagactgctgggaagaagctggtccgtccctgtgatcagacacctgttcgcccctctgaaggagtacttcgcctgcgtgagcagcggcaacagcaacgccaacagccggggccccagcttctctagcggcctggtgccactgtccctgagagggagccacatgggccccatggagatctacaaaaccgtgagcgcctggaagcggcagcctgtgcgcgtgctgagcctgtttcggaatatcgataaagtcctgaaaagcctgggattcctggagagcggctctggctccggcggtggcaccctgaagtacgtggaggatgtgacaaacgtggtcagacgggatgtggagaagtggggccccttcgatctggtgtacggcagcacccaacccctgggcagctcttgtgaccggtgccctggctggtacatgtttcagttccaccggatcctgcagtacgccctgccgagacaggagtcccagcggccattcttttggattttcatggacaacttgctgctgaccgaggatgaccaggaaactaccactcggttcctgcagaccgaagccgtgaccctgcaggacgtgagaggccgggactaccagaacgccatgcgggtgtggtccaacatccctggactgaaaagcaagcacgcacctctgacccctaaagaagaggagtacctgcaggcccaggtgcggagcagaagcaagctggacgcccctaaggtggatctgctggtgaagaattgcctcctgcccctgagagagtacttcaagtatttcagccagaatagtctgcccctgggaggcagcggcggcggcaggcccgagagcgtgaccttcgaggacgtggccatctacttcagcgagaacgagtggaccggcctggcccccgcccagagggccctgtacagggacgtgatgctggagaactacggcgccctggccagcctggccttccccttccccaagcccgccctgatcttccagctggagcagggcgaggccccctggagcagcgccccccagggcgccctggacggcgagggccccaggggcatcagcggcggcccaagcagcggcgcccctcctcccagcggcggcagcccagccggctccccaacctctaccgaggagggcacctctgagtccgccacccccgagagcggccctggcacctccaccgagcccagcgagggcagcgcacccggcagccctgccggcagccccacctccacagaggagggaaccagcaccgagcccagcgaaggcagcgccccaggcaccagcaccgagcctagtgagcaggagattaaacggatcaacaagatcagaagaagacttgtgaaagacagcaacaccaagaaggccggcaagacaggccccatgaaaaccctgctggttagagtgatgacacccgatctgagagagcggctggaaaacctgagaaagaagcctgaaaatatcccccagcccatcagcaatacatctagagccaacctgaataagctgctgaccgattacaccgaaatgaagaaggcgatcctgcatgtgtactgggaagagttccagaaggaccctgtgggcctgatgagccgggtggcccagcctgccagcaagaagatcgatcagaacaagctgaaacctgagatggacgagaagggcaacctgaccaccgccggctttgcctgctctcagtgtggccagcccctgttcgtgtacaagctggagcaggtgtctgagaagggcaaggcttacaccaactacttcggacggtgcaatgtggccgagcacgaaaagctgatcctgctggcccagctgaagcccgagaaggatagcgacgaagccgtgacatatagcctgggaaagtttgggcagagggccctggatttctacagcattcatgtgaccaaggagtccacccaccccgtgaagcccctggcccagatcgccggaaacagatacgcctccggacctgtgggaaaggccctgagcgacgcatgtatgggcacaatcgcctccttcctgtctaagtaccaggacatcatcatcgaacaccagaaggtggtgaagggcaaccagaagagactggagagcctgcgggagctggccggcaaggaaaacctggaataccctagcgtgaccctgccacctcagcctcacaccaaggagggcgttgatgcctacaacgaagtgatcgcccgggtgcgaatgtgggtgaacctgaacctgtggcagaagctgaagctaagcagagatgatgccaagcctctgctgagactgaagggattcccttcctttcctctggtcgagagacaggccaacgaagtggactggtgggacatggtgtgtaacgtgaagaagctgatcaacgagaaaaaggaggatggcaaggtgttttggcagaatctggctggctacaagagacaggaagccctgagaccatacctgagcagcgaggaagatcggaagaagggaaagaaattcgctcggtaccagctgggcgacctgctgctgcacctggaaaagaagcacggcgaggactggggaaaggtgtacgacgaggcctgggagcggattgacaagaaagtggaaggcctgagcaagcacatcaagctggaagaggaacggagaagcgaggacgcccagagcaaggccgccctgaccgactggctgcgggctaaggccagcttcgtgatcgagggcctgaaggaggccgacaaggacgagttctgcagatgcgagctgaagctgcagaagtggtacggggacctgcggggaaagcccttcgccatcgaagccgagaacagcatcctggacatcagcggcttcagcaagcagtacaactgtgccttcatctggcagaaggacggcgtgaagaagctgaacctgtacctgatcatcaactacttcaagggcggcaagctgcggttcaagaagatcaaacctgaagccttcgaagccaacagattctacaccgtgatcaacaaaaagagcggcgagatcgtgcccatggaggtgaacttcaacttcgacgaccccaacctgatcatcctgcctctggcctttggcaagagacagggcagagaattcatctggaacgacctgctgtccctggaaaccggcagcctgaagctggccaacggaagagtgatcgagaagacactgtacaacagaagaacccggcaggatgagcctgccctgttcgtggccctgaccttcgagcggcgggaggtcctggactcctccaatatcaaaccaatgaacctgatcggcgtggcaagaggcgaaaacatccccgccgtgatcgccctgaccgaccccgagggctgcccactgagccggtttaaggatagcctgggaaacccaacccacatcctgagaatcggcgagagctataaggagaagcagcggaccatccaggccaagaaggaggtggagcagcggagagccggcggctacagccggaagtacgccagcaaagccaagaatctggcagacgatatggtgagaaacaccgctagagatctgctgtactacgccgtgacccaggatgccatgctgatcttcgccaacctgagccggggcttcggccggcagggcaagcggaccttcatggccgagagacagtacacacggatggaggactggctgaccgccaagctggcctacgagggcctgagcaagacctacctgtccaagacactggcccagtacacctccaagacatgcagcaactgtgggtttaccatcaccagcgccgactacgacagggtgctggagaagctgaagaagacagcaacaggctggatgaccacaattaacggcaaggagctgaaggtggagggccagattacctactacaacagatacaagagacagaacgtagtcaaggacctgtccgtcgagctggatagactgagcgaagaatctgtgaacaacgacatctcctcctggacaaagggcagaagcggagaagctctgagcctcctgaagaaaagattctcccatagacccgtgcaggagaagttcgtgtgcctgaactgcggcttcgagacacacgcagccgagcaagccgccctgaacatcgccagatcctggctgttcctgcggagccaggagtacaagaaataccagacaaacaagacaaccggcaacaccgataagagagccttcgtcgagacctggcagtccttttaccggaagaagcttaaggaggtgtggaaacctgccgtgcggtctggcggatctggcggaggctccaccagccccaagaaaaagagaaaagtctaagctgccttctgcggggcttgccttctggccatgcccttcttctctcccttgcacctgtacctcttggtctttgaataaagcctgagtaggaaggctagcaaaaaaaaaaaaaaaaaaaaaaaaaaaaaaaaaaaaaaaaaaaaaaaaaaaaaaaaaaaaaaaaaaaaaaaaaaaaaaaa

SEQ ID NO: 13656 - RNA, 5785 nt, synthetic construct
  source 1..5785: mol_type = other RNA
aggaaataagagagaaaagaagagtaagaagaaatataagagccaccatggcccctaagaagaagcgtaaagtgagccggatggaacgcctcgtctacgaggtgcggcagaagtgcagaaacatcgaggacatctgcatctcctgcggatctctgaacgtgaccctggagcacccactgttcatcggcggcatgtgccagaactgtaaaaactgttttctggagtgtgcctatcaatacgacgatgacggctaccagagctactgcaccatctgttgcggcggaagagaggtgctgatgtgtggaaataacaactgctgccggtgcttctgcgtggaatgcgtggacctgctggtgggccccggcgccgcccaggccgctattaaggaagatccttggaactgctacatgtgcggccacaagggcacatacggcctgctgagacggagagaggactggcctagcagactgcagatgttcttcgccaataaccacgaccaggagttcgacccccctaaggtgtaccctcccgtccccgccgagaagagaaagcccatccgggtcctgagcctgttcgatggcatcgccaccggtctgctggtgctgaaggacctgggcatccaggtggataggtacattgcctccgaggtgtgcgaggactccatcaccgtgggaatggtgcgtcatcagggcaagatcatgtacgtgggcgacgtgcggagcgtgacacagaagcatatccaggagtggggccctttcgacctggtgatcggcggcagcccttgcaatgacctgagcatcgtgaacccagcccggaagggcctgtacgagggaaccggcagactgttcttcgagttttacagactgctgcacgacgcccggcctaaggaaggcgacgaccggcccttcttttggctgttcgagaatgtggtggccatgggagtcagcgacaagcgggatattagccggttcctggagagcaaccccgtgatgatcgatgccaaggaagtgagcgccgcccaccgggccagatacttctggggcaatctgcctggcatgaacagacccctggccagcaccgtgaacgacaagctggagctgcaggagtgcctggagcacggccggatcgccaagttcagcaaggtgagaaccatcaccacccgaagcaacagcatcaaacaaggcaaggaccagcactttcctgtgttcatgaacgagaaggaggacatcctgtggtgtaccgagatggagagagtgttcgggttcccagtccactacacagatgtcagcaacatgtctagactggccagacagagactgctgggaagaagctggtccgtccctgtgatcagacacctgttcgcccctctgaaggagtacttcgcctgcgtgagcagcggcaacagcaacgccaacagccggggccccagcttctctagcggcctggtgccactgtccctgagagggagccacatgggccccatggagatctacaaaaccgtgagcgcctggaagcggcagcctgtgcgcgtgctgagcctgtttcggaatatcgataaagtcctgaaaagcctgggattcctggagagcggctctggctccggcggtggcaccctgaagtacgtggaggatgtgacaaacgtggtcagacgggatgtggagaagtggggccccttcgatctggtgtacggcagcacccaacccctgggcagctcttgtgaccggtgccctggctggtacatgtttcagttccaccggatcctgcagtacgccctgccgagacaggagtcccagcggccattcttttggattttcatggacaacttgctgctgaccgaggatgaccaggaaactaccactcggttcctgcagaccgaagccgtgaccctgcaggacgtgagaggccgggactaccagaacgccatgcgggtgtggtccaacatccctggactgaaaagcaagcacgcacctctgacccctaaagaagaggagtacctgcaggcccaggtgcggagcagaagcaagctggacgcccctaaggtggatctgctggtgaagaattgcctcctgcccctgagagagtacttcaagtatttcagccagaatagtctgcccctgggaggcagcggcggcggcagccagggcagcgtgaccttcggcgacgtggccatcgacttcagcagggaggagtgggagtggctgcagcccgcccagagggacctgtacaggatcgtgatgctggagaactacggccacctggtgagcctgggcctgaacgtgagcaagcccgacgtggtgagcctgctggagcagggcaaggagccctggctgggcaacggcgacgtgaggagggacctgttcagcgtgagcgagagcaacggcggcccaagcagcggcgcccctcctcccagcggcggcagcccagccggctccccaacctctaccgaggagggcacctctgagtccgccacccccgagagcggccctggcacctccaccgagcccagcgagggcagcgcacccggcagccctgccggcagccccacctccacagaggagggaaccagcaccgagcccagcgaaggcagcgccccaggcaccagcaccgagcctagtgagcaggagattaaacggatcaacaagatcagaagaagacttgtgaaagacagcaacaccaagaaggccggcaagacaggccccatgaaaaccctgctggttagagtgatgacacccgatctgagagagcggctggaaaacctgagaaagaagcctgaaaatatcccccagcccatcagcaatacatctagagccaacctgaataagctgctgaccgattacaccgaaatgaagaaggcgatcctgcatgtgtactgggaagagttccagaaggaccctgtgggcctgatgagccgggtggcccagcctgccagcaagaagatcgatcagaacaagctgaaacctgagatggacgagaagggcaacctgaccaccgccggctttgcctgctctcagtgtggccagcccctgttcgtgtacaagctggagcaggtgtctgagaagggcaaggcttacaccaactacttcggacggtgcaatgtggccgagcacgaaaagctgatcctgctggcccagctgaagcccgagaaggatagcgacgaagccgtgacatatagcctgggaaagtttgggcagagggccctggatttctacagcattcatgtgaccaaggagtccacccaccccgtgaagcccctggcccagatcgccggaaacagatacgcctccggacctgtgggaaaggccctgagcgacgcatgtatgggcacaatcgcctccttcctgtctaagtaccaggacatcatcatcgaacaccagaaggtggtgaagggcaaccagaagagactggagagcctgcgggagctggccggcaaggaaaacctggaataccctagcgtgaccctgccacctcagcctcacaccaaggagggcgttgatgcctacaacgaagtgatcgcccgggtgcgaatgtgggtgaacctgaacctgtggcagaagctgaagctaagcagagatgatgccaagcctctgctgagactgaagggattcccttcctttcctctggtcgagagacaggccaacgaagtggactggtgggacatggtgtgtaacgtgaagaagctgatcaacgagaaaaaggaggatggcaaggtgttttggcagaatctggctggctacaagagacaggaagccctgagaccatacctgagcagcgaggaagatcggaagaagggaaagaaattcgctcggtaccagctgggcgacctgctgctgcacctggaaaagaagcacggcgaggactggggaaaggtgtacgacgaggcctgggagcggattgacaagaaagtggaaggcctgagcaagcacatcaagctggaagaggaacggagaagcgaggacgcccagagcaaggccgccctgaccgactggctgcgggctaaggccagcttcgtgatcgagggcctgaaggaggccgacaaggacgagttctgcagatgcgagctgaagctgcagaagtggtacggggacctgcggggaaagcccttcgccatcgaagccgagaacagcatcctggacatcagcggcttcagcaagcagtacaactgtgccttcatctggcagaaggacggcgtgaagaagctgaacctgtacctgatcatcaactacttcaagggcggcaagctgcggttcaagaagatcaaacctgaagccttcgaagccaacagattctacaccgtgatcaacaaaaagagcggcgagatcgtgcccatggaggtgaacttcaacttcgacgaccccaacctgatcatcctgcctctggcctttggcaagagacagggcagagaattcatctggaacgacctgctgtccctggaaaccggcagcctgaagctggccaacggaagagtgatcgagaagacactgtacaacagaagaacccggcaggatgagcctgccctgttcgtggccctgaccttcgagcggcgggaggtcctggactcctccaatatcaaaccaatgaacctgatcggcgtggcaagaggcgaaaacatccccgccgtgatcgccctgaccgaccccgagggctgcccactgagccggtttaaggatagcctgggaaacccaacccacatcctgagaatcggcgagagctataaggagaagcagcggaccatccaggccaagaaggaggtggagcagcggagagccggcggctacagccggaagtacgccagcaaagccaagaatctggcagacgatatggtgagaaacaccgctagagatctgctgtactacgccgtgacccaggatgccatgctgatcttcgccaacctgagccggggcttcggccggcagggcaagcggaccttcatggccgagagacagtacacacggatggaggactggctgaccgccaagctggcctacgagggcctgagcaagacctacctgtccaagacactggcccagtacacctccaagacatgcagcaactgtgggtttaccatcaccagcgccgactacgacagggtgctggagaagctgaagaagacagcaacaggctggatgaccacaattaacggcaaggagctgaaggtggagggccagattacctactacaacagatacaagagacagaacgtagtcaaggacctgtccgtcgagctggatagactgagcgaagaatctgtgaacaacgacatctcctcctggacaaagggcagaagcggagaagctctgagcctcctgaagaaaagattctcccatagacccgtgcaggagaagttcgtgtgcctgaactgcggcttcgagacacacgcagccgagcaagccgccctgaacatcgccagatcctggctgttcctgcggagccaggagtacaagaaataccagacaaacaagacaaccggcaacaccgataagagagccttcgtcgagacctggcagtccttttaccggaagaagcttaaggaggtgtggaaacctgccgtgcggtctggcggatctggcggaggctccaccagccccaagaaaaagagaaaagtctaagctgccttctgcggggcttgccttctggccatgcccttcttctctcccttgcacctgtacctcttggtctttgaataaagcctgagtaggaaggctagcaaaaaaaaaaaaaaaaaaaaaaaaaaaaaaaaaaaaaaaaaaaaaaaaaaaaaaaaaaaaaaaaaaaaaaaaaaaaaaaa

SEQ ID NO: 13657 - RNA, 5785 nt, synthetic construct
  source 1..5785: mol_type = other RNA
aggaaataagagagaaaagaagagtaagaagaaatataagagccaccatggcccctaagaagaagcgtaaagtgagccggatggaacgcctcgtctacgaggtgcggcagaagtgcagaaacatcgaggacatctgcatctcctgcggatctctgaacgtgaccctggagcacccactgttcatcggcggcatgtgccagaactgtaaaaactgttttctggagtgtgcctatcaatacgacgatgacggctaccagagctactgcaccatctgttgcggcggaagagaggtgctgatgtgtggaaataacaactgctgccggtgcttctgcgtggaatgcgtggacctgctggtgggccccggcgccgcccaggccgctattaaggaagatccttggaactgctacatgtgcggccacaagggcacatacggcctgctgagacggagagaggactggcctagcagactgcagatgttcttcgccaataaccacgaccaggagttcgacccccctaaggtgtaccctcccgtccccgccgagaagagaaagcccatccgggtcctgagcctgttcgatggcatcgccaccggtctgctggtgctgaaggacctgggcatccaggtggataggtacattgcctccgaggtgtgcgaggactccatcaccgtgggaatggtgcgtcatcagggcaagatcatgtacgtgggcgacgtgcggagcgtgacacagaagcatatccaggagtggggccctttcgacctggtgatcggcggcagcccttgcaatgacctgagcatcgtgaacccagcccggaagggcctgtacgagggaaccggcagactgttcttcgagttttacagactgctgcacgacgcccggcctaaggaaggcgacgaccggcccttcttttggctgttcgagaatgtggtggccatgggagtcagcgacaagcgggatattagccggttcctggagagcaaccccgtgatgatcgatgccaaggaagtgagcgccgcccaccgggccagatacttctggggcaatctgcctggcatgaacagacccctggccagcaccgtgaacgacaagctggagctgcaggagtgcctggagcacggccggatcgccaagttcagcaaggtgagaaccatcaccacccgaagcaacagcatcaaacaaggcaaggaccagcactttcctgtgttcatgaacgagaaggaggacatcctgtggtgtaccgagatggagagagtgttcgggttcccagtccactacacagatgtcagcaacatgtctagactggccagacagagactgctgggaagaagctggtccgtccctgtgatcagacacctgttcgcccctctgaaggagtacttcgcctgcgtgagcagcggcaacagcaacgccaacagccggggccccagcttctctagcggcctggtgccactgtccctgagagggagccacatgggccccatggagatctacaaaaccgtgagcgcctggaagcggcagcctgtgcgcgtgctgagcctgtttcggaatatcgataaagtcctgaaaagcctgggattcctggagagcggctctggctccggcggtggcaccctgaagtacgtggaggatgtgacaaacgtggtcagacgggatgtggagaagtggggccccttcgatctggtgtacggcagcacccaacccctgggcagctcttgtgaccggtgccctggctggtacatgtttcagttccaccggatcctgcagtacgccctgccgagacaggagtcccagcggccattcttttggattttcatggacaacttgctgctgaccgaggatgaccaggaaactaccactcggttcctgcagaccgaagccgtgaccctgcaggacgtgagaggccgggactaccagaacgccatgcgggtgtggtccaacatccctggactgaaaagcaagcacgcacctctgacccctaaagaagaggagtacctgcaggcccaggtgcggagcagaagcaagctggacgcccctaaggtggatctgctggtgaagaattgcctcctgcccctgagagagtacttcaagtatttcagccagaatagtctgcccctgggaggcagcggcggcggcgagcccggcgccgtgagcttcgccgacgtggccgtgtacttctgcagggaggagtggggctgcctgaggcccgcccagaggaccctgtacagggacgtgatgagggagacctacggccacctgagcgccctgggcatcggcggcaagaagcccgccctgatcagctgggtggaggaggaggccgagctgtggggccccgccgcccaggaccccgaggtggccaagtgccccacccagaccgacggcggcccaagcagcggcgcccctcctcccagcggcggcagcccagccggctccccaacctctaccgaggagggcacctctgagtccgccacccccgagagcggccctggcacctccaccgagcccagcgagggcagcgcacccggcagccctgccggcagccccacctccacagaggagggaaccagcaccgagcccagcgaaggcagcgccccaggcaccagcaccgagcctagtgagcaggagattaaacggatcaacaagatcagaagaagacttgtgaaagacagcaacaccaagaaggccggcaagacaggccccatgaaaaccctgctggttagagtgatgacacccgatctgagagagcggctggaaaacctgagaaagaagcctgaaaatatcccccagcccatcagcaatacatctagagccaacctgaataagctgctgaccgattacaccgaaatgaagaaggcgatcctgcatgtgtactgggaagagttccagaaggaccctgtgggcctgatgagccgggtggcccagcctgccagcaagaagatcgatcagaacaagctgaaacctgagatggacgagaagggcaacctgaccaccgccggctttgcctgctctcagtgtggccagcccctgttcgtgtacaagctggagcaggtgtctgagaagggcaaggcttacaccaactacttcggacggtgcaatgtggccgagcacgaaaagctgatcctgctggcccagctgaagcccgagaaggatagcgacgaagccgtgacatatagcctgggaaagtttgggcagagggccctggatttctacagcattcatgtgaccaaggagtccacccaccccgtgaagcccctggcccagatcgccggaaacagatacgcctccggacctgtgggaaaggccctgagcgacgcatgtatgggcacaatcgcctccttcctgtctaagtaccaggacatcatcatcgaacaccagaaggtggtgaagggcaaccagaagagactggagagcctgcgggagctggccggcaaggaaaacctggaataccctagcgtgaccctgccacctcagcctcacaccaaggagggcgttgatgcctacaacgaagtgatcgcccgggtgcgaatgtgggtgaacctgaacctgtggcagaagctgaagctaagcagagatgatgccaagcctctgctgagactgaagggattcccttcctttcctctggtcgagagacaggccaacgaagtggactggtgggacatggtgtgtaacgtgaagaagctgatcaacgagaaaaaggaggatggcaaggtgttttggcagaatctggctggctacaagagacaggaagccctgagaccatacctgagcagcgaggaagatcggaagaagggaaagaaattcgctcggtaccagctgggcgacctgctgctgcacctggaaaagaagcacggcgaggactggggaaaggtgtacgacgaggcctgggagcggattgacaagaaagtggaaggcctgagcaagcacatcaagctggaagaggaacggagaagcgaggacgcccagagcaaggccgccctgaccgactggctgcgggctaaggccagcttcgtgatcgagggcctgaaggaggccgacaaggacgagttctgcagatgcgagctgaagctgcagaagtggtacggggacctgcggggaaagcccttcgccatcgaagccgagaacagcatcctggacatcagcggcttcagcaagcagtacaactgtgccttcatctggcagaaggacggcgtgaagaagctgaacctgtacctgatcatcaactacttcaagggcggcaagctgcggttcaagaagatcaaacctgaagccttcgaagccaacagattctacaccgtgatcaacaaaaagagcggcgagatcgtgcccatggaggtgaacttcaacttcgacgaccccaacctgatcatcctgcctctggcctttggcaagagacagggcagagaattcatctggaacgacctgctgtccctggaaaccggcagcctgaagctggccaacggaagagtgatcgagaagacactgtacaacagaagaacccggcaggatgagcctgccctgttcgtggccctgaccttcgagcggcgggaggtcctggactcctccaatatcaaaccaatgaacctgatcggcgtggcaagaggcgaaaacatccccgccgtgatcgccctgaccgaccccgagggctgcccactgagccggtttaaggatagcctgggaaacccaacccacatcctgagaatcggcgagagctataaggagaagcagcggaccatccaggccaagaaggaggtggagcagcggagagccggcggctacagccggaagtacgccagcaaagccaagaatctggcagacgatatggtgagaaacaccgctagagatctgctgtactacgccgtgacccaggatgccatgctgatcttcgccaacctgagccggggcttcggccggcagggcaagcggaccttcatggccgagagacagtacacacggatggaggactggctgaccgccaagctggcctacgagggcctgagcaagacctacctgtccaagacactggcccagtacacctccaagacatgcagcaactgtgggtttaccatcaccagcgccgactacgacagggtgctggagaagctgaagaagacagcaacaggctggatgaccacaattaacggcaaggagctgaaggtggagggccagattacctactacaacagatacaagagacagaacgtagtcaaggacctgtccgtcgagctggatagactgagcgaagaatctgtgaacaacgacatctcctcctggacaaagggcagaagcggagaagctctgagcctcctgaagaaaagattctcccatagacccgtgcaggagaagttcgtgtgcctgaactgcggcttcgagacacacgcagccgagcaagccgccctgaacatcgccagatcctggctgttcctgcggagccaggagtacaagaaataccagacaaacaagacaaccggcaacaccgataagagagccttcgtcgagacctggcagtccttttaccggaagaagcttaaggaggtgtggaaacctgccgtgcggtctggcggatctggcggaggctccaccagccccaagaaaaagagaaaagtctaagctgccttctgcggggcttgccttctggccatgcccttcttctctcccttgcacctgtacctcttggtctttgaataaagcctgagtaggaaggctagcaaaaaaaaaaaaaaaaaaaaaaaaaaaaaaaaaaaaaaaaaaaaaaaaaaaaaaaaaaaaaaaaaaaaaaaaaaaaaaaa

SEQ ID NO: 13658 - RNA, 5785 nt, synthetic construct
  source 1..5785: mol_type = other RNA
aggaaataagagagaaaagaagagtaagaagaaatataagagccaccatggcccctaagaagaagcgtaaagtgagccggatggaacgcctcgtctacgaggtgcggcagaagtgcagaaacatcgaggacatctgcatctcctgcggatctctgaacgtgaccctggagcacccactgttcatcggcggcatgtgccagaactgtaaaaactgttttctggagtgtgcctatcaatacgacgatgacggctaccagagctactgcaccatctgttgcggcggaagagaggtgctgatgtgtggaaataacaactgctgccggtgcttctgcgtggaatgcgtggacctgctggtgggccccggcgccgcccaggccgctattaaggaagatccttggaactgctacatgtgcggccacaagggcacatacggcctgctgagacggagagaggactggcctagcagactgcagatgttcttcgccaataaccacgaccaggagttcgacccccctaaggtgtaccctcccgtccccgccgagaagagaaagcccatccgggtcctgagcctgttcgatggcatcgccaccggtctgctggtgctgaaggacctgggcatccaggtggataggtacattgcctccgaggtgtgcgaggactccatcaccgtgggaatggtgcgtcatcagggcaagatcatgtacgtgggcgacgtgcggagcgtgacacagaagcatatccaggagtggggccctttcgacctggtgatcggcggcagcccttgcaatgacctgagcatcgtgaacccagcccggaagggcctgtacgagggaaccggcagactgttcttcgagttttacagactgctgcacgacgcccggcctaaggaaggcgacgaccggcccttcttttggctgttcgagaatgtggtggccatgggagtcagcgacaagcgggatattagccggttcctggagagcaaccccgtgatgatcgatgccaaggaagtgagcgccgcccaccgggccagatacttctggggcaatctgcctggcatgaacagacccctggccagcaccgtgaacgacaagctggagctgcaggagtgcctggagcacggccggatcgccaagttcagcaaggtgagaaccatcaccacccgaagcaacagcatcaaacaaggcaaggaccagcactttcctgtgttcatgaacgagaaggaggacatcctgtggtgtaccgagatggagagagtgttcgggttcccagtccactacacagatgtcagcaacatgtctagactggccagacagagactgctgggaagaagctggtccgtccctgtgatcagacacctgttcgcccctctgaaggagtacttcgcctgcgtgagcagcggcaacagcaacgccaacagccggggccccagcttctctagcggcctggtgccactgtccctgagagggagccacatgggccccatggagatctacaaaaccgtgagcgcctggaagcggcagcctgtgcgcgtgctgagcctgtttcggaatatcgataaagtcctgaaaagcctgggattcctggagagcggctctggctccggcggtggcaccctgaagtacgtggaggatgtgacaaacgtggtcagacgggatgtggagaagtggggccccttcgatctggtgtacggcagcacccaacccctgggcagctcttgtgaccggtgccctggctggtacatgtttcagttccaccggatcctgcagtacgccctgccgagacaggagtcccagcggccattcttttggattttcatggacaacttgctgctgaccgaggatgaccaggaaactaccactcggttcctgcagaccgaagccgtgaccctgcaggacgtgagaggccgggactaccagaacgccatgcgggtgtggtccaacatccctggactgaaaagcaagcacgcacctctgacccctaaagaagaggagtacctgcaggcccaggtgcggagcagaagcaagctggacgcccctaaggtggatctgctggtgaagaattgcctcctgcccctgagagagtacttcaagtatttcagccagaatagtctgcccctgggaggcagcggcggcggcgcccagatgctggtgaccttcgaggaggtggccgtgtacttcacccagggccagggcgccctgctgggccccgcccagagggccctgtacagggacgtgatgcaggagaactacgagatggtgaccagcctgggcttcagcctgcccaagcccgagctgatcagcaggctggagaggggcgaggagccctgggtgcccgacctgcaggcctgcgagaagagggagagcctgaggggcgccaggggcggcccaagcagcggcgcccctcctcccagcggcggcagcccagccggctccccaacctctaccgaggagggcacctctgagtccgccacccccgagagcggccctggcacctccaccgagcccagcgagggcagcgcacccggcagccctgccggcagccccacctccacagaggagggaaccagcaccgagcccagcgaaggcagcgccccaggcaccagcaccgagcctagtgagcaggagattaaacggatcaacaagatcagaagaagacttgtgaaagacagcaacaccaagaaggccggcaagacaggccccatgaaaaccctgctggttagagtgatgacacccgatctgagagagcggctggaaaacctgagaaagaagcctgaaaatatcccccagcccatcagcaatacatctagagccaacctgaataagctgctgaccgattacaccgaaatgaagaaggcgatcctgcatgtgtactgggaagagttccagaaggaccctgtgggcctgatgagccgggtggcccagcctgccagcaagaagatcgatcagaacaagctgaaacctgagatggacgagaagggcaacctgaccaccgccggctttgcctgctctcagtgtggccagcccctgttcgtgtacaagctggagcaggtgtctgagaagggcaaggcttacaccaactacttcggacggtgcaatgtggccgagcacgaaaagctgatcctgctggcccagctgaagcccgagaaggatagcgacgaagccgtgacatatagcctgggaaagtttgggcagagggccctggatttctacagcattcatgtgaccaaggagtccacccaccccgtgaagcccctggcccagatcgccggaaacagatacgcctccggacctgtgggaaaggccctgagcgacgcatgtatgggcacaatcgcctccttcctgtctaagtaccaggacatcatcatcgaacaccagaaggtggtgaagggcaaccagaagagactggagagcctgcgggagctggccggcaaggaaaacctggaataccctagcgtgaccctgccacctcagcctcacaccaaggagggcgttgatgcctacaacgaagtgatcgcccgggtgcgaatgtgggtgaacctgaacctgtggcagaagctgaagctaagcagagatgatgccaagcctctgctgagactgaagggattcccttcctttcctctggtcgagagacaggccaacgaagtggactggtgggacatggtgtgtaacgtgaagaagctgatcaacgagaaaaaggaggatggcaaggtgttttggcagaatctggctggctacaagagacaggaagccctgagaccatacctgagcagcgaggaagatcggaagaagggaaagaaattcgctcggtaccagctgggcgacctgctgctgcacctggaaaagaagcacggcgaggactggggaaaggtgtacgacgaggcctgggagcggattgacaagaaagtggaaggcctgagcaagcacatcaagctggaagaggaacggagaagcgaggacgcccagagcaaggccgccctgaccgactggctgcgggctaaggccagcttcgtgatcgagggcctgaaggaggccgacaaggacgagttctgcagatgcgagctgaagctgcagaagtggtacggggacctgcggggaaagcccttcgccatcgaagccgagaacagcatcctggacatcagcggcttcagcaagcagtacaactgtgccttcatctggcagaaggacggcgtgaagaagctgaacctgtacctgatcatcaactacttcaagggcggcaagctgcggttcaagaagatcaaacctgaagccttcgaagccaacagattctacaccgtgatcaacaaaaagagcggcgagatcgtgcccatggaggtgaacttcaacttcgacgaccccaacctgatcatcctgcctctggcctttggcaagagacagggcagagaattcatctggaacgacctgctgtccctggaaaccggcagcctgaagctggccaacggaagagtgatcgagaagacactgtacaacagaagaacccggcaggatgagcctgccctgttcgtggccctgaccttcgagcggcgggaggtcctggactcctccaatatcaaaccaatgaacctgatcggcgtggcaagaggcgaaaacatccccgccgtgatcgccctgaccgaccccgagggctgcccactgagccggtttaaggatagcctgggaaacccaacccacatcctgagaatcggcgagagctataaggagaagcagcggaccatccaggccaagaaggaggtggagcagcggagagccggcggctacagccggaagtacgccagcaaagccaagaatctggcagacgatatggtgagaaacaccgctagagatctgctgtactacgccgtgacccaggatgccatgctgatcttcgccaacctgagccggggcttcggccggcagggcaagcggaccttcatggccgagagacagtacacacggatggaggactggctgaccgccaagctggcctacgagggcctgagcaagacctacctgtccaagacactggcccagtacacctccaagacatgcagcaactgtgggtttaccatcaccagcgccgactacgacagggtgctggagaagctgaagaagacagcaacaggctggatgaccacaattaacggcaaggagctgaaggtggagggccagattacctactacaacagatacaagagacagaacgtagtcaaggacctgtccgtcgagctggatagactgagcgaagaatctgtgaacaacgacatctcctcctggacaaagggcagaagcggagaagctctgagcctcctgaagaaaagattctcccatagacccgtgcaggagaagttcgtgtgcctgaactgcggcttcgagacacacgcagccgagcaagccgccctgaacatcgccagatcctggctgttcctgcggagccaggagtacaagaaataccagacaaacaagacaaccggcaacaccgataagagagccttcgtcgagacctggcagtccttttaccggaagaagcttaaggaggtgtggaaacctgccgtgcggtctggcggatctggcggaggctccaccagccccaagaaaaagagaaaagtctaagctgccttctgcggggcttgccttctggccatgcccttcttctctcccttgcacctgtacctcttggtctttgaataaagcctgagtaggaaggctagcaaaaaaaaaaaaaaaaaaaaaaaaaaaaaaaaaaaaaaaaaaaaaaaaaaaaaaaaaaaaaaaaaaaaaaaaaaaaaaaa

SEQ ID NO: 13659 - RNA, 5785 nt, synthetic construct
  source 1..5785: mol_type = other RNA
aggaaataagagagaaaagaagagtaagaagaaatataagagccaccatggcccctaagaagaagcgtaaagtgagccggatggaacgcctcgtctacgaggtgcggcagaagtgcagaaacatcgaggacatctgcatctcctgcggatctctgaacgtgaccctggagcacccactgttcatcggcggcatgtgccagaactgtaaaaactgttttctggagtgtgcctatcaatacgacgatgacggctaccagagctactgcaccatctgttgcggcggaagagaggtgctgatgtgtggaaataacaactgctgccggtgcttctgcgtggaatgcgtggacctgctggtgggccccggcgccgcccaggccgctattaaggaagatccttggaactgctacatgtgcggccacaagggcacatacggcctgctgagacggagagaggactggcctagcagactgcagatgttcttcgccaataaccacgaccaggagttcgacccccctaaggtgtaccctcccgtccccgccgagaagagaaagcccatccgggtcctgagcctgttcgatggcatcgccaccggtctgctggtgctgaaggacctgggcatccaggtggataggtacattgcctccgaggtgtgcgaggactccatcaccgtgggaatggtgcgtcatcagggcaagatcatgtacgtgggcgacgtgcggagcgtgacacagaagcatatccaggagtggggccctttcgacctggtgatcggcggcagcccttgcaatgacctgagcatcgtgaacccagcccggaagggcctgtacgagggaaccggcagactgttcttcgagttttacagactgctgcacgacgcccggcctaaggaaggcgacgaccggcccttcttttggctgttcgagaatgtggtggccatgggagtcagcgacaagcgggatattagccggttcctggagagcaaccccgtgatgatcgatgccaaggaagtgagcgccgcccaccgggccagatacttctggggcaatctgcctggcatgaacagacccctggccagcaccgtgaacgacaagctggagctgcaggagtgcctggagcacggccggatcgccaagttcagcaaggtgagaaccatcaccacccgaagcaacagcatcaaacaaggcaaggaccagcactttcctgtgttcatgaacgagaaggaggacatcctgtggtgtaccgagatggagagagtgttcgggttcccagtccactacacagatgtcagcaacatgtctagactggccagacagagactgctgggaagaagctggtccgtccctgtgatcagacacctgttcgcccctctgaaggagtacttcgcctgcgtgagcagcggcaacagcaacgccaacagccggggccccagcttctctagcggcctggtgccactgtccctgagagggagccacatgggccccatggagatctacaaaaccgtgagcgcctggaagcggcagcctgtgcgcgtgctgagcctgtttcggaatatcgataaagtcctgaaaagcctgggattcctggagagcggctctggctccggcggtggcaccctgaagtacgtggaggatgtgacaaacgtggtcagacgggatgtggagaagtggggccccttcgatctggtgtacggcagcacccaacccctgggcagctcttgtgaccggtgccctggctggtacatgtttcagttccaccggatcctgcagtacgccctgccgagacaggagtcccagcggccattcttttggattttcatggacaacttgctgctgaccgaggatgaccaggaaactaccactcggttcctgcagaccgaagccgtgaccctgcaggacgtgagaggccgggactaccagaacgccatgcgggtgtggtccaacatccctggactgaaaagcaagcacgcacctctgacccctaaagaagaggagtacctgcaggcccaggtgcggagcagaagcaagctggacgcccctaaggtggatctgctggtgaagaattgcctcctgcccctgagagagtacttcaagtatttcagccagaatagtctgcccctgggaggcagcggcggcggcggcgccagggtgctggtgagcttcgccgacgtggccgtgtacttcagccccgaggagtggggcaggctgaggcccgagcagagggccctgtacagggacgtgatgagggagacctacggccacctgggcgccctgggcttccccggccccaagcccgccctgatcagctggatggaggaggccgcctgggacagcgaggccaagcccgtgatcaagaggctggaggacgtgggccagccccccggcggcccaagcagcggcgcccctcctcccagcggcggcagcccagccggctccccaacctctaccgaggagggcacctctgagtccgccacccccgagagcggccctggcacctccaccgagcccagcgagggcagcgcacccggcagccctgccggcagccccacctccacagaggagggaaccagcaccgagcccagcgaaggcagcgccccaggcaccagcaccgagcctagtgagcaggagattaaacggatcaacaagatcagaagaagacttgtgaaagacagcaacaccaagaaggccggcaagacaggccccatgaaaaccctgctggttagagtgatgacacccgatctgagagagcggctggaaaacctgagaaagaagcctgaaaatatcccccagcccatcagcaatacatctagagccaacctgaataagctgctgaccgattacaccgaaatgaagaaggcgatcctgcatgtgtactgggaagagttccagaaggaccctgtgggcctgatgagccgggtggcccagcctgccagcaagaagatcgatcagaacaagctgaaacctgagatggacgagaagggcaacctgaccaccgccggctttgcctgctctcagtgtggccagcccctgttcgtgtacaagctggagcaggtgtctgagaagggcaaggcttacaccaactacttcggacggtgcaatgtggccgagcacgaaaagctgatcctgctggcccagctgaagcccgagaaggatagcgacgaagccgtgacatatagcctgggaaagtttgggcagagggccctggatttctacagcattcatgtgaccaaggagtccacccaccccgtgaagcccctggcccagatcgccggaaacagatacgcctccggacctgtgggaaaggccctgagcgacgcatgtatgggcacaatcgcctccttcctgtctaagtaccaggacatcatcatcgaacaccagaaggtggtgaagggcaaccagaagagactggagagcctgcgggagctggccggcaaggaaaacctggaataccctagcgtgaccctgccacctcagcctcacaccaaggagggcgttgatgcctacaacgaagtgatcgcccgggtgcgaatgtgggtgaacctgaacctgtggcagaagctgaagctaagcagagatgatgccaagcctctgctgagactgaagggattcccttcctttcctctggtcgagagacaggccaacgaagtggactggtgggacatggtgtgtaacgtgaagaagctgatcaacgagaaaaaggaggatggcaaggtgttttggcagaatctggctggctacaagagacaggaagccctgagaccatacctgagcagcgaggaagatcggaagaagggaaagaaattcgctcggtaccagctgggcgacctgctgctgcacctggaaaagaagcacggcgaggactggggaaaggtgtacgacgaggcctgggagcggattgacaagaaagtggaaggcctgagcaagcacatcaagctggaagaggaacggagaagcgaggacgcccagagcaaggccgccctgaccgactggctgcgggctaaggccagcttcgtgatcgagggcctgaaggaggccgacaaggacgagttctgcagatgcgagctgaagctgcagaagtggtacggggacctgcggggaaagcccttcgccatcgaagccgagaacagcatcctggacatcagcggcttcagcaagcagtacaactgtgccttcatctggcagaaggacggcgtgaagaagctgaacctgtacctgatcatcaactacttcaagggcggcaagctgcggttcaagaagatcaaacctgaagccttcgaagccaacagattctacaccgtgatcaacaaaaagagcggcgagatcgtgcccatggaggtgaacttcaacttcgacgaccccaacctgatcatcctgcctctggcctttggcaagagacagggcagagaattcatctggaacgacctgctgtccctggaaaccggcagcctgaagctggccaacggaagagtgatcgagaagacactgtacaacagaagaacccggcaggatgagcctgccctgttcgtggccctgaccttcgagcggcgggaggtcctggactcctccaatatcaaaccaatgaacctgatcggcgtggcaagaggcgaaaacatccccgccgtgatcgccctgaccgaccccgagggctgcccactgagccggtttaaggatagcctgggaaacccaacccacatcctgagaatcggcgagagctataaggagaagcagcggaccatccaggccaagaaggaggtggagcagcggagagccggcggctacagccggaagtacgccagcaaagccaagaatctggcagacgatatggtgagaaacaccgctagagatctgctgtactacgccgtgacccaggatgccatgctgatcttcgccaacctgagccggggcttcggccggcagggcaagcggaccttcatggccgagagacagtacacacggatggaggactggctgaccgccaagctggcctacgagggcctgagcaagacctacctgtccaagacactggcccagtacacctccaagacatgcagcaactgtgggtttaccatcaccagcgccgactacgacagggtgctggagaagctgaagaagacagcaacaggctggatgaccacaattaacggcaaggagctgaaggtggagggccagattacctactacaacagatacaagagacagaacgtagtcaaggacctgtccgtcgagctggatagactgagcgaagaatctgtgaacaacgacatctcctcctggacaaagggcagaagcggagaagctctgagcctcctgaagaaaagattctcccatagacccgtgcaggagaagttcgtgtgcctgaactgcggcttcgagacacacgcagccgagcaagccgccctgaacatcgccagatcctggctgttcctgcggagccaggagtacaagaaataccagacaaacaagacaaccggcaacaccgataagagagccttcgtcgagacctggcagtccttttaccggaagaagcttaaggaggtgtggaaacctgccgtgcggtctggcggatctggcggaggctccaccagccccaagaaaaagagaaaagtctaagctgccttctgcggggcttgccttctggccatgcccttcttctctcccttgcacctgtacctcttggtctttgaataaagcctgagtaggaaggctagcaaaaaaaaaaaaaaaaaaaaaaaaaaaaaaaaaaaaaaaaaaaaaaaaaaaaaaaaaaaaaaaaaaaaaaaaaaaaaaaa

SEQ ID NO: 13660 - RNA, 5785 nt, synthetic construct
  source 1..5785: mol_type = other RNA
aggaaataagagagaaaagaagagtaagaagaaatataagagccaccatggcccctaagaagaagcgtaaagtgagccggatggaacgcctcgtctacgaggtgcggcagaagtgcagaaacatcgaggacatctgcatctcctgcggatctctgaacgtgaccctggagcacccactgttcatcggcggcatgtgccagaactgtaaaaactgttttctggagtgtgcctatcaatacgacgatgacggctaccagagctactgcaccatctgttgcggcggaagagaggtgctgatgtgtggaaataacaactgctgccggtgcttctgcgtggaatgcgtggacctgctggtgggccccggcgccgcccaggccgctattaaggaagatccttggaactgctacatgtgcggccacaagggcacatacggcctgctgagacggagagaggactggcctagcagactgcagatgttcttcgccaataaccacgaccaggagttcgacccccctaaggtgtaccctcccgtccccgccgagaagagaaagcccatccgggtcctgagcctgttcgatggcatcgccaccggtctgctggtgctgaaggacctgggcatccaggtggataggtacattgcctccgaggtgtgcgaggactccatcaccgtgggaatggtgcgtcatcagggcaagatcatgtacgtgggcgacgtgcggagcgtgacacagaagcatatccaggagtggggccctttcgacctggtgatcggcggcagcccttgcaatgacctgagcatcgtgaacccagcccggaagggcctgtacgagggaaccggcagactgttcttcgagttttacagactgctgcacgacgcccggcctaaggaaggcgacgaccggcccttcttttggctgttcgagaatgtggtggccatgggagtcagcgacaagcgggatattagccggttcctggagagcaaccccgtgatgatcgatgccaaggaagtgagcgccgcccaccgggccagatacttctggggcaatctgcctggcatgaacagacccctggccagcaccgtgaacgacaagctggagctgcaggagtgcctggagcacggccggatcgccaagttcagcaaggtgagaaccatcaccacccgaagcaacagcatcaaacaaggcaaggaccagcactttcctgtgttcatgaacgagaaggaggacatcctgtggtgtaccgagatggagagagtgttcgggttcccagtccactacacagatgtcagcaacatgtctagactggccagacagagactgctgggaagaagctggtccgtccctgtgatcagacacctgttcgcccctctgaaggagtacttcgcctgcgtgagcagcggcaacagcaacgccaacagccggggccccagcttctctagcggcctggtgccactgtccctgagagggagccacatgggccccatggagatctacaaaaccgtgagcgcctggaagcggcagcctgtgcgcgtgctgagcctgtttcggaatatcgataaagtcctgaaaagcctgggattcctggagagcggctctggctccggcggtggcaccctgaagtacgtggaggatgtgacaaacgtggtcagacgggatgtggagaagtggggccccttcgatctggtgtacggcagcacccaacccctgggcagctcttgtgaccggtgccctggctggtacatgtttcagttccaccggatcctgcagtacgccctgccgagacaggagtcccagcggccattcttttggattttcatggacaacttgctgctgaccgaggatgaccaggaaactaccactcggttcctgcagaccgaagccgtgaccctgcaggacgtgagaggccgggactaccagaacgccatgcgggtgtggtccaacatccctggactgaaaagcaagcacgcacctctgacccctaaagaagaggagtacctgcaggcccaggtgcggagcagaagcaagctggacgcccctaaggtggatctgctggtgaagaattgcctcctgcccctgagagagtacttcaagtatttcagccagaatagtctgcccctgggaggcagcggcggcggcgcccagaaggtgctgaccttcagggacgtggccatcgagttcagcctggaggagtggaagttcctggaccccgcccagcagaacctgtacagggacgtgatgctggagaactacaggaacctgttcagcatcggcctgaccgtgagcaagcccggcctgatcacctgcctggagcagaggaaggccccctggaacctgaagaggagggaggccgtggacggccaccccgccatgagcagccacggcggcccaagcagcggcgcccctcctcccagcggcggcagcccagccggctccccaacctctaccgaggagggcacctctgagtccgccacccccgagagcggccctggcacctccaccgagcccagcgagggcagcgcacccggcagccctgccggcagccccacctccacagaggagggaaccagcaccgagcccagcgaaggcagcgccccaggcaccagcaccgagcctagtgagcaggagattaaacggatcaacaagatcagaagaagacttgtgaaagacagcaacaccaagaaggccggcaagacaggccccatgaaaaccctgctggttagagtgatgacacccgatctgagagagcggctggaaaacctgagaaagaagcctgaaaatatcccccagcccatcagcaatacatctagagccaacctgaataagctgctgaccgattacaccgaaatgaagaaggcgatcctgcatgtgtactgggaagagttccagaaggaccctgtgggcctgatgagccgggtggcccagcctgccagcaagaagatcgatcagaacaagctgaaacctgagatggacgagaagggcaacctgaccaccgccggctttgcctgctctcagtgtggccagcccctgttcgtgtacaagctggagcaggtgtctgagaagggcaaggcttacaccaactacttcggacggtgcaatgtggccgagcacgaaaagctgatcctgctggcccagctgaagcccgagaaggatagcgacgaagccgtgacatatagcctgggaaagtttgggcagagggccctggatttctacagcattcatgtgaccaaggagtccacccaccccgtgaagcccctggcccagatcgccggaaacagatacgcctccggacctgtgggaaaggccctgagcgacgcatgtatgggcacaatcgcctccttcctgtctaagtaccaggacatcatcatcgaacaccagaaggtggtgaagggcaaccagaagagactggagagcctgcgggagctggccggcaaggaaaacctggaataccctagcgtgaccctgccacctcagcctcacaccaaggagggcgttgatgcctacaacgaagtgatcgcccgggtgcgaatgtgggtgaacctgaacctgtggcagaagctgaagctaagcagagatgatgccaagcctctgctgagactgaagggattcccttcctttcctctggtcgagagacaggccaacgaagtggactggtgggacatggtgtgtaacgtgaagaagctgatcaacgagaaaaaggaggatggcaaggtgttttggcagaatctggctggctacaagagacaggaagccctgagaccatacctgagcagcgaggaagatcggaagaagggaaagaaattcgctcggtaccagctgggcgacctgctgctgcacctggaaaagaagcacggcgaggactggggaaaggtgtacgacgaggcctgggagcggattgacaagaaagtggaaggcctgagcaagcacatcaagctggaagaggaacggagaagcgaggacgcccagagcaaggccgccctgaccgactggctgcgggctaaggccagcttcgtgatcgagggcctgaaggaggccgacaaggacgagttctgcagatgcgagctgaagctgcagaagtggtacggggacctgcggggaaagcccttcgccatcgaagccgagaacagcatcctggacatcagcggcttcagcaagcagtacaactgtgccttcatctggcagaaggacggcgtgaagaagctgaacctgtacctgatcatcaactacttcaagggcggcaagctgcggttcaagaagatcaaacctgaagccttcgaagccaacagattctacaccgtgatcaacaaaaagagcggcgagatcgtgcccatggaggtgaacttcaacttcgacgaccccaacctgatcatcctgcctctggcctttggcaagagacagggcagagaattcatctggaacgacctgctgtccctggaaaccggcagcctgaagctggccaacggaagagtgatcgagaagacactgtacaacagaagaacccggcaggatgagcctgccctgttcgtggccctgaccttcgagcggcgggaggtcctggactcctccaatatcaaaccaatgaacctgatcggcgtggcaagaggcgaaaacatccccgccgtgatcgccctgaccgaccccgagggctgcccactgagccggtttaaggatagcctgggaaacccaacccacatcctgagaatcggcgagagctataaggagaagcagcggaccatccaggccaagaaggaggtggagcagcggagagccggcggctacagccggaagtacgccagcaaagccaagaatctggcagacgatatggtgagaaacaccgctagagatctgctgtactacgccgtgacccaggatgccatgctgatcttcgccaacctgagccggggcttcggccggcagggcaagcggaccttcatggccgagagacagtacacacggatggaggactggctgaccgccaagctggcctacgagggcctgagcaagacctacctgtccaagacactggcccagtacacctccaagacatgcagcaactgtgggtttaccatcaccagcgccgactacgacagggtgctggagaagctgaagaagacagcaacaggctggatgaccacaattaacggcaaggagctgaaggtggagggccagattacctactacaacagatacaagagacagaacgtagtcaaggacctgtccgtcgagctggatagactgagcgaagaatctgtgaacaacgacatctcctcctggacaaagggcagaagcggagaagctctgagcctcctgaagaaaagattctcccatagacccgtgcaggagaagttcgtgtgcctgaactgcggcttcgagacacacgcagccgagcaagccgccctgaacatcgccagatcctggctgttcctgcggagccaggagtacaagaaataccagacaaacaagacaaccggcaacaccgataagagagccttcgtcgagacctggcagtccttttaccggaagaagcttaaggaggtgtggaaacctgccgtgcggtctggcggatctggcggaggctccaccagccccaagaaaaagagaaaagtctaagctgccttctgcggggcttgccttctggccatgcccttcttctctcccttgcacctgtacctcttggtctttgaataaagcctgagtaggaaggctagcaaaaaaaaaaaaaaaaaaaaaaaaaaaaaaaaaaaaaaaaaaaaaaaaaaaaaaaaaaaaaaaaaaaaaaaaaaaaaaaa

SEQ ID NO: 13661 - RNA, 5785 nt, synthetic construct
  source 1..5785: mol_type = other RNA
aggaaataagagagaaaagaagagtaagaagaaatataagagccaccatggcccctaagaagaagcgtaaagtgagccggatggaacgcctcgtctacgaggtgcggcagaagtgcagaaacatcgaggacatctgcatctcctgcggatctctgaacgtgaccctggagcacccactgttcatcggcggcatgtgccagaactgtaaaaactgttttctggagtgtgcctatcaatacgacgatgacggctaccagagctactgcaccatctgttgcggcggaagagaggtgctgatgtgtggaaataacaactgctgccggtgcttctgcgtggaatgcgtggacctgctggtgggccccggcgccgcccaggccgctattaaggaagatccttggaactgctacatgtgcggccacaagggcacatacggcctgctgagacggagagaggactggcctagcagactgcagatgttcttcgccaataaccacgaccaggagttcgacccccctaaggtgtaccctcccgtccccgccgagaagagaaagcccatccgggtcctgagcctgttcgatggcatcgccaccggtctgctggtgctgaaggacctgggcatccaggtggataggtacattgcctccgaggtgtgcgaggactccatcaccgtgggaatggtgcgtcatcagggcaagatcatgtacgtgggcgacgtgcggagcgtgacacagaagcatatccaggagtggggccctttcgacctggtgatcggcggcagcccttgcaatgacctgagcatcgtgaacccagcccggaagggcctgtacgagggaaccggcagactgttcttcgagttttacagactgctgcacgacgcccggcctaaggaaggcgacgaccggcccttcttttggctgttcgagaatgtggtggccatgggagtcagcgacaagcgggatattagccggttcctggagagcaaccccgtgatgatcgatgccaaggaagtgagcgccgcccaccgggccagatacttctggggcaatctgcctggcatgaacagacccctggccagcaccgtgaacgacaagctggagctgcaggagtgcctggagcacggccggatcgccaagttcagcaaggtgagaaccatcaccacccgaagcaacagcatcaaacaaggcaaggaccagcactttcctgtgttcatgaacgagaaggaggacatcctgtggtgtaccgagatggagagagtgttcgggttcccagtccactacacagatgtcagcaacatgtctagactggccagacagagactgctgggaagaagctggtccgtccctgtgatcagacacctgttcgcccctctgaaggagtacttcgcctgcgtgagcagcggcaacagcaacgccaacagccggggccccagcttctctagcggcctggtgccactgtccctgagagggagccacatgggccccatggagatctacaaaaccgtgagcgcctggaagcggcagcctgtgcgcgtgctgagcctgtttcggaatatcgataaagtcctgaaaagcctgggattcctggagagcggctctggctccggcggtggcaccctgaagtacgtggaggatgtgacaaacgtggtcagacgggatgtggagaagtggggccccttcgatctggtgtacggcagcacccaacccctgggcagctcttgtgaccggtgccctggctggtacatgtttcagttccaccggatcctgcagtacgccctgccgagacaggagtcccagcggccattcttttggattttcatggacaacttgctgctgaccgaggatgaccaggaaactaccactcggttcctgcagaccgaagccgtgaccctgcaggacgtgagaggccgggactaccagaacgccatgcgggtgtggtccaacatccctggactgaaaagcaagcacgcacctctgacccctaaagaagaggagtacctgcaggcccaggtgcggagcagaagcaagctggacgcccctaaggtggatctgctggtgaagaattgcctcctgcccctgagagagtacttcaagtatttcagccagaatagtctgcccctgggaggcagcggcggcggcccccaggacctgatgaccttcgaggacgtggccgtggagttcacccagtgggagtggggccagctggaccccgcccagaaggacctgtacagggtggtgatgctggagaacttcaagaacctggccagcctgggcttccccgtggccaagccctacgtgatcagccagctggagaagggcaaggagccctgcgtgctggagggcgagatcagcaccgactgggagaagaggcccaaggccaagggcggcccaagcagcggcgcccctcctcccagcggcggcagcccagccggctccccaacctctaccgaggagggcacctctgagtccgccacccccgagagcggccctggcacctccaccgagcccagcgagggcagcgcacccggcagccctgccggcagccccacctccacagaggagggaaccagcaccgagcccagcgaaggcagcgccccaggcaccagcaccgagcctagtgagcaggagattaaacggatcaacaagatcagaagaagacttgtgaaagacagcaacaccaagaaggccggcaagacaggccccatgaaaaccctgctggttagagtgatgacacccgatctgagagagcggctggaaaacctgagaaagaagcctgaaaatatcccccagcccatcagcaatacatctagagccaacctgaataagctgctgaccgattacaccgaaatgaagaaggcgatcctgcatgtgtactgggaagagttccagaaggaccctgtgggcctgatgagccgggtggcccagcctgccagcaagaagatcgatcagaacaagctgaaacctgagatggacgagaagggcaacctgaccaccgccggctttgcctgctctcagtgtggccagcccctgttcgtgtacaagctggagcaggtgtctgagaagggcaaggcttacaccaactacttcggacggtgcaatgtggccgagcacgaaaagctgatcctgctggcccagctgaagcccgagaaggatagcgacgaagccgtgacatatagcctgggaaagtttgggcagagggccctggatttctacagcattcatgtgaccaaggagtccacccaccccgtgaagcccctggcccagatcgccggaaacagatacgcctccggacctgtgggaaaggccctgagcgacgcatgtatgggcacaatcgcctccttcctgtctaagtaccaggacatcatcatcgaacaccagaaggtggtgaagggcaaccagaagagactggagagcctgcgggagctggccggcaaggaaaacctggaataccctagcgtgaccctgccacctcagcctcacaccaaggagggcgttgatgcctacaacgaagtgatcgcccgggtgcgaatgtgggtgaacctgaacctgtggcagaagctgaagctaagcagagatgatgccaagcctctgctgagactgaagggattcccttcctttcctctggtcgagagacaggccaacgaagtggactggtgggacatggtgtgtaacgtgaagaagctgatcaacgagaaaaaggaggatggcaaggtgttttggcagaatctggctggctacaagagacaggaagccctgagaccatacctgagcagcgaggaagatcggaagaagggaaagaaattcgctcggtaccagctgggcgacctgctgctgcacctggaaaagaagcacggcgaggactggggaaaggtgtacgacgaggcctgggagcggattgacaagaaagtggaaggcctgagcaagcacatcaagctggaagaggaacggagaagcgaggacgcccagagcaaggccgccctgaccgactggctgcgggctaaggccagcttcgtgatcgagggcctgaaggaggccgacaaggacgagttctgcagatgcgagctgaagctgcagaagtggtacggggacctgcggggaaagcccttcgccatcgaagccgagaacagcatcctggacatcagcggcttcagcaagcagtacaactgtgccttcatctggcagaaggacggcgtgaagaagctgaacctgtacctgatcatcaactacttcaagggcggcaagctgcggttcaagaagatcaaacctgaagccttcgaagccaacagattctacaccgtgatcaacaaaaagagcggcgagatcgtgcccatggaggtgaacttcaacttcgacgaccccaacctgatcatcctgcctctggcctttggcaagagacagggcagagaattcatctggaacgacctgctgtccctggaaaccggcagcctgaagctggccaacggaagagtgatcgagaagacactgtacaacagaagaacccggcaggatgagcctgccctgttcgtggccctgaccttcgagcggcgggaggtcctggactcctccaatatcaaaccaatgaacctgatcggcgtggcaagaggcgaaaacatccccgccgtgatcgccctgaccgaccccgagggctgcccactgagccggtttaaggatagcctgggaaacccaacccacatcctgagaatcggcgagagctataaggagaagcagcggaccatccaggccaagaaggaggtggagcagcggagagccggcggctacagccggaagtacgccagcaaagccaagaatctggcagacgatatggtgagaaacaccgctagagatctgctgtactacgccgtgacccaggatgccatgctgatcttcgccaacctgagccggggcttcggccggcagggcaagcggaccttcatggccgagagacagtacacacggatggaggactggctgaccgccaagctggcctacgagggcctgagcaagacctacctgtccaagacactggcccagtacacctccaagacatgcagcaactgtgggtttaccatcaccagcgccgactacgacagggtgctggagaagctgaagaagacagcaacaggctggatgaccacaattaacggcaaggagctgaaggtggagggccagattacctactacaacagatacaagagacagaacgtagtcaaggacctgtccgtcgagctggatagactgagcgaagaatctgtgaacaacgacatctcctcctggacaaagggcagaagcggagaagctctgagcctcctgaagaaaagattctcccatagacccgtgcaggagaagttcgtgtgcctgaactgcggcttcgagacacacgcagccgagcaagccgccctgaacatcgccagatcctggctgttcctgcggagccaggagtacaagaaataccagacaaacaagacaaccggcaacaccgataagagagccttcgtcgagacctggcagtccttttaccggaagaagcttaaggaggtgtggaaacctgccgtgcggtctggcggatctggcggaggctccaccagccccaagaaaaagagaaaagtctaagctgccttctgcggggcttgccttctggccatgcccttcttctctcccttgcacctgtacctcttggtctttgaataaagcctgagtaggaaggctagcaaaaaaaaaaaaaaaaaaaaaaaaaaaaaaaaaaaaaaaaaaaaaaaaaaaaaaaaaaaaaaaaaaaaaaaaaaaaaaaa

SEQ ID NO: 13662 - RNA, 5785 nt, synthetic construct
  source 1..5785: mol_type = other RNA
aggaaataagagagaaaagaagagtaagaagaaatataagagccaccatggcccctaagaagaagcgtaaagtgagccggatggaacgcctcgtctacgaggtgcggcagaagtgcagaaacatcgaggacatctgcatctcctgcggatctctgaacgtgaccctggagcacccactgttcatcggcggcatgtgccagaactgtaaaaactgttttctggagtgtgcctatcaatacgacgatgacggctaccagagctactgcaccatctgttgcggcggaagagaggtgctgatgtgtggaaataacaactgctgccggtgcttctgcgtggaatgcgtggacctgctggtgggccccggcgccgcccaggccgctattaaggaagatccttggaactgctacatgtgcggccacaagggcacatacggcctgctgagacggagagaggactggcctagcagactgcagatgttcttcgccaataaccacgaccaggagttcgacccccctaaggtgtaccctcccgtccccgccgagaagagaaagcccatccgggtcctgagcctgttcgatggcatcgccaccggtctgctggtgctgaaggacctgggcatccaggtggataggtacattgcctccgaggtgtgcgaggactccatcaccgtgggaatggtgcgtcatcagggcaagatcatgtacgtgggcgacgtgcggagcgtgacacagaagcatatccaggagtggggccctttcgacctggtgatcggcggcagcccttgcaatgacctgagcatcgtgaacccagcccggaagggcctgtacgagggaaccggcagactgttcttcgagttttacagactgctgcacgacgcccggcctaaggaaggcgacgaccggcccttcttttggctgttcgagaatgtggtggccatgggagtcagcgacaagcgggatattagccggttcctggagagcaaccccgtgatgatcgatgccaaggaagtgagcgccgcccaccgggccagatacttctggggcaatctgcctggcatgaacagacccctggccagcaccgtgaacgacaagctggagctgcaggagtgcctggagcacggccggatcgccaagttcagcaaggtgagaaccatcaccacccgaagcaacagcatcaaacaaggcaaggaccagcactttcctgtgttcatgaacgagaaggaggacatcctgtggtgtaccgagatggagagagtgttcgggttcccagtccactacacagatgtcagcaacatgtctagactggccagacagagactgctgggaagaagctggtccgtccctgtgatcagacacctgttcgcccctctgaaggagtacttcgcctgcgtgagcagcggcaacagcaacgccaacagccggggccccagcttctctagcggcctggtgccactgtccctgagagggagccacatgggccccatggagatctacaaaaccgtgagcgcctggaagcggcagcctgtgcgcgtgctgagcctgtttcggaatatcgataaagtcctgaaaagcctgggattcctggagagcggctctggctccggcggtggcaccctgaagtacgtggaggatgtgacaaacgtggtcagacgggatgtggagaagtggggccccttcgatctggtgtacggcagcacccaacccctgggcagctcttgtgaccggtgccctggctggtacatgtttcagttccaccggatcctgcagtacgccctgccgagacaggagtcccagcggccattcttttggattttcatggacaacttgctgctgaccgaggatgaccaggaaactaccactcggttcctgcagaccgaagccgtgaccctgcaggacgtgagaggccgggactaccagaacgccatgcgggtgtggtccaacatccctggactgaaaagcaagcacgcacctctgacccctaaagaagaggagtacctgcaggcccaggtgcggagcagaagcaagctggacgcccctaaggtggatctgctggtgaagaattgcctcctgcccctgagagagtacttcaagtatttcagccagaatagtctgcccctgggaggcagcggcggcggcagcctggagagcgacctgttcagggacgtggccatcgtgttcagccaggaggagtgggagcagctggcccccgcccagagggacctgtacagggacgtgatgctggagacctacagcaacctggtgagcctgggcctggccatcgccaagcccgacgtgatcagcttcctggagcagggcaaggagccctgggtggtggagaagatgagcaggggcggcctgtgccccgtgctggagagcaggggcggcccaagcagcggcgcccctcctcccagcggcggcagcccagccggctccccaacctctaccgaggagggcacctctgagtccgccacccccgagagcggccctggcacctccaccgagcccagcgagggcagcgcacccggcagccctgccggcagccccacctccacagaggagggaaccagcaccgagcccagcgaaggcagcgccccaggcaccagcaccgagcctagtgagcaggagattaaacggatcaacaagatcagaagaagacttgtgaaagacagcaacaccaagaaggccggcaagacaggccccatgaaaaccctgctggttagagtgatgacacccgatctgagagagcggctggaaaacctgagaaagaagcctgaaaatatcccccagcccatcagcaatacatctagagccaacctgaataagctgctgaccgattacaccgaaatgaagaaggcgatcctgcatgtgtactgggaagagttccagaaggaccctgtgggcctgatgagccgggtggcccagcctgccagcaagaagatcgatcagaacaagctgaaacctgagatggacgagaagggcaacctgaccaccgccggctttgcctgctctcagtgtggccagcccctgttcgtgtacaagctggagcaggtgtctgagaagggcaaggcttacaccaactacttcggacggtgcaatgtggccgagcacgaaaagctgatcctgctggcccagctgaagcccgagaaggatagcgacgaagccgtgacatatagcctgggaaagtttgggcagagggccctggatttctacagcattcatgtgaccaaggagtccacccaccccgtgaagcccctggcccagatcgccggaaacagatacgcctccggacctgtgggaaaggccctgagcgacgcatgtatgggcacaatcgcctccttcctgtctaagtaccaggacatcatcatcgaacaccagaaggtggtgaagggcaaccagaagagactggagagcctgcgggagctggccggcaaggaaaacctggaataccctagcgtgaccctgccacctcagcctcacaccaaggagggcgttgatgcctacaacgaagtgatcgcccgggtgcgaatgtgggtgaacctgaacctgtggcagaagctgaagctaagcagagatgatgccaagcctctgctgagactgaagggattcccttcctttcctctggtcgagagacaggccaacgaagtggactggtgggacatggtgtgtaacgtgaagaagctgatcaacgagaaaaaggaggatggcaaggtgttttggcagaatctggctggctacaagagacaggaagccctgagaccatacctgagcagcgaggaagatcggaagaagggaaagaaattcgctcggtaccagctgggcgacctgctgctgcacctggaaaagaagcacggcgaggactggggaaaggtgtacgacgaggcctgggagcggattgacaagaaagtggaaggcctgagcaagcacatcaagctggaagaggaacggagaagcgaggacgcccagagcaaggccgccctgaccgactggctgcgggctaaggccagcttcgtgatcgagggcctgaaggaggccgacaaggacgagttctgcagatgcgagctgaagctgcagaagtggtacggggacctgcggggaaagcccttcgccatcgaagccgagaacagcatcctggacatcagcggcttcagcaagcagtacaactgtgccttcatctggcagaaggacggcgtgaagaagctgaacctgtacctgatcatcaactacttcaagggcggcaagctgcggttcaagaagatcaaacctgaagccttcgaagccaacagattctacaccgtgatcaacaaaaagagcggcgagatcgtgcccatggaggtgaacttcaacttcgacgaccccaacctgatcatcctgcctctggcctttggcaagagacagggcagagaattcatctggaacgacctgctgtccctggaaaccggcagcctgaagctggccaacggaagagtgatcgagaagacactgtacaacagaagaacccggcaggatgagcctgccctgttcgtggccctgaccttcgagcggcgggaggtcctggactcctccaatatcaaaccaatgaacctgatcggcgtggcaagaggcgaaaacatccccgccgtgatcgccctgaccgaccccgagggctgcccactgagccggtttaaggatagcctgggaaacccaacccacatcctgagaatcggcgagagctataaggagaagcagcggaccatccaggccaagaaggaggtggagcagcggagagccggcggctacagccggaagtacgccagcaaagccaagaatctggcagacgatatggtgagaaacaccgctagagatctgctgtactacgccgtgacccaggatgccatgctgatcttcgccaacctgagccggggcttcggccggcagggcaagcggaccttcatggccgagagacagtacacacggatggaggactggctgaccgccaagctggcctacgagggcctgagcaagacctacctgtccaagacactggcccagtacacctccaagacatgcagcaactgtgggtttaccatcaccagcgccgactacgacagggtgctggagaagctgaagaagacagcaacaggctggatgaccacaattaacggcaaggagctgaaggtggagggccagattacctactacaacagatacaagagacagaacgtagtcaaggacctgtccgtcgagctggatagactgagcgaagaatctgtgaacaacgacatctcctcctggacaaagggcagaagcggagaagctctgagcctcctgaagaaaagattctcccatagacccgtgcaggagaagttcgtgtgcctgaactgcggcttcgagacacacgcagccgagcaagccgccctgaacatcgccagatcctggctgttcctgcggagccaggagtacaagaaataccagacaaacaagacaaccggcaacaccgataagagagccttcgtcgagacctggcagtccttttaccggaagaagcttaaggaggtgtggaaacctgccgtgcggtctggcggatctggcggaggctccaccagccccaagaaaaagagaaaagtctaagctgccttctgcggggcttgccttctggccatgcccttcttctctcccttgcacctgtacctcttggtctttgaataaagcctgagtaggaaggctagcaaaaaaaaaaaaaaaaaaaaaaaaaaaaaaaaaaaaaaaaaaaaaaaaaaaaaaaaaaaaaaaaaaaaaaaaaaaaaaaa

SEQ ID NO: 13663 - RNA, 5785 nt, synthetic construct
  source 1..5785: mol_type = other RNA
aggaaataagagagaaaagaagagtaagaagaaatataagagccaccatggcccctaagaagaagcgtaaagtgagccggatggaacgcctcgtctacgaggtgcggcagaagtgcagaaacatcgaggacatctgcatctcctgcggatctctgaacgtgaccctggagcacccactgttcatcggcggcatgtgccagaactgtaaaaactgttttctggagtgtgcctatcaatacgacgatgacggctaccagagctactgcaccatctgttgcggcggaagagaggtgctgatgtgtggaaataacaactgctgccggtgcttctgcgtggaatgcgtggacctgctggtgggccccggcgccgcccaggccgctattaaggaagatccttggaactgctacatgtgcggccacaagggcacatacggcctgctgagacggagagaggactggcctagcagactgcagatgttcttcgccaataaccacgaccaggagttcgacccccctaaggtgtaccctcccgtccccgccgagaagagaaagcccatccgggtcctgagcctgttcgatggcatcgccaccggtctgctggtgctgaaggacctgggcatccaggtggataggtacattgcctccgaggtgtgcgaggactccatcaccgtgggaatggtgcgtcatcagggcaagatcatgtacgtgggcgacgtgcggagcgtgacacagaagcatatccaggagtggggccctttcgacctggtgatcggcggcagcccttgcaatgacctgagcatcgtgaacccagcccggaagggcctgtacgagggaaccggcagactgttcttcgagttttacagactgctgcacgacgcccggcctaaggaaggcgacgaccggcccttcttttggctgttcgagaatgtggtggccatgggagtcagcgacaagcgggatattagccggttcctggagagcaaccccgtgatgatcgatgccaaggaagtgagcgccgcccaccgggccagatacttctggggcaatctgcctggcatgaacagacccctggccagcaccgtgaacgacaagctggagctgcaggagtgcctggagcacggccggatcgccaagttcagcaaggtgagaaccatcaccacccgaagcaacagcatcaaacaaggcaaggaccagcactttcctgtgttcatgaacgagaaggaggacatcctgtggtgtaccgagatggagagagtgttcgggttcccagtccactacacagatgtcagcaacatgtctagactggccagacagagactgctgggaagaagctggtccgtccctgtgatcagacacctgttcgcccctctgaaggagtacttcgcctgcgtgagcagcggcaacagcaacgccaacagccggggccccagcttctctagcggcctggtgccactgtccctgagagggagccacatgggccccatggagatctacaaaaccgtgagcgcctggaagcggcagcctgtgcgcgtgctgagcctgtttcggaatatcgataaagtcctgaaaagcctgggattcctggagagcggctctggctccggcggtggcaccctgaagtacgtggaggatgtgacaaacgtggtcagacgggatgtggagaagtggggccccttcgatctggtgtacggcagcacccaacccctgggcagctcttgtgaccggtgccctggctggtacatgtttcagttccaccggatcctgcagtacgccctgccgagacaggagtcccagcggccattcttttggattttcatggacaacttgctgctgaccgaggatgaccaggaaactaccactcggttcctgcagaccgaagccgtgaccctgcaggacgtgagaggccgggactaccagaacgccatgcgggtgtggtccaacatccctggactgaaaagcaagcacgcacctctgacccctaaagaagaggagtacctgcaggcccaggtgcggagcagaagcaagctggacgcccctaaggtggatctgctggtgaagaattgcctcctgcccctgagagagtacttcaagtatttcagccagaatagtctgcccctgggaggcagcggcggcggcatgatgaccgccgtgagcctgaccaccaggccccaggagagcgtggccttcgaggacgtggccgtgtacttcaccaccaaggagtgggccatcatggtgcccgccgagagggccctgtacagggacgtgatgctggagaactacgaggccgtggccttcgtggtgagccccaccagcaagcccgccctggtgagccacctggagcagggcaaggagagctgcttcaccaggccccagggcgtgggcggcccaagcagcggcgcccctcctcccagcggcggcagcccagccggctccccaacctctaccgaggagggcacctctgagtccgccacccccgagagcggccctggcacctccaccgagcccagcgagggcagcgcacccggcagccctgccggcagccccacctccacagaggagggaaccagcaccgagcccagcgaaggcagcgccccaggcaccagcaccgagcctagtgagcaggagattaaacggatcaacaagatcagaagaagacttgtgaaagacagcaacaccaagaaggccggcaagacaggccccatgaaaaccctgctggttagagtgatgacacccgatctgagagagcggctggaaaacctgagaaagaagcctgaaaatatcccccagcccatcagcaatacatctagagccaacctgaataagctgctgaccgattacaccgaaatgaagaaggcgatcctgcatgtgtactgggaagagttccagaaggaccctgtgggcctgatgagccgggtggcccagcctgccagcaagaagatcgatcagaacaagctgaaacctgagatggacgagaagggcaacctgaccaccgccggctttgcctgctctcagtgtggccagcccctgttcgtgtacaagctggagcaggtgtctgagaagggcaaggcttacaccaactacttcggacggtgcaatgtggccgagcacgaaaagctgatcctgctggcccagctgaagcccgagaaggatagcgacgaagccgtgacatatagcctgggaaagtttgggcagagggccctggatttctacagcattcatgtgaccaaggagtccacccaccccgtgaagcccctggcccagatcgccggaaacagatacgcctccggacctgtgggaaaggccctgagcgacgcatgtatgggcacaatcgcctccttcctgtctaagtaccaggacatcatcatcgaacaccagaaggtggtgaagggcaaccagaagagactggagagcctgcgggagctggccggcaaggaaaacctggaataccctagcgtgaccctgccacctcagcctcacaccaaggagggcgttgatgcctacaacgaagtgatcgcccgggtgcgaatgtgggtgaacctgaacctgtggcagaagctgaagctaagcagagatgatgccaagcctctgctgagactgaagggattcccttcctttcctctggtcgagagacaggccaacgaagtggactggtgggacatggtgtgtaacgtgaagaagctgatcaacgagaaaaaggaggatggcaaggtgttttggcagaatctggctggctacaagagacaggaagccctgagaccatacctgagcagcgaggaagatcggaagaagggaaagaaattcgctcggtaccagctgggcgacctgctgctgcacctggaaaagaagcacggcgaggactggggaaaggtgtacgacgaggcctgggagcggattgacaagaaagtggaaggcctgagcaagcacatcaagctggaagaggaacggagaagcgaggacgcccagagcaaggccgccctgaccgactggctgcgggctaaggccagcttcgtgatcgagggcctgaaggaggccgacaaggacgagttctgcagatgcgagctgaagctgcagaagtggtacggggacctgcggggaaagcccttcgccatcgaagccgagaacagcatcctggacatcagcggcttcagcaagcagtacaactgtgccttcatctggcagaaggacggcgtgaagaagctgaacctgtacctgatcatcaactacttcaagggcggcaagctgcggttcaagaagatcaaacctgaagccttcgaagccaacagattctacaccgtgatcaacaaaaagagcggcgagatcgtgcccatggaggtgaacttcaacttcgacgaccccaacctgatcatcctgcctctggcctttggcaagagacagggcagagaattcatctggaacgacctgctgtccctggaaaccggcagcctgaagctggccaacggaagagtgatcgagaagacactgtacaacagaagaacccggcaggatgagcctgccctgttcgtggccctgaccttcgagcggcgggaggtcctggactcctccaatatcaaaccaatgaacctgatcggcgtggcaagaggcgaaaacatccccgccgtgatcgccctgaccgaccccgagggctgcccactgagccggtttaaggatagcctgggaaacccaacccacatcctgagaatcggcgagagctataaggagaagcagcggaccatccaggccaagaaggaggtggagcagcggagagccggcggctacagccggaagtacgccagcaaagccaagaatctggcagacgatatggtgagaaacaccgctagagatctgctgtactacgccgtgacccaggatgccatgctgatcttcgccaacctgagccggggcttcggccggcagggcaagcggaccttcatggccgagagacagtacacacggatggaggactggctgaccgccaagctggcctacgagggcctgagcaagacctacctgtccaagacactggcccagtacacctccaagacatgcagcaactgtgggtttaccatcaccagcgccgactacgacagggtgctggagaagctgaagaagacagcaacaggctggatgaccacaattaacggcaaggagctgaaggtggagggccagattacctactacaacagatacaagagacagaacgtagtcaaggacctgtccgtcgagctggatagactgagcgaagaatctgtgaacaacgacatctcctcctggacaaagggcagaagcggagaagctctgagcctcctgaagaaaagattctcccatagacccgtgcaggagaagttcgtgtgcctgaactgcggcttcgagacacacgcagccgagcaagccgccctgaacatcgccagatcctggctgttcctgcggagccaggagtacaagaaataccagacaaacaagacaaccggcaacaccgataagagagccttcgtcgagacctggcagtccttttaccggaagaagcttaaggaggtgtggaaacctgccgtgcggtctggcggatctggcggaggctccaccagccccaagaaaaagagaaaagtctaagctgccttctgcggggcttgccttctggccatgcccttcttctctcccttgcacctgtacctcttggtctttgaataaagcctgagtaggaaggctagcaaaaaaaaaaaaaaaaaaaaaaaaaaaaaaaaaaaaaaaaaaaaaaaaaaaaaaaaaaaaaaaaaaaaaaaaaaaaaaaa

SEQ ID NO: 13664 - RNA, 5785 nt, synthetic construct
  source 1..5785: mol_type = other RNA
aggaaataagagagaaaagaagagtaagaagaaatataagagccaccatggcccctaagaagaagcgtaaagtgagccggatggaacgcctcgtctacgaggtgcggcagaagtgcagaaacatcgaggacatctgcatctcctgcggatctctgaacgtgaccctggagcacccactgttcatcggcggcatgtgccagaactgtaaaaactgttttctggagtgtgcctatcaatacgacgatgacggctaccagagctactgcaccatctgttgcggcggaagagaggtgctgatgtgtggaaataacaactgctgccggtgcttctgcgtggaatgcgtggacctgctggtgggccccggcgccgcccaggccgctattaaggaagatccttggaactgctacatgtgcggccacaagggcacatacggcctgctgagacggagagaggactggcctagcagactgcagatgttcttcgccaataaccacgaccaggagttcgacccccctaaggtgtaccctcccgtccccgccgagaagagaaagcccatccgggtcctgagcctgttcgatggcatcgccaccggtctgctggtgctgaaggacctgggcatccaggtggataggtacattgcctccgaggtgtgcgaggactccatcaccgtgggaatggtgcgtcatcagggcaagatcatgtacgtgggcgacgtgcggagcgtgacacagaagcatatccaggagtggggccctttcgacctggtgatcggcggcagcccttgcaatgacctgagcatcgtgaacccagcccggaagggcctgtacgagggaaccggcagactgttcttcgagttttacagactgctgcacgacgcccggcctaaggaaggcgacgaccggcccttcttttggctgttcgagaatgtggtggccatgggagtcagcgacaagcgggatattagccggttcctggagagcaaccccgtgatgatcgatgccaaggaagtgagcgccgcccaccgggccagatacttctggggcaatctgcctggcatgaacagacccctggccagcaccgtgaacgacaagctggagctgcaggagtgcctggagcacggccggatcgccaagttcagcaaggtgagaaccatcaccacccgaagcaacagcatcaaacaaggcaaggaccagcactttcctgtgttcatgaacgagaaggaggacatcctgtggtgtaccgagatggagagagtgttcgggttcccagtccactacacagatgtcagcaacatgtctagactggccagacagagactgctgggaagaagctggtccgtccctgtgatcagacacctgttcgcccctctgaaggagtacttcgcctgcgtgagcagcggcaacagcaacgccaacagccggggccccagcttctctagcggcctggtgccactgtccctgagagggagccacatgggccccatggagatctacaaaaccgtgagcgcctggaagcggcagcctgtgcgcgtgctgagcctgtttcggaatatcgataaagtcctgaaaagcctgggattcctggagagcggctctggctccggcggtggcaccctgaagtacgtggaggatgtgacaaacgtggtcagacgggatgtggagaagtggggccccttcgatctggtgtacggcagcacccaacccctgggcagctcttgtgaccggtgccctggctggtacatgtttcagttccaccggatcctgcagtacgccctgccgagacaggagtcccagcggccattcttttggattttcatggacaacttgctgctgaccgaggatgaccaggaaactaccactcggttcctgcagaccgaagccgtgaccctgcaggacgtgagaggccgggactaccagaacgccatgcgggtgtggtccaacatccctggactgaaaagcaagcacgcacctctgacccctaaagaagaggagtacctgcaggcccaggtgcggagcagaagcaagctggacgcccctaaggtggatctgctggtgaagaattgcctcctgcccctgagagagtacttcaagtatttcagccagaatagtctgcccctgggaggcagcggcggcggcctgaaggccagcgtgagcttcaaggacgtggccgtggagctgacccaggaggagtggcagcacatgggccccgcccagaggaccctgtacagggacgtgatgctggagaactacagccacctggtgagcgtgggctactgcatcttcaagcccgaggtgatcttcaagctggagcagggcgagcagccctggttcctggagcaggagttcagcaaccagagctaccccgaggactacaacatcggcggcccaagcagcggcgcccctcctcccagcggcggcagcccagccggctccccaacctctaccgaggagggcacctctgagtccgccacccccgagagcggccctggcacctccaccgagcccagcgagggcagcgcacccggcagccctgccggcagccccacctccacagaggagggaaccagcaccgagcccagcgaaggcagcgccccaggcaccagcaccgagcctagtgagcaggagattaaacggatcaacaagatcagaagaagacttgtgaaagacagcaacaccaagaaggccggcaagacaggccccatgaaaaccctgctggttagagtgatgacacccgatctgagagagcggctggaaaacctgagaaagaagcctgaaaatatcccccagcccatcagcaatacatctagagccaacctgaataagctgctgaccgattacaccgaaatgaagaaggcgatcctgcatgtgtactgggaagagttccagaaggaccctgtgggcctgatgagccgggtggcccagcctgccagcaagaagatcgatcagaacaagctgaaacctgagatggacgagaagggcaacctgaccaccgccggctttgcctgctctcagtgtggccagcccctgttcgtgtacaagctggagcaggtgtctgagaagggcaaggcttacaccaactacttcggacggtgcaatgtggccgagcacgaaaagctgatcctgctggcccagctgaagcccgagaaggatagcgacgaagccgtgacatatagcctgggaaagtttgggcagagggccctggatttctacagcattcatgtgaccaaggagtccacccaccccgtgaagcccctggcccagatcgccggaaacagatacgcctccggacctgtgggaaaggccctgagcgacgcatgtatgggcacaatcgcctccttcctgtctaagtaccaggacatcatcatcgaacaccagaaggtggtgaagggcaaccagaagagactggagagcctgcgggagctggccggcaaggaaaacctggaataccctagcgtgaccctgccacctcagcctcacaccaaggagggcgttgatgcctacaacgaagtgatcgcccgggtgcgaatgtgggtgaacctgaacctgtggcagaagctgaagctaagcagagatgatgccaagcctctgctgagactgaagggattcccttcctttcctctggtcgagagacaggccaacgaagtggactggtgggacatggtgtgtaacgtgaagaagctgatcaacgagaaaaaggaggatggcaaggtgttttggcagaatctggctggctacaagagacaggaagccctgagaccatacctgagcagcgaggaagatcggaagaagggaaagaaattcgctcggtaccagctgggcgacctgctgctgcacctggaaaagaagcacggcgaggactggggaaaggtgtacgacgaggcctgggagcggattgacaagaaagtggaaggcctgagcaagcacatcaagctggaagaggaacggagaagcgaggacgcccagagcaaggccgccctgaccgactggctgcgggctaaggccagcttcgtgatcgagggcctgaaggaggccgacaaggacgagttctgcagatgcgagctgaagctgcagaagtggtacggggacctgcggggaaagcccttcgccatcgaagccgagaacagcatcctggacatcagcggcttcagcaagcagtacaactgtgccttcatctggcagaaggacggcgtgaagaagctgaacctgtacctgatcatcaactacttcaagggcggcaagctgcggttcaagaagatcaaacctgaagccttcgaagccaacagattctacaccgtgatcaacaaaaagagcggcgagatcgtgcccatggaggtgaacttcaacttcgacgaccccaacctgatcatcctgcctctggcctttggcaagagacagggcagagaattcatctggaacgacctgctgtccctggaaaccggcagcctgaagctggccaacggaagagtgatcgagaagacactgtacaacagaagaacccggcaggatgagcctgccctgttcgtggccctgaccttcgagcggcgggaggtcctggactcctccaatatcaaaccaatgaacctgatcggcgtggcaagaggcgaaaacatccccgccgtgatcgccctgaccgaccccgagggctgcccactgagccggtttaaggatagcctgggaaacccaacccacatcctgagaatcggcgagagctataaggagaagcagcggaccatccaggccaagaaggaggtggagcagcggagagccggcggctacagccggaagtacgccagcaaagccaagaatctggcagacgatatggtgagaaacaccgctagagatctgctgtactacgccgtgacccaggatgccatgctgatcttcgccaacctgagccggggcttcggccggcagggcaagcggaccttcatggccgagagacagtacacacggatggaggactggctgaccgccaagctggcctacgagggcctgagcaagacctacctgtccaagacactggcccagtacacctccaagacatgcagcaactgtgggtttaccatcaccagcgccgactacgacagggtgctggagaagctgaagaagacagcaacaggctggatgaccacaattaacggcaaggagctgaaggtggagggccagattacctactacaacagatacaagagacagaacgtagtcaaggacctgtccgtcgagctggatagactgagcgaagaatctgtgaacaacgacatctcctcctggacaaagggcagaagcggagaagctctgagcctcctgaagaaaagattctcccatagacccgtgcaggagaagttcgtgtgcctgaactgcggcttcgagacacacgcagccgagcaagccgccctgaacatcgccagatcctggctgttcctgcggagccaggagtacaagaaataccagacaaacaagacaaccggcaacaccgataagagagccttcgtcgagacctggcagtccttttaccggaagaagcttaaggaggtgtggaaacctgccgtgcggtctggcggatctggcggaggctccaccagccccaagaaaaagagaaaagtctaagctgccttctgcggggcttgccttctggccatgcccttcttctctcccttgcacctgtacctcttggtctttgaataaagcctgagtaggaaggctagcaaaaaaaaaaaaaaaaaaaaaaaaaaaaaaaaaaaaaaaaaaaaaaaaaaaaaaaaaaaaaaaaaaaaaaaaaaaaaaaa

SEQ ID NO: 13665 - RNA, 5785 nt, synthetic construct
  source 1..5785: mol_type = other RNA
aggaaataagagagaaaagaagagtaagaagaaatataagagccaccatggcccctaagaagaagcgtaaagtgagccggatggaacgcctcgtctacgaggtgcggcagaagtgcagaaacatcgaggacatctgcatctcctgcggatctctgaacgtgaccctggagcacccactgttcatcggcggcatgtgccagaactgtaaaaactgttttctggagtgtgcctatcaatacgacgatgacggctaccagagctactgcaccatctgttgcggcggaagagaggtgctgatgtgtggaaataacaactgctgccggtgcttctgcgtggaatgcgtggacctgctggtgggccccggcgccgcccaggccgctattaaggaagatccttggaactgctacatgtgcggccacaagggcacatacggcctgctgagacggagagaggactggcctagcagactgcagatgttcttcgccaataaccacgaccaggagttcgacccccctaaggtgtaccctcccgtccccgccgagaagagaaagcccatccgggtcctgagcctgttcgatggcatcgccaccggtctgctggtgctgaaggacctgggcatccaggtggataggtacattgcctccgaggtgtgcgaggactccatcaccgtgggaatggtgcgtcatcagggcaagatcatgtacgtgggcgacgtgcggagcgtgacacagaagcatatccaggagtggggccctttcgacctggtgatcggcggcagcccttgcaatgacctgagcatcgtgaacccagcccggaagggcctgtacgagggaaccggcagactgttcttcgagttttacagactgctgcacgacgcccggcctaaggaaggcgacgaccggcccttcttttggctgttcgagaatgtggtggccatgggagtcagcgacaagcgggatattagccggttcctggagagcaaccccgtgatgatcgatgccaaggaagtgagcgccgcccaccgggccagatacttctggggcaatctgcctggcatgaacagacccctggccagcaccgtgaacgacaagctggagctgcaggagtgcctggagcacggccggatcgccaagttcagcaaggtgagaaccatcaccacccgaagcaacagcatcaaacaaggcaaggaccagcactttcctgtgttcatgaacgagaaggaggacatcctgtggtgtaccgagatggagagagtgttcgggttcccagtccactacacagatgtcagcaacatgtctagactggccagacagagactgctgggaagaagctggtccgtccctgtgatcagacacctgttcgcccctctgaaggagtacttcgcctgcgtgagcagcggcaacagcaacgccaacagccggggccccagcttctctagcggcctggtgccactgtccctgagagggagccacatgggccccatggagatctacaaaaccgtgagcgcctggaagcggcagcctgtgcgcgtgctgagcctgtttcggaatatcgataaagtcctgaaaagcctgggattcctggagagcggctctggctccggcggtggcaccctgaagtacgtggaggatgtgacaaacgtggtcagacgggatgtggagaagtggggccccttcgatctggtgtacggcagcacccaacccctgggcagctcttgtgaccggtgccctggctggtacatgtttcagttccaccggatcctgcagtacgccctgccgagacaggagtcccagcggccattcttttggattttcatggacaacttgctgctgaccgaggatgaccaggaaactaccactcggttcctgcagaccgaagccgtgaccctgcaggacgtgagaggccgggactaccagaacgccatgcgggtgtggtccaacatccctggactgaaaagcaagcacgcacctctgacccctaaagaagaggagtacctgcaggcccaggtgcggagcagaagcaagctggacgcccctaaggtggatctgctggtgaagaattgcctcctgcccctgagagagtacttcaagtatttcagccagaatagtctgcccctgggaggcagcggcggcggcagccagccccccgtgagcttcaaggacgtggtggtgagcttcaccagggaggagtggggccagctggacaccgtgcagaggaccctgtacagggacgtgaccctggagacctgcggccacctggtgagcctgggcctgctgctgcccaacctggacgtgatcagccacctggagaacggcgaggacccctggagggccgagcaggagccccccacccaggactggaagaccaccctggagaagggcggcccaagcagcggcgcccctcctcccagcggcggcagcccagccggctccccaacctctaccgaggagggcacctctgagtccgccacccccgagagcggccctggcacctccaccgagcccagcgagggcagcgcacccggcagccctgccggcagccccacctccacagaggagggaaccagcaccgagcccagcgaaggcagcgccccaggcaccagcaccgagcctagtgagcaggagattaaacggatcaacaagatcagaagaagacttgtgaaagacagcaacaccaagaaggccggcaagacaggccccatgaaaaccctgctggttagagtgatgacacccgatctgagagagcggctggaaaacctgagaaagaagcctgaaaatatcccccagcccatcagcaatacatctagagccaacctgaataagctgctgaccgattacaccgaaatgaagaaggcgatcctgcatgtgtactgggaagagttccagaaggaccctgtgggcctgatgagccgggtggcccagcctgccagcaagaagatcgatcagaacaagctgaaacctgagatggacgagaagggcaacctgaccaccgccggctttgcctgctctcagtgtggccagcccctgttcgtgtacaagctggagcaggtgtctgagaagggcaaggcttacaccaactacttcggacggtgcaatgtggccgagcacgaaaagctgatcctgctggcccagctgaagcccgagaaggatagcgacgaagccgtgacatatagcctgggaaagtttgggcagagggccctggatttctacagcattcatgtgaccaaggagtccacccaccccgtgaagcccctggcccagatcgccggaaacagatacgcctccggacctgtgggaaaggccctgagcgacgcatgtatgggcacaatcgcctccttcctgtctaagtaccaggacatcatcatcgaacaccagaaggtggtgaagggcaaccagaagagactggagagcctgcgggagctggccggcaaggaaaacctggaataccctagcgtgaccctgccacctcagcctcacaccaaggagggcgttgatgcctacaacgaagtgatcgcccgggtgcgaatgtgggtgaacctgaacctgtggcagaagctgaagctaagcagagatgatgccaagcctctgctgagactgaagggattcccttcctttcctctggtcgagagacaggccaacgaagtggactggtgggacatggtgtgtaacgtgaagaagctgatcaacgagaaaaaggaggatggcaaggtgttttggcagaatctggctggctacaagagacaggaagccctgagaccatacctgagcagcgaggaagatcggaagaagggaaagaaattcgctcggtaccagctgggcgacctgctgctgcacctggaaaagaagcacggcgaggactggggaaaggtgtacgacgaggcctgggagcggattgacaagaaagtggaaggcctgagcaagcacatcaagctggaagaggaacggagaagcgaggacgcccagagcaaggccgccctgaccgactggctgcgggctaaggccagcttcgtgatcgagggcctgaaggaggccgacaaggacgagttctgcagatgcgagctgaagctgcagaagtggtacggggacctgcggggaaagcccttcgccatcgaagccgagaacagcatcctggacatcagcggcttcagcaagcagtacaactgtgccttcatctggcagaaggacggcgtgaagaagctgaacctgtacctgatcatcaactacttcaagggcggcaagctgcggttcaagaagatcaaacctgaagccttcgaagccaacagattctacaccgtgatcaacaaaaagagcggcgagatcgtgcccatggaggtgaacttcaacttcgacgaccccaacctgatcatcctgcctctggcctttggcaagagacagggcagagaattcatctggaacgacctgctgtccctggaaaccggcagcctgaagctggccaacggaagagtgatcgagaagacactgtacaacagaagaacccggcaggatgagcctgccctgttcgtggccctgaccttcgagcggcgggaggtcctggactcctccaatatcaaaccaatgaacctgatcggcgtggcaagaggcgaaaacatccccgccgtgatcgccctgaccgaccccgagggctgcccactgagccggtttaaggatagcctgggaaacccaacccacatcctgagaatcggcgagagctataaggagaagcagcggaccatccaggccaagaaggaggtggagcagcggagagccggcggctacagccggaagtacgccagcaaagccaagaatctggcagacgatatggtgagaaacaccgctagagatctgctgtactacgccgtgacccaggatgccatgctgatcttcgccaacctgagccggggcttcggccggcagggcaagcggaccttcatggccgagagacagtacacacggatggaggactggctgaccgccaagctggcctacgagggcctgagcaagacctacctgtccaagacactggcccagtacacctccaagacatgcagcaactgtgggtttaccatcaccagcgccgactacgacagggtgctggagaagctgaagaagacagcaacaggctggatgaccacaattaacggcaaggagctgaaggtggagggccagattacctactacaacagatacaagagacagaacgtagtcaaggacctgtccgtcgagctggatagactgagcgaagaatctgtgaacaacgacatctcctcctggacaaagggcagaagcggagaagctctgagcctcctgaagaaaagattctcccatagacccgtgcaggagaagttcgtgtgcctgaactgcggcttcgagacacacgcagccgagcaagccgccctgaacatcgccagatcctggctgttcctgcggagccaggagtacaagaaataccagacaaacaagacaaccggcaacaccgataagagagccttcgtcgagacctggcagtccttttaccggaagaagcttaaggaggtgtggaaacctgccgtgcggtctggcggatctggcggaggctccaccagccccaagaaaaagagaaaagtctaagctgccttctgcggggcttgccttctggccatgcccttcttctctcccttgcacctgtacctcttggtctttgaataaagcctgagtaggaaggctagcaaaaaaaaaaaaaaaaaaaaaaaaaaaaaaaaaaaaaaaaaaaaaaaaaaaaaaaaaaaaaaaaaaaaaaaaaaaaaaaa

SEQ ID NO: 13666 - RNA, 5785 nt, synthetic construct
  source 1..5785: mol_type = other RNA
aggaaataagagagaaaagaagagtaagaagaaatataagagccaccatggcccctaagaagaagcgtaaagtgagccggatggaacgcctcgtctacgaggtgcggcagaagtgcagaaacatcgaggacatctgcatctcctgcggatctctgaacgtgaccctggagcacccactgttcatcggcggcatgtgccagaactgtaaaaactgttttctggagtgtgcctatcaatacgacgatgacggctaccagagctactgcaccatctgttgcggcggaagagaggtgctgatgtgtggaaataacaactgctgccggtgcttctgcgtggaatgcgtggacctgctggtgggccccggcgccgcccaggccgctattaaggaagatccttggaactgctacatgtgcggccacaagggcacatacggcctgctgagacggagagaggactggcctagcagactgcagatgttcttcgccaataaccacgaccaggagttcgacccccctaaggtgtaccctcccgtccccgccgagaagagaaagcccatccgggtcctgagcctgttcgatggcatcgccaccggtctgctggtgctgaaggacctgggcatccaggtggataggtacattgcctccgaggtgtgcgaggactccatcaccgtgggaatggtgcgtcatcagggcaagatcatgtacgtgggcgacgtgcggagcgtgacacagaagcatatccaggagtggggccctttcgacctggtgatcggcggcagcccttgcaatgacctgagcatcgtgaacccagcccggaagggcctgtacgagggaaccggcagactgttcttcgagttttacagactgctgcacgacgcccggcctaaggaaggcgacgaccggcccttcttttggctgttcgagaatgtggtggccatgggagtcagcgacaagcgggatattagccggttcctggagagcaaccccgtgatgatcgatgccaaggaagtgagcgccgcccaccgggccagatacttctggggcaatctgcctggcatgaacagacccctggccagcaccgtgaacgacaagctggagctgcaggagtgcctggagcacggccggatcgccaagttcagcaaggtgagaaccatcaccacccgaagcaacagcatcaaacaaggcaaggaccagcactttcctgtgttcatgaacgagaaggaggacatcctgtggtgtaccgagatggagagagtgttcgggttcccagtccactacacagatgtcagcaacatgtctagactggccagacagagactgctgggaagaagctggtccgtccctgtgatcagacacctgttcgcccctctgaaggagtacttcgcctgcgtgagcagcggcaacagcaacgccaacagccggggccccagcttctctagcggcctggtgccactgtccctgagagggagccacatgggccccatggagatctacaaaaccgtgagcgcctggaagcggcagcctgtgcgcgtgctgagcctgtttcggaatatcgataaagtcctgaaaagcctgggattcctggagagcggctctggctccggcggtggcaccctgaagtacgtggaggatgtgacaaacgtggtcagacgggatgtggagaagtggggccccttcgatctggtgtacggcagcacccaacccctgggcagctcttgtgaccggtgccctggctggtacatgtttcagttccaccggatcctgcagtacgccctgccgagacaggagtcccagcggccattcttttggattttcatggacaacttgctgctgaccgaggatgaccaggaaactaccactcggttcctgcagaccgaagccgtgaccctgcaggacgtgagaggccgggactaccagaacgccatgcgggtgtggtccaacatccctggactgaaaagcaagcacgcacctctgacccctaaagaagaggagtacctgcaggcccaggtgcggagcagaagcaagctggacgcccctaaggtggatctgctggtgaagaattgcctcctgcccctgagagagtacttcaagtatttcagccagaatagtctgcccctgggaggcagcggcggcggcgcccagggccaggtgaccttcgaggacgtggccgtgtgcttcagccaggaggagtggggcctgctggacgagacccagaggctgctgtacaggagcgtgatgctggagaccttcagcctgatggccagcctgggcctgaccagcagcaggacccacgacatcagccagctggagaggtggggcgagcccttcctgagcgccagcggcgccatgagggccaccaggcccaccggctgctggcacggcggcccaagcagcggcgcccctcctcccagcggcggcagcccagccggctccccaacctctaccgaggagggcacctctgagtccgccacccccgagagcggccctggcacctccaccgagcccagcgagggcagcgcacccggcagccctgccggcagccccacctccacagaggagggaaccagcaccgagcccagcgaaggcagcgccccaggcaccagcaccgagcctagtgagcaggagattaaacggatcaacaagatcagaagaagacttgtgaaagacagcaacaccaagaaggccggcaagacaggccccatgaaaaccctgctggttagagtgatgacacccgatctgagagagcggctggaaaacctgagaaagaagcctgaaaatatcccccagcccatcagcaatacatctagagccaacctgaataagctgctgaccgattacaccgaaatgaagaaggcgatcctgcatgtgtactgggaagagttccagaaggaccctgtgggcctgatgagccgggtggcccagcctgccagcaagaagatcgatcagaacaagctgaaacctgagatggacgagaagggcaacctgaccaccgccggctttgcctgctctcagtgtggccagcccctgttcgtgtacaagctggagcaggtgtctgagaagggcaaggcttacaccaactacttcggacggtgcaatgtggccgagcacgaaaagctgatcctgctggcccagctgaagcccgagaaggatagcgacgaagccgtgacatatagcctgggaaagtttgggcagagggccctggatttctacagcattcatgtgaccaaggagtccacccaccccgtgaagcccctggcccagatcgccggaaacagatacgcctccggacctgtgggaaaggccctgagcgacgcatgtatgggcacaatcgcctccttcctgtctaagtaccaggacatcatcatcgaacaccagaaggtggtgaagggcaaccagaagagactggagagcctgcgggagctggccggcaaggaaaacctggaataccctagcgtgaccctgccacctcagcctcacaccaaggagggcgttgatgcctacaacgaagtgatcgcccgggtgcgaatgtgggtgaacctgaacctgtggcagaagctgaagctaagcagagatgatgccaagcctctgctgagactgaagggattcccttcctttcctctggtcgagagacaggccaacgaagtggactggtgggacatggtgtgtaacgtgaagaagctgatcaacgagaaaaaggaggatggcaaggtgttttggcagaatctggctggctacaagagacaggaagccctgagaccatacctgagcagcgaggaagatcggaagaagggaaagaaattcgctcggtaccagctgggcgacctgctgctgcacctggaaaagaagcacggcgaggactggggaaaggtgtacgacgaggcctgggagcggattgacaagaaagtggaaggcctgagcaagcacatcaagctggaagaggaacggagaagcgaggacgcccagagcaaggccgccctgaccgactggctgcgggctaaggccagcttcgtgatcgagggcctgaaggaggccgacaaggacgagttctgcagatgcgagctgaagctgcagaagtggtacggggacctgcggggaaagcccttcgccatcgaagccgagaacagcatcctggacatcagcggcttcagcaagcagtacaactgtgccttcatctggcagaaggacggcgtgaagaagctgaacctgtacctgatcatcaactacttcaagggcggcaagctgcggttcaagaagatcaaacctgaagccttcgaagccaacagattctacaccgtgatcaacaaaaagagcggcgagatcgtgcccatggaggtgaacttcaacttcgacgaccccaacctgatcatcctgcctctggcctttggcaagagacagggcagagaattcatctggaacgacctgctgtccctggaaaccggcagcctgaagctggccaacggaagagtgatcgagaagacactgtacaacagaagaacccggcaggatgagcctgccctgttcgtggccctgaccttcgagcggcgggaggtcctggactcctccaatatcaaaccaatgaacctgatcggcgtggcaagaggcgaaaacatccccgccgtgatcgccctgaccgaccccgagggctgcccactgagccggtttaaggatagcctgggaaacccaacccacatcctgagaatcggcgagagctataaggagaagcagcggaccatccaggccaagaaggaggtggagcagcggagagccggcggctacagccggaagtacgccagcaaagccaagaatctggcagacgatatggtgagaaacaccgctagagatctgctgtactacgccgtgacccaggatgccatgctgatcttcgccaacctgagccggggcttcggccggcagggcaagcggaccttcatggccgagagacagtacacacggatggaggactggctgaccgccaagctggcctacgagggcctgagcaagacctacctgtccaagacactggcccagtacacctccaagacatgcagcaactgtgggtttaccatcaccagcgccgactacgacagggtgctggagaagctgaagaagacagcaacaggctggatgaccacaattaacggcaaggagctgaaggtggagggccagattacctactacaacagatacaagagacagaacgtagtcaaggacctgtccgtcgagctggatagactgagcgaagaatctgtgaacaacgacatctcctcctggacaaagggcagaagcggagaagctctgagcctcctgaagaaaagattctcccatagacccgtgcaggagaagttcgtgtgcctgaactgcggcttcgagacacacgcagccgagcaagccgccctgaacatcgccagatcctggctgttcctgcggagccaggagtacaagaaataccagacaaacaagacaaccggcaacaccgataagagagccttcgtcgagacctggcagtccttttaccggaagaagcttaaggaggtgtggaaacctgccgtgcggtctggcggatctggcggaggctccaccagccccaagaaaaagagaaaagtctaagctgccttctgcggggcttgccttctggccatgcccttcttctctcccttgcacctgtacctcttggtctttgaataaagcctgagtaggaaggctagcaaaaaaaaaaaaaaaaaaaaaaaaaaaaaaaaaaaaaaaaaaaaaaaaaaaaaaaaaaaaaaaaaaaaaaaaaaaaaaaa

SEQ ID NO: 13667 - RNA, 5782 nt, synthetic construct
  source 1..5782: mol_type = other RNA
aggaaataagagagaaaagaagagtaagaagaaatataagagccaccatggcccctaagaagaagcgtaaagtgagccggatggaacgcctcgtctacgaggtgcggcagaagtgcagaaacatcgaggacatctgcatctcctgcggatctctgaacgtgaccctggagcacccactgttcatcggcggcatgtgccagaactgtaaaaactgttttctggagtgtgcctatcaatacgacgatgacggctaccagagctactgcaccatctgttgcggcggaagagaggtgctgatgtgtggaaataacaactgctgccggtgcttctgcgtggaatgcgtggacctgctggtgggccccggcgccgcccaggccgctattaaggaagatccttggaactgctacatgtgcggccacaagggcacatacggcctgctgagacggagagaggactggcctagcagactgcagatgttcttcgccaataaccacgaccaggagttcgacccccctaaggtgtaccctcccgtccccgccgagaagagaaagcccatccgggtcctgagcctgttcgatggcatcgccaccggtctgctggtgctgaaggacctgggcatccaggtggataggtacattgcctccgaggtgtgcgaggactccatcaccgtgggaatggtgcgtcatcagggcaagatcatgtacgtgggcgacgtgcggagcgtgacacagaagcatatccaggagtggggccctttcgacctggtgatcggcggcagcccttgcaatgacctgagcatcgtgaacccagcccggaagggcctgtacgagggaaccggcagactgttcttcgagttttacagactgctgcacgacgcccggcctaaggaaggcgacgaccggcccttcttttggctgttcgagaatgtggtggccatgggagtcagcgacaagcgggatattagccggttcctggagagcaaccccgtgatgatcgatgccaaggaagtgagcgccgcccaccgggccagatacttctggggcaatctgcctggcatgaacagacccctggccagcaccgtgaacgacaagctggagctgcaggagtgcctggagcacggccggatcgccaagttcagcaaggtgagaaccatcaccacccgaagcaacagcatcaaacaaggcaaggaccagcactttcctgtgttcatgaacgagaaggaggacatcctgtggtgtaccgagatggagagagtgttcgggttcccagtccactacacagatgtcagcaacatgtctagactggccagacagagactgctgggaagaagctggtccgtccctgtgatcagacacctgttcgcccctctgaaggagtacttcgcctgcgtgagcagcggcaacagcaacgccaacagccggggccccagcttctctagcggcctggtgccactgtccctgagagggagccacatgggccccatggagatctacaaaaccgtgagcgcctggaagcggcagcctgtgcgcgtgctgagcctgtttcggaatatcgataaagtcctgaaaagcctgggattcctggagagcggctctggctccggcggtggcaccctgaagtacgtggaggatgtgacaaacgtggtcagacgggatgtggagaagtggggccccttcgatctggtgtacggcagcacccaacccctgggcagctcttgtgaccggtgccctggctggtacatgtttcagttccaccggatcctgcagtacgccctgccgagacaggagtcccagcggccattcttttggattttcatggacaacttgctgctgaccgaggatgaccaggaaactaccactcggttcctgcagaccgaagccgtgaccctgcaggacgtgagaggccgggactaccagaacgccatgcgggtgtggtccaacatccctggactgaaaagcaagcacgcacctctgacccctaaagaagaggagtacctgcaggcccaggtgcggagcagaagcaagctggacgcccctaaggtggatctgctggtgaagaattgcctcctgcccctgagagagtacttcaagtatttcagccagaatagtctgcccctgggaggcagcggcggcggcatgggcgagcccctggagttcagggacgtggccatcgagttcagcctggaggagtggcactgcctggacaccgcccagaggaacctgtacagggacgtgatgctggagaactacaggaacctggtgttcctgggcatcgccgtgagcaagcccgacctgatcacctggctggagcagggcaagaagcccctgaccgtgaagggccacgagatgatcgccaccccccccggcaggtgcaagggcggcccaagcagcggcgcccctcctcccagcggcggcagcccagccggctccccaacctctaccgaggagggcacctctgagtccgccacccccgagagcggccctggcacctccaccgagcccagcgagggcagcgcacccggcagccctgccggcagccccacctccacagaggagggaaccagcaccgagcccagcgaaggcagcgccccaggcaccagcaccgagcctagtgagcaggagattaaacggatcaacaagatcagaagaagacttgtgaaagacagcaacaccaagaaggccggcaagacaggccccatgaaaaccctgctggttagagtgatgacacccgatctgagagagcggctggaaaacctgagaaagaagcctgaaaatatcccccagcccatcagcaatacatctagagccaacctgaataagctgctgaccgattacaccgaaatgaagaaggcgatcctgcatgtgtactgggaagagttccagaaggaccctgtgggcctgatgagccgggtggcccagcctgccagcaagaagatcgatcagaacaagctgaaacctgagatggacgagaagggcaacctgaccaccgccggctttgcctgctctcagtgtggccagcccctgttcgtgtacaagctggagcaggtgtctgagaagggcaaggcttacaccaactacttcggacggtgcaatgtggccgagcacgaaaagctgatcctgctggcccagctgaagcccgagaaggatagcgacgaagccgtgacatatagcctgggaaagtttgggcagagggccctggatttctacagcattcatgtgaccaaggagtccacccaccccgtgaagcccctggcccagatcgccggaaacagatacgcctccggacctgtgggaaaggccctgagcgacgcatgtatgggcacaatcgcctccttcctgtctaagtaccaggacatcatcatcgaacaccagaaggtggtgaagggcaaccagaagagactggagagcctgcgggagctggccggcaaggaaaacctggaataccctagcgtgaccctgccacctcagcctcacaccaaggagggcgttgatgcctacaacgaagtgatcgcccgggtgcgaatgtgggtgaacctgaacctgtggcagaagctgaagctaagcagagatgatgccaagcctctgctgagactgaagggattcccttcctttcctctggtcgagagacaggccaacgaagtggactggtgggacatggtgtgtaacgtgaagaagctgatcaacgagaaaaaggaggatggcaaggtgttttggcagaatctggctggctacaagagacaggaagccctgagaccatacctgagcagcgaggaagatcggaagaagggaaagaaattcgctcggtaccagctgggcgacctgctgctgcacctggaaaagaagcacggcgaggactggggaaaggtgtacgacgaggcctgggagcggattgacaagaaagtggaaggcctgagcaagcacatcaagctggaagaggaacggagaagcgaggacgcccagagcaaggccgccctgaccgactggctgcgggctaaggccagcttcgtgatcgagggcctgaaggaggccgacaaggacgagttctgcagatgcgagctgaagctgcagaagtggtacggggacctgcggggaaagcccttcgccatcgaagccgagaacagcatcctggacatcagcggcttcagcaagcagtacaactgtgccttcatctggcagaaggacggcgtgaagaagctgaacctgtacctgatcatcaactacttcaagggcggcaagctgcggttcaagaagatcaaacctgaagccttcgaagccaacagattctacaccgtgatcaacaaaaagagcggcgagatcgtgcccatggaggtgaacttcaacttcgacgaccccaacctgatcatcctgcctctggcctttggcaagagacagggcagagaattcatctggaacgacctgctgtccctggaaaccggcagcctgaagctggccaacggaagagtgatcgagaagacactgtacaacagaagaacccggcaggatgagcctgccctgttcgtggccctgaccttcgagcggcgggaggtcctggactcctccaatatcaaaccaatgaacctgatcggcgtggcaagaggcgaaaacatccccgccgtgatcgccctgaccgaccccgagggctgcccactgagccggtttaaggatagcctgggaaacccaacccacatcctgagaatcggcgagagctataaggagaagcagcggaccatccaggccaagaaggaggtggagcagcggagagccggcggctacagccggaagtacgccagcaaagccaagaatctggcagacgatatggtgagaaacaccgctagagatctgctgtactacgccgtgacccaggatgccatgctgatcttcgccaacctgagccggggcttcggccggcagggcaagcggaccttcatggccgagagacagtacacacggatggaggactggctgaccgccaagctggcctacgagggcctgagcaagacctacctgtccaagacactggcccagtacacctccaagacatgcagcaactgtgggtttaccatcaccagcgccgactacgacagggtgctggagaagctgaagaagacagcaacaggctggatgaccacaattaacggcaaggagctgaaggtggagggccagattacctactacaacagatacaagagacagaacgtagtcaaggacctgtccgtcgagctggatagactgagcgaagaatctgtgaacaacgacatctcctcctggacaaagggcagaagcggagaagctctgagcctcctgaagaaaagattctcccatagacccgtgcaggagaagttcgtgtgcctgaactgcggcttcgagacacacgcagccgagcaagccgccctgaacatcgccagatcctggctgttcctgcggagccaggagtacaagaaataccagacaaacaagacaaccggcaacaccgataagagagccttcgtcgagacctggcagtccttttaccggaagaagcttaaggaggtgtggaaacctgccgtgcggtctggcggatctggcggaggctccaccagccccaagaaaaagagaaaagtctaagctgccttctgcggggcttgccttctggccatgcccttcttctctcccttgcacctgtacctcttggtctttgaataaagcctgagtaggaaggctagcaaaaaaaaaaaaaaaaaaaaaaaaaaaaaaaaaaaaaaaaaaaaaaaaaaaaaaaaaaaaaaaaaaaaaaaaaaaaaaaa

SEQ ID NO: 13668 - RNA, 5785 nt, synthetic construct
  source 1..5785: mol_type = other RNA
aggaaataagagagaaaagaagagtaagaagaaatataagagccaccatggcccctaagaagaagcgtaaagtgagccggatggaacgcctcgtctacgaggtgcggcagaagtgcagaaacatcgaggacatctgcatctcctgcggatctctgaacgtgaccctggagcacccactgttcatcggcggcatgtgccagaactgtaaaaactgttttctggagtgtgcctatcaatacgacgatgacggctaccagagctactgcaccatctgttgcggcggaagagaggtgctgatgtgtggaaataacaactgctgccggtgcttctgcgtggaatgcgtggacctgctggtgggccccggcgccgcccaggccgctattaaggaagatccttggaactgctacatgtgcggccacaagggcacatacggcctgctgagacggagagaggactggcctagcagactgcagatgttcttcgccaataaccacgaccaggagttcgacccccctaaggtgtaccctcccgtccccgccgagaagagaaagcccatccgggtcctgagcctgttcgatggcatcgccaccggtctgctggtgctgaaggacctgggcatccaggtggataggtacattgcctccgaggtgtgcgaggactccatcaccgtgggaatggtgcgtcatcagggcaagatcatgtacgtgggcgacgtgcggagcgtgacacagaagcatatccaggagtggggccctttcgacctggtgatcggcggcagcccttgcaatgacctgagcatcgtgaacccagcccggaagggcctgtacgagggaaccggcagactgttcttcgagttttacagactgctgcacgacgcccggcctaaggaaggcgacgaccggcccttcttttggctgttcgagaatgtggtggccatgggagtcagcgacaagcgggatattagccggttcctggagagcaaccccgtgatgatcgatgccaaggaagtgagcgccgcccaccgggccagatacttctggggcaatctgcctggcatgaacagacccctggccagcaccgtgaacgacaagctggagctgcaggagtgcctggagcacggccggatcgccaagttcagcaaggtgagaaccatcaccacccgaagcaacagcatcaaacaaggcaaggaccagcactttcctgtgttcatgaacgagaaggaggacatcctgtggtgtaccgagatggagagagtgttcgggttcccagtccactacacagatgtcagcaacatgtctagactggccagacagagactgctgggaagaagctggtccgtccctgtgatcagacacctgttcgcccctctgaaggagtacttcgcctgcgtgagcagcggcaacagcaacgccaacagccggggccccagcttctctagcggcctggtgccactgtccctgagagggagccacatgggccccatggagatctacaaaaccgtgagcgcctggaagcggcagcctgtgcgcgtgctgagcctgtttcggaatatcgataaagtcctgaaaagcctgggattcctggagagcggctctggctccggcggtggcaccctgaagtacgtggaggatgtgacaaacgtggtcagacgggatgtggagaagtggggccccttcgatctggtgtacggcagcacccaacccctgggcagctcttgtgaccggtgccctggctggtacatgtttcagttccaccggatcctgcagtacgccctgccgagacaggagtcccagcggccattcttttggattttcatggacaacttgctgctgaccgaggatgaccaggaaactaccactcggttcctgcagaccgaagccgtgaccctgcaggacgtgagaggccgggactaccagaacgccatgcgggtgtggtccaacatccctggactgaaaagcaagcacgcacctctgacccctaaagaagaggagtacctgcaggcccaggtgcggagcagaagcaagctggacgcccctaaggtggatctgctggtgaagaattgcctcctgcccctgagagagtacttcaagtatttcagccagaatagtctgcccctgggaggcagcggcggcggccccggccaggaggtggtgaccttcaaggacatggccgtggacttcaccagggaggagtggaggctgctgacccccccccagaaggagctgtacaaggaggtgatgctggagaacgccaggaacctgctgagcgtgggcttcgccgtgcccggcgacgtgatcagctacctggagcagagggaggccccctggctgctggagcaggagggcctgaggagctgcagccccggcgacatcagccccggcggcccaagcagcggcgcccctcctcccagcggcggcagcccagccggctccccaacctctaccgaggagggcacctctgagtccgccacccccgagagcggccctggcacctccaccgagcccagcgagggcagcgcacccggcagccctgccggcagccccacctccacagaggagggaaccagcaccgagcccagcgaaggcagcgccccaggcaccagcaccgagcctagtgagcaggagattaaacggatcaacaagatcagaagaagacttgtgaaagacagcaacaccaagaaggccggcaagacaggccccatgaaaaccctgctggttagagtgatgacacccgatctgagagagcggctggaaaacctgagaaagaagcctgaaaatatcccccagcccatcagcaatacatctagagccaacctgaataagctgctgaccgattacaccgaaatgaagaaggcgatcctgcatgtgtactgggaagagttccagaaggaccctgtgggcctgatgagccgggtggcccagcctgccagcaagaagatcgatcagaacaagctgaaacctgagatggacgagaagggcaacctgaccaccgccggctttgcctgctctcagtgtggccagcccctgttcgtgtacaagctggagcaggtgtctgagaagggcaaggcttacaccaactacttcggacggtgcaatgtggccgagcacgaaaagctgatcctgctggcccagctgaagcccgagaaggatagcgacgaagccgtgacatatagcctgggaaagtttgggcagagggccctggatttctacagcattcatgtgaccaaggagtccacccaccccgtgaagcccctggcccagatcgccggaaacagatacgcctccggacctgtgggaaaggccctgagcgacgcatgtatgggcacaatcgcctccttcctgtctaagtaccaggacatcatcatcgaacaccagaaggtggtgaagggcaaccagaagagactggagagcctgcgggagctggccggcaaggaaaacctggaataccctagcgtgaccctgccacctcagcctcacaccaaggagggcgttgatgcctacaacgaagtgatcgcccgggtgcgaatgtgggtgaacctgaacctgtggcagaagctgaagctaagcagagatgatgccaagcctctgctgagactgaagggattcccttcctttcctctggtcgagagacaggccaacgaagtggactggtgggacatggtgtgtaacgtgaagaagctgatcaacgagaaaaaggaggatggcaaggtgttttggcagaatctggctggctacaagagacaggaagccctgagaccatacctgagcagcgaggaagatcggaagaagggaaagaaattcgctcggtaccagctgggcgacctgctgctgcacctggaaaagaagcacggcgaggactggggaaaggtgtacgacgaggcctgggagcggattgacaagaaagtggaaggcctgagcaagcacatcaagctggaagaggaacggagaagcgaggacgcccagagcaaggccgccctgaccgactggctgcgggctaaggccagcttcgtgatcgagggcctgaaggaggccgacaaggacgagttctgcagatgcgagctgaagctgcagaagtggtacggggacctgcggggaaagcccttcgccatcgaagccgagaacagcatcctggacatcagcggcttcagcaagcagtacaactgtgccttcatctggcagaaggacggcgtgaagaagctgaacctgtacctgatcatcaactacttcaagggcggcaagctgcggttcaagaagatcaaacctgaagccttcgaagccaacagattctacaccgtgatcaacaaaaagagcggcgagatcgtgcccatggaggtgaacttcaacttcgacgaccccaacctgatcatcctgcctctggcctttggcaagagacagggcagagaattcatctggaacgacctgctgtccctggaaaccggcagcctgaagctggccaacggaagagtgatcgagaagacactgtacaacagaagaacccggcaggatgagcctgccctgttcgtggccctgaccttcgagcggcgggaggtcctggactcctccaatatcaaaccaatgaacctgatcggcgtggcaagaggcgaaaacatccccgccgtgatcgccctgaccgaccccgagggctgcccactgagccggtttaaggatagcctgggaaacccaacccacatcctgagaatcggcgagagctataaggagaagcagcggaccatccaggccaagaaggaggtggagcagcggagagccggcggctacagccggaagtacgccagcaaagccaagaatctggcagacgatatggtgagaaacaccgctagagatctgctgtactacgccgtgacccaggatgccatgctgatcttcgccaacctgagccggggcttcggccggcagggcaagcggaccttcatggccgagagacagtacacacggatggaggactggctgaccgccaagctggcctacgagggcctgagcaagacctacctgtccaagacactggcccagtacacctccaagacatgcagcaactgtgggtttaccatcaccagcgccgactacgacagggtgctggagaagctgaagaagacagcaacaggctggatgaccacaattaacggcaaggagctgaaggtggagggccagattacctactacaacagatacaagagacagaacgtagtcaaggacctgtccgtcgagctggatagactgagcgaagaatctgtgaacaacgacatctcctcctggacaaagggcagaagcggagaagctctgagcctcctgaagaaaagattctcccatagacccgtgcaggagaagttcgtgtgcctgaactgcggcttcgagacacacgcagccgagcaagccgccctgaacatcgccagatcctggctgttcctgcggagccaggagtacaagaaataccagacaaacaagacaaccggcaacaccgataagagagccttcgtcgagacctggcagtccttttaccggaagaagcttaaggaggtgtggaaacctgccgtgcggtctggcggatctggcggaggctccaccagccccaagaaaaagagaaaagtctaagctgccttctgcggggcttgccttctggccatgcccttcttctctcccttgcacctgtacctcttggtctttgaataaagcctgagtaggaaggctagcaaaaaaaaaaaaaaaaaaaaaaaaaaaaaaaaaaaaaaaaaaaaaaaaaaaaaaaaaaaaaaaaaaaaaaaaaaaaaaaa

SEQ ID NO: 13669 - RNA, 5785 nt, synthetic construct
  source 1..5785: mol_type = other RNA
aggaaataagagagaaaagaagagtaagaagaaatataagagccaccatggcccctaagaagaagcgtaaagtgagccggatggaacgcctcgtctacgaggtgcggcagaagtgcagaaacatcgaggacatctgcatctcctgcggatctctgaacgtgaccctggagcacccactgttcatcggcggcatgtgccagaactgtaaaaactgttttctggagtgtgcctatcaatacgacgatgacggctaccagagctactgcaccatctgttgcggcggaagagaggtgctgatgtgtggaaataacaactgctgccggtgcttctgcgtggaatgcgtggacctgctggtgggccccggcgccgcccaggccgctattaaggaagatccttggaactgctacatgtgcggccacaagggcacatacggcctgctgagacggagagaggactggcctagcagactgcagatgttcttcgccaataaccacgaccaggagttcgacccccctaaggtgtaccctcccgtccccgccgagaagagaaagcccatccgggtcctgagcctgttcgatggcatcgccaccggtctgctggtgctgaaggacctgggcatccaggtggataggtacattgcctccgaggtgtgcgaggactccatcaccgtgggaatggtgcgtcatcagggcaagatcatgtacgtgggcgacgtgcggagcgtgacacagaagcatatccaggagtggggccctttcgacctggtgatcggcggcagcccttgcaatgacctgagcatcgtgaacccagcccggaagggcctgtacgagggaaccggcagactgttcttcgagttttacagactgctgcacgacgcccggcctaaggaaggcgacgaccggcccttcttttggctgttcgagaatgtggtggccatgggagtcagcgacaagcgggatattagccggttcctggagagcaaccccgtgatgatcgatgccaaggaagtgagcgccgcccaccgggccagatacttctggggcaatctgcctggcatgaacagacccctggccagcaccgtgaacgacaagctggagctgcaggagtgcctggagcacggccggatcgccaagttcagcaaggtgagaaccatcaccacccgaagcaacagcatcaaacaaggcaaggaccagcactttcctgtgttcatgaacgagaaggaggacatcctgtggtgtaccgagatggagagagtgttcgggttcccagtccactacacagatgtcagcaacatgtctagactggccagacagagactgctgggaagaagctggtccgtccctgtgatcagacacctgttcgcccctctgaaggagtacttcgcctgcgtgagcagcggcaacagcaacgccaacagccggggccccagcttctctagcggcctggtgccactgtccctgagagggagccacatgggccccatggagatctacaaaaccgtgagcgcctggaagcggcagcctgtgcgcgtgctgagcctgtttcggaatatcgataaagtcctgaaaagcctgggattcctggagagcggctctggctccggcggtggcaccctgaagtacgtggaggatgtgacaaacgtggtcagacgggatgtggagaagtggggccccttcgatctggtgtacggcagcacccaacccctgggcagctcttgtgaccggtgccctggctggtacatgtttcagttccaccggatcctgcagtacgccctgccgagacaggagtcccagcggccattcttttggattttcatggacaacttgctgctgaccgaggatgaccaggaaactaccactcggttcctgcagaccgaagccgtgaccctgcaggacgtgagaggccgggactaccagaacgccatgcgggtgtggtccaacatccctggactgaaaagcaagcacgcacctctgacccctaaagaagaggagtacctgcaggcccaggtgcggagcagaagcaagctggacgcccctaaggtggatctgctggtgaagaattgcctcctgcccctgagagagtacttcaagtatttcagccagaatagtctgcccctgggaggcagcggcggcggcaagcccaggaccgtgagcttcgccgacgtggccgtgtacttcagcagggaggagtggggctgcctgaggcccgcccagagggccctgtacagggacgtgatgagggagacctacggccacctgggcgccctgggcgtgggcggcagcaagcccgccctgatcagctgggtggaggaggaggccgagctgtgggaccccgccgcccaggaccccgaggtgaccaagtgccccaccgagaccgacggcggcccaagcagcggcgcccctcctcccagcggcggcagcccagccggctccccaacctctaccgaggagggcacctctgagtccgccacccccgagagcggccctggcacctccaccgagcccagcgagggcagcgcacccggcagccctgccggcagccccacctccacagaggagggaaccagcaccgagcccagcgaaggcagcgccccaggcaccagcaccgagcctagtgagcaggagattaaacggatcaacaagatcagaagaagacttgtgaaagacagcaacaccaagaaggccggcaagacaggccccatgaaaaccctgctggttagagtgatgacacccgatctgagagagcggctggaaaacctgagaaagaagcctgaaaatatcccccagcccatcagcaatacatctagagccaacctgaataagctgctgaccgattacaccgaaatgaagaaggcgatcctgcatgtgtactgggaagagttccagaaggaccctgtgggcctgatgagccgggtggcccagcctgccagcaagaagatcgatcagaacaagctgaaacctgagatggacgagaagggcaacctgaccaccgccggctttgcctgctctcagtgtggccagcccctgttcgtgtacaagctggagcaggtgtctgagaagggcaaggcttacaccaactacttcggacggtgcaatgtggccgagcacgaaaagctgatcctgctggcccagctgaagcccgagaaggatagcgacgaagccgtgacatatagcctgggaaagtttgggcagagggccctggatttctacagcattcatgtgaccaaggagtccacccaccccgtgaagcccctggcccagatcgccggaaacagatacgcctccggacctgtgggaaaggccctgagcgacgcatgtatgggcacaatcgcctccttcctgtctaagtaccaggacatcatcatcgaacaccagaaggtggtgaagggcaaccagaagagactggagagcctgcgggagctggccggcaaggaaaacctggaataccctagcgtgaccctgccacctcagcctcacaccaaggagggcgttgatgcctacaacgaagtgatcgcccgggtgcgaatgtgggtgaacctgaacctgtggcagaagctgaagctaagcagagatgatgccaagcctctgctgagactgaagggattcccttcctttcctctggtcgagagacaggccaacgaagtggactggtgggacatggtgtgtaacgtgaagaagctgatcaacgagaaaaaggaggatggcaaggtgttttggcagaatctggctggctacaagagacaggaagccctgagaccatacctgagcagcgaggaagatcggaagaagggaaagaaattcgctcggtaccagctgggcgacctgctgctgcacctggaaaagaagcacggcgaggactggggaaaggtgtacgacgaggcctgggagcggattgacaagaaagtggaaggcctgagcaagcacatcaagctggaagaggaacggagaagcgaggacgcccagagcaaggccgccctgaccgactggctgcgggctaaggccagcttcgtgatcgagggcctgaaggaggccgacaaggacgagttctgcagatgcgagctgaagctgcagaagtggtacggggacctgcggggaaagcccttcgccatcgaagccgagaacagcatcctggacatcagcggcttcagcaagcagtacaactgtgccttcatctggcagaaggacggcgtgaagaagctgaacctgtacctgatcatcaactacttcaagggcggcaagctgcggttcaagaagatcaaacctgaagccttcgaagccaacagattctacaccgtgatcaacaaaaagagcggcgagatcgtgcccatggaggtgaacttcaacttcgacgaccccaacctgatcatcctgcctctggcctttggcaagagacagggcagagaattcatctggaacgacctgctgtccctggaaaccggcagcctgaagctggccaacggaagagtgatcgagaagacactgtacaacagaagaacccggcaggatgagcctgccctgttcgtggccctgaccttcgagcggcgggaggtcctggactcctccaatatcaaaccaatgaacctgatcggcgtggcaagaggcgaaaacatccccgccgtgatcgccctgaccgaccccgagggctgcccactgagccggtttaaggatagcctgggaaacccaacccacatcctgagaatcggcgagagctataaggagaagcagcggaccatccaggccaagaaggaggtggagcagcggagagccggcggctacagccggaagtacgccagcaaagccaagaatctggcagacgatatggtgagaaacaccgctagagatctgctgtactacgccgtgacccaggatgccatgctgatcttcgccaacctgagccggggcttcggccggcagggcaagcggaccttcatggccgagagacagtacacacggatggaggactggctgaccgccaagctggcctacgagggcctgagcaagacctacctgtccaagacactggcccagtacacctccaagacatgcagcaactgtgggtttaccatcaccagcgccgactacgacagggtgctggagaagctgaagaagacagcaacaggctggatgaccacaattaacggcaaggagctgaaggtggagggccagattacctactacaacagatacaagagacagaacgtagtcaaggacctgtccgtcgagctggatagactgagcgaagaatctgtgaacaacgacatctcctcctggacaaagggcagaagcggagaagctctgagcctcctgaagaaaagattctcccatagacccgtgcaggagaagttcgtgtgcctgaactgcggcttcgagacacacgcagccgagcaagccgccctgaacatcgccagatcctggctgttcctgcggagccaggagtacaagaaataccagacaaacaagacaaccggcaacaccgataagagagccttcgtcgagacctggcagtccttttaccggaagaagcttaaggaggtgtggaaacctgccgtgcggtctggcggatctggcggaggctccaccagccccaagaaaaagagaaaagtctaagctgccttctgcggggcttgccttctggccatgcccttcttctctcccttgcacctgtacctcttggtctttgaataaagcctgagtaggaaggctagcaaaaaaaaaaaaaaaaaaaaaaaaaaaaaaaaaaaaaaaaaaaaaaaaaaaaaaaaaaaaaaaaaaaaaaaaaaaaaaaa

SEQ ID NO: 13670 - RNA, 5785 nt, synthetic construct
  source 1..5785: mol_type = other RNA
aggaaataagagagaaaagaagagtaagaagaaatataagagccaccatggcccctaagaagaagcgtaaagtgagccggatggaacgcctcgtctacgaggtgcggcagaagtgcagaaacatcgaggacatctgcatctcctgcggatctctgaacgtgaccctggagcacccactgttcatcggcggcatgtgccagaactgtaaaaactgttttctggagtgtgcctatcaatacgacgatgacggctaccagagctactgcaccatctgttgcggcggaagagaggtgctgatgtgtggaaataacaactgctgccggtgcttctgcgtggaatgcgtggacctgctggtgggccccggcgccgcccaggccgctattaaggaagatccttggaactgctacatgtgcggccacaagggcacatacggcctgctgagacggagagaggactggcctagcagactgcagatgttcttcgccaataaccacgaccaggagttcgacccccctaaggtgtaccctcccgtccccgccgagaagagaaagcccatccgggtcctgagcctgttcgatggcatcgccaccggtctgctggtgctgaaggacctgggcatccaggtggataggtacattgcctccgaggtgtgcgaggactccatcaccgtgggaatggtgcgtcatcagggcaagatcatgtacgtgggcgacgtgcggagcgtgacacagaagcatatccaggagtggggccctttcgacctggtgatcggcggcagcccttgcaatgacctgagcatcgtgaacccagcccggaagggcctgtacgagggaaccggcagactgttcttcgagttttacagactgctgcacgacgcccggcctaaggaaggcgacgaccggcccttcttttggctgttcgagaatgtggtggccatgggagtcagcgacaagcgggatattagccggttcctggagagcaaccccgtgatgatcgatgccaaggaagtgagcgccgcccaccgggccagatacttctggggcaatctgcctggcatgaacagacccctggccagcaccgtgaacgacaagctggagctgcaggagtgcctggagcacggccggatcgccaagttcagcaaggtgagaaccatcaccacccgaagcaacagcatcaaacaaggcaaggaccagcactttcctgtgttcatgaacgagaaggaggacatcctgtggtgtaccgagatggagagagtgttcgggttcccagtccactacacagatgtcagcaacatgtctagactggccagacagagactgctgggaagaagctggtccgtccctgtgatcagacacctgttcgcccctctgaaggagtacttcgcctgcgtgagcagcggcaacagcaacgccaacagccggggccccagcttctctagcggcctggtgccactgtccctgagagggagccacatgggccccatggagatctacaaaaccgtgagcgcctggaagcggcagcctgtgcgcgtgctgagcctgtttcggaatatcgataaagtcctgaaaagcctgggattcctggagagcggctctggctccggcggtggcaccctgaagtacgtggaggatgtgacaaacgtggtcagacgggatgtggagaagtggggccccttcgatctggtgtacggcagcacccaacccctgggcagctcttgtgaccggtgccctggctggtacatgtttcagttccaccggatcctgcagtacgccctgccgagacaggagtcccagcggccattcttttggattttcatggacaacttgctgctgaccgaggatgaccaggaaactaccactcggttcctgcagaccgaagccgtgaccctgcaggacgtgagaggccgggactaccagaacgccatgcgggtgtggtccaacatccctggactgaaaagcaagcacgcacctctgacccctaaagaagaggagtacctgcaggcccaggtgcggagcagaagcaagctggacgcccctaaggtggatctgctggtgaagaattgcctcctgcccctgagagagtacttcaagtatttcagccagaatagtctgcccctgggaggcagcggcggcggcggccccctgaccttcagggacgtgaccatcgagttcagccacgaggagtggaagtgcctggaccccgcccagaaggccctgtacaaggacgtgatgctggagaactacaggaacctggtgttcctgggcatcacccccaagtgcaccaccaaggagctgccccccatcggcaacaacaacaccggcgagaagttcaggaccgtgaccctggagaggcacgagtgctacgacatcgaggacatcggcggcccaagcagcggcgcccctcctcccagcggcggcagcccagccggctccccaacctctaccgaggagggcacctctgagtccgccacccccgagagcggccctggcacctccaccgagcccagcgagggcagcgcacccggcagccctgccggcagccccacctccacagaggagggaaccagcaccgagcccagcgaaggcagcgccccaggcaccagcaccgagcctagtgagcaggagattaaacggatcaacaagatcagaagaagacttgtgaaagacagcaacaccaagaaggccggcaagacaggccccatgaaaaccctgctggttagagtgatgacacccgatctgagagagcggctggaaaacctgagaaagaagcctgaaaatatcccccagcccatcagcaatacatctagagccaacctgaataagctgctgaccgattacaccgaaatgaagaaggcgatcctgcatgtgtactgggaagagttccagaaggaccctgtgggcctgatgagccgggtggcccagcctgccagcaagaagatcgatcagaacaagctgaaacctgagatggacgagaagggcaacctgaccaccgccggctttgcctgctctcagtgtggccagcccctgttcgtgtacaagctggagcaggtgtctgagaagggcaaggcttacaccaactacttcggacggtgcaatgtggccgagcacgaaaagctgatcctgctggcccagctgaagcccgagaaggatagcgacgaagccgtgacatatagcctgggaaagtttgggcagagggccctggatttctacagcattcatgtgaccaaggagtccacccaccccgtgaagcccctggcccagatcgccggaaacagatacgcctccggacctgtgggaaaggccctgagcgacgcatgtatgggcacaatcgcctccttcctgtctaagtaccaggacatcatcatcgaacaccagaaggtggtgaagggcaaccagaagagactggagagcctgcgggagctggccggcaaggaaaacctggaataccctagcgtgaccctgccacctcagcctcacaccaaggagggcgttgatgcctacaacgaagtgatcgcccgggtgcgaatgtgggtgaacctgaacctgtggcagaagctgaagctaagcagagatgatgccaagcctctgctgagactgaagggattcccttcctttcctctggtcgagagacaggccaacgaagtggactggtgggacatggtgtgtaacgtgaagaagctgatcaacgagaaaaaggaggatggcaaggtgttttggcagaatctggctggctacaagagacaggaagccctgagaccatacctgagcagcgaggaagatcggaagaagggaaagaaattcgctcggtaccagctgggcgacctgctgctgcacctggaaaagaagcacggcgaggactggggaaaggtgtacgacgaggcctgggagcggattgacaagaaagtggaaggcctgagcaagcacatcaagctggaagaggaacggagaagcgaggacgcccagagcaaggccgccctgaccgactggctgcgggctaaggccagcttcgtgatcgagggcctgaaggaggccgacaaggacgagttctgcagatgcgagctgaagctgcagaagtggtacggggacctgcggggaaagcccttcgccatcgaagccgagaacagcatcctggacatcagcggcttcagcaagcagtacaactgtgccttcatctggcagaaggacggcgtgaagaagctgaacctgtacctgatcatcaactacttcaagggcggcaagctgcggttcaagaagatcaaacctgaagccttcgaagccaacagattctacaccgtgatcaacaaaaagagcggcgagatcgtgcccatggaggtgaacttcaacttcgacgaccccaacctgatcatcctgcctctggcctttggcaagagacagggcagagaattcatctggaacgacctgctgtccctggaaaccggcagcctgaagctggccaacggaagagtgatcgagaagacactgtacaacagaagaacccggcaggatgagcctgccctgttcgtggccctgaccttcgagcggcgggaggtcctggactcctccaatatcaaaccaatgaacctgatcggcgtggcaagaggcgaaaacatccccgccgtgatcgccctgaccgaccccgagggctgcccactgagccggtttaaggatagcctgggaaacccaacccacatcctgagaatcggcgagagctataaggagaagcagcggaccatccaggccaagaaggaggtggagcagcggagagccggcggctacagccggaagtacgccagcaaagccaagaatctggcagacgatatggtgagaaacaccgctagagatctgctgtactacgccgtgacccaggatgccatgctgatcttcgccaacctgagccggggcttcggccggcagggcaagcggaccttcatggccgagagacagtacacacggatggaggactggctgaccgccaagctggcctacgagggcctgagcaagacctacctgtccaagacactggcccagtacacctccaagacatgcagcaactgtgggtttaccatcaccagcgccgactacgacagggtgctggagaagctgaagaagacagcaacaggctggatgaccacaattaacggcaaggagctgaaggtggagggccagattacctactacaacagatacaagagacagaacgtagtcaaggacctgtccgtcgagctggatagactgagcgaagaatctgtgaacaacgacatctcctcctggacaaagggcagaagcggagaagctctgagcctcctgaagaaaagattctcccatagacccgtgcaggagaagttcgtgtgcctgaactgcggcttcgagacacacgcagccgagcaagccgccctgaacatcgccagatcctggctgttcctgcggagccaggagtacaagaaataccagacaaacaagacaaccggcaacaccgataagagagccttcgtcgagacctggcagtccttttaccggaagaagcttaaggaggtgtggaaacctgccgtgcggtctggcggatctggcggaggctccaccagccccaagaaaaagagaaaagtctaagctgccttctgcggggcttgccttctggccatgcccttcttctctcccttgcacctgtacctcttggtctttgaataaagcctgagtaggaaggctagcaaaaaaaaaaaaaaaaaaaaaaaaaaaaaaaaaaaaaaaaaaaaaaaaaaaaaaaaaaaaaaaaaaaaaaaaaaaaaaaa

SEQ ID NO: 13671 - RNA, 5785 nt, synthetic construct
  source 1..5785: mol_type = other RNA
aggaaataagagagaaaagaagagtaagaagaaatataagagccaccatggcccctaagaagaagcgtaaagtgagccggatggaacgcctcgtctacgaggtgcggcagaagtgcagaaacatcgaggacatctgcatctcctgcggatctctgaacgtgaccctggagcacccactgttcatcggcggcatgtgccagaactgtaaaaactgttttctggagtgtgcctatcaatacgacgatgacggctaccagagctactgcaccatctgttgcggcggaagagaggtgctgatgtgtggaaataacaactgctgccggtgcttctgcgtggaatgcgtggacctgctggtgggccccggcgccgcccaggccgctattaaggaagatccttggaactgctacatgtgcggccacaagggcacatacggcctgctgagacggagagaggactggcctagcagactgcagatgttcttcgccaataaccacgaccaggagttcgacccccctaaggtgtaccctcccgtccccgccgagaagagaaagcccatccgggtcctgagcctgttcgatggcatcgccaccggtctgctggtgctgaaggacctgggcatccaggtggataggtacattgcctccgaggtgtgcgaggactccatcaccgtgggaatggtgcgtcatcagggcaagatcatgtacgtgggcgacgtgcggagcgtgacacagaagcatatccaggagtggggccctttcgacctggtgatcggcggcagcccttgcaatgacctgagcatcgtgaacccagcccggaagggcctgtacgagggaaccggcagactgttcttcgagttttacagactgctgcacgacgcccggcctaaggaaggcgacgaccggcccttcttttggctgttcgagaatgtggtggccatgggagtcagcgacaagcgggatattagccggttcctggagagcaaccccgtgatgatcgatgccaaggaagtgagcgccgcccaccgggccagatacttctggggcaatctgcctggcatgaacagacccctggccagcaccgtgaacgacaagctggagctgcaggagtgcctggagcacggccggatcgccaagttcagcaaggtgagaaccatcaccacccgaagcaacagcatcaaacaaggcaaggaccagcactttcctgtgttcatgaacgagaaggaggacatcctgtggtgtaccgagatggagagagtgttcgggttcccagtccactacacagatgtcagcaacatgtctagactggccagacagagactgctgggaagaagctggtccgtccctgtgatcagacacctgttcgcccctctgaaggagtacttcgcctgcgtgagcagcggcaacagcaacgccaacagccggggccccagcttctctagcggcctggtgccactgtccctgagagggagccacatgggccccatggagatctacaaaaccgtgagcgcctggaagcggcagcctgtgcgcgtgctgagcctgtttcggaatatcgataaagtcctgaaaagcctgggattcctggagagcggctctggctccggcggtggcaccctgaagtacgtggaggatgtgacaaacgtggtcagacgggatgtggagaagtggggccccttcgatctggtgtacggcagcacccaacccctgggcagctcttgtgaccggtgccctggctggtacatgtttcagttccaccggatcctgcagtacgccctgccgagacaggagtcccagcggccattcttttggattttcatggacaacttgctgctgaccgaggatgaccaggaaactaccactcggttcctgcagaccgaagccgtgaccctgcaggacgtgagaggccgggactaccagaacgccatgcgggtgtggtccaacatccctggactgaaaagcaagcacgcacctctgacccctaaagaagaggagtacctgcaggcccaggtgcggagcagaagcaagctggacgcccctaaggtggatctgctggtgaagaattgcctcctgcccctgagagagtacttcaagtatttcagccagaatagtctgcccctgggaggcagcggcggcggcttccaggagagcgtgaccttcgaggacgtggccgtgtacttcagcgagaacgagtggatcggcctggcccccgcccagagggtgctgtacagggacgtgatgctggagaactacggcgtggtggccagcctggccttccccttccccaagcccgccctgatcagccagctggagaggggcgaggccccctggtgcaaggccccccagggcgccgtggacggcgagtgccccaggggcgtgagcggcggcccaagcagcggcgcccctcctcccagcggcggcagcccagccggctccccaacctctaccgaggagggcacctctgagtccgccacccccgagagcggccctggcacctccaccgagcccagcgagggcagcgcacccggcagccctgccggcagccccacctccacagaggagggaaccagcaccgagcccagcgaaggcagcgccccaggcaccagcaccgagcctagtgagcaggagattaaacggatcaacaagatcagaagaagacttgtgaaagacagcaacaccaagaaggccggcaagacaggccccatgaaaaccctgctggttagagtgatgacacccgatctgagagagcggctggaaaacctgagaaagaagcctgaaaatatcccccagcccatcagcaatacatctagagccaacctgaataagctgctgaccgattacaccgaaatgaagaaggcgatcctgcatgtgtactgggaagagttccagaaggaccctgtgggcctgatgagccgggtggcccagcctgccagcaagaagatcgatcagaacaagctgaaacctgagatggacgagaagggcaacctgaccaccgccggctttgcctgctctcagtgtggccagcccctgttcgtgtacaagctggagcaggtgtctgagaagggcaaggcttacaccaactacttcggacggtgcaatgtggccgagcacgaaaagctgatcctgctggcccagctgaagcccgagaaggatagcgacgaagccgtgacatatagcctgggaaagtttgggcagagggccctggatttctacagcattcatgtgaccaaggagtccacccaccccgtgaagcccctggcccagatcgccggaaacagatacgcctccggacctgtgggaaaggccctgagcgacgcatgtatgggcacaatcgcctccttcctgtctaagtaccaggacatcatcatcgaacaccagaaggtggtgaagggcaaccagaagagactggagagcctgcgggagctggccggcaaggaaaacctggaataccctagcgtgaccctgccacctcagcctcacaccaaggagggcgttgatgcctacaacgaagtgatcgcccgggtgcgaatgtgggtgaacctgaacctgtggcagaagctgaagctaagcagagatgatgccaagcctctgctgagactgaagggattcccttcctttcctctggtcgagagacaggccaacgaagtggactggtgggacatggtgtgtaacgtgaagaagctgatcaacgagaaaaaggaggatggcaaggtgttttggcagaatctggctggctacaagagacaggaagccctgagaccatacctgagcagcgaggaagatcggaagaagggaaagaaattcgctcggtaccagctgggcgacctgctgctgcacctggaaaagaagcacggcgaggactggggaaaggtgtacgacgaggcctgggagcggattgacaagaaagtggaaggcctgagcaagcacatcaagctggaagaggaacggagaagcgaggacgcccagagcaaggccgccctgaccgactggctgcgggctaaggccagcttcgtgatcgagggcctgaaggaggccgacaaggacgagttctgcagatgcgagctgaagctgcagaagtggtacggggacctgcggggaaagcccttcgccatcgaagccgagaacagcatcctggacatcagcggcttcagcaagcagtacaactgtgccttcatctggcagaaggacggcgtgaagaagctgaacctgtacctgatcatcaactacttcaagggcggcaagctgcggttcaagaagatcaaacctgaagccttcgaagccaacagattctacaccgtgatcaacaaaaagagcggcgagatcgtgcccatggaggtgaacttcaacttcgacgaccccaacctgatcatcctgcctctggcctttggcaagagacagggcagagaattcatctggaacgacctgctgtccctggaaaccggcagcctgaagctggccaacggaagagtgatcgagaagacactgtacaacagaagaacccggcaggatgagcctgccctgttcgtggccctgaccttcgagcggcgggaggtcctggactcctccaatatcaaaccaatgaacctgatcggcgtggcaagaggcgaaaacatccccgccgtgatcgccctgaccgaccccgagggctgcccactgagccggtttaaggatagcctgggaaacccaacccacatcctgagaatcggcgagagctataaggagaagcagcggaccatccaggccaagaaggaggtggagcagcggagagccggcggctacagccggaagtacgccagcaaagccaagaatctggcagacgatatggtgagaaacaccgctagagatctgctgtactacgccgtgacccaggatgccatgctgatcttcgccaacctgagccggggcttcggccggcagggcaagcggaccttcatggccgagagacagtacacacggatggaggactggctgaccgccaagctggcctacgagggcctgagcaagacctacctgtccaagacactggcccagtacacctccaagacatgcagcaactgtgggtttaccatcaccagcgccgactacgacagggtgctggagaagctgaagaagacagcaacaggctggatgaccacaattaacggcaaggagctgaaggtggagggccagattacctactacaacagatacaagagacagaacgtagtcaaggacctgtccgtcgagctggatagactgagcgaagaatctgtgaacaacgacatctcctcctggacaaagggcagaagcggagaagctctgagcctcctgaagaaaagattctcccatagacccgtgcaggagaagttcgtgtgcctgaactgcggcttcgagacacacgcagccgagcaagccgccctgaacatcgccagatcctggctgttcctgcggagccaggagtacaagaaataccagacaaacaagacaaccggcaacaccgataagagagccttcgtcgagacctggcagtccttttaccggaagaagcttaaggaggtgtggaaacctgccgtgcggtctggcggatctggcggaggctccaccagccccaagaaaaagagaaaagtctaagctgccttctgcggggcttgccttctggccatgcccttcttctctcccttgcacctgtacctcttggtctttgaataaagcctgagtaggaaggctagcaaaaaaaaaaaaaaaaaaaaaaaaaaaaaaaaaaaaaaaaaaaaaaaaaaaaaaaaaaaaaaaaaaaaaaaaaaaaaaaa

SEQ ID NO: 13672 - RNA, 5785 nt, synthetic construct
  source 1..5785: mol_type = other RNA
aggaaataagagagaaaagaagagtaagaagaaatataagagccaccatggcccctaagaagaagcgtaaagtgagccggatggaacgcctcgtctacgaggtgcggcagaagtgcagaaacatcgaggacatctgcatctcctgcggatctctgaacgtgaccctggagcacccactgttcatcggcggcatgtgccagaactgtaaaaactgttttctggagtgtgcctatcaatacgacgatgacggctaccagagctactgcaccatctgttgcggcggaagagaggtgctgatgtgtggaaataacaactgctgccggtgcttctgcgtggaatgcgtggacctgctggtgggccccggcgccgcccaggccgctattaaggaagatccttggaactgctacatgtgcggccacaagggcacatacggcctgctgagacggagagaggactggcctagcagactgcagatgttcttcgccaataaccacgaccaggagttcgacccccctaaggtgtaccctcccgtccccgccgagaagagaaagcccatccgggtcctgagcctgttcgatggcatcgccaccggtctgctggtgctgaaggacctgggcatccaggtggataggtacattgcctccgaggtgtgcgaggactccatcaccgtgggaatggtgcgtcatcagggcaagatcatgtacgtgggcgacgtgcggagcgtgacacagaagcatatccaggagtggggccctttcgacctggtgatcggcggcagcccttgcaatgacctgagcatcgtgaacccagcccggaagggcctgtacgagggaaccggcagactgttcttcgagttttacagactgctgcacgacgcccggcctaaggaaggcgacgaccggcccttcttttggctgttcgagaatgtggtggccatgggagtcagcgacaagcgggatattagccggttcctggagagcaaccccgtgatgatcgatgccaaggaagtgagcgccgcccaccgggccagatacttctggggcaatctgcctggcatgaacagacccctggccagcaccgtgaacgacaagctggagctgcaggagtgcctggagcacggccggatcgccaagttcagcaaggtgagaaccatcaccacccgaagcaacagcatcaaacaaggcaaggaccagcactttcctgtgttcatgaacgagaaggaggacatcctgtggtgtaccgagatggagagagtgttcgggttcccagtccactacacagatgtcagcaacatgtctagactggccagacagagactgctgggaagaagctggtccgtccctgtgatcagacacctgttcgcccctctgaaggagtacttcgcctgcgtgagcagcggcaacagcaacgccaacagccggggccccagcttctctagcggcctggtgccactgtccctgagagggagccacatgggccccatggagatctacaaaaccgtgagcgcctggaagcggcagcctgtgcgcgtgctgagcctgtttcggaatatcgataaagtcctgaaaagcctgggattcctggagagcggctctggctccggcggtggcaccctgaagtacgtggaggatgtgacaaacgtggtcagacgggatgtggagaagtggggccccttcgatctggtgtacggcagcacccaacccctgggcagctcttgtgaccggtgccctggctggtacatgtttcagttccaccggatcctgcagtacgccctgccgagacaggagtcccagcggccattcttttggattttcatggacaacttgctgctgaccgaggatgaccaggaaactaccactcggttcctgcagaccgaagccgtgaccctgcaggacgtgagaggccgggactaccagaacgccatgcgggtgtggtccaacatccctggactgaaaagcaagcacgcacctctgacccctaaagaagaggagtacctgcaggcccaggtgcggagcagaagcaagctggacgcccctaaggtggatctgctggtgaagaattgcctcctgcccctgagagagtacttcaagtatttcagccagaatagtctgcccctgggaggcagcggcggcggcaggcccagggccgtgaagttcgccgacgtggccgtgtacttcagccccgaggagtggggctgcctgaggcccgcccagagggccctgtacagggacgtgatgagggagacctacggccacctgggcgccctgggctgcgccggccccaagcccgccctgatcagctggctggagaggaacaccgacgagtgggagcccgccgccctggaccccagggagtgccccaggggcgtgaccgtgcagggcggcccaagcagcggcgcccctcctcccagcggcggcagcccagccggctccccaacctctaccgaggagggcacctctgagtccgccacccccgagagcggccctggcacctccaccgagcccagcgagggcagcgcacccggcagccctgccggcagccccacctccacagaggagggaaccagcaccgagcccagcgaaggcagcgccccaggcaccagcaccgagcctagtgagcaggagattaaacggatcaacaagatcagaagaagacttgtgaaagacagcaacaccaagaaggccggcaagacaggccccatgaaaaccctgctggttagagtgatgacacccgatctgagagagcggctggaaaacctgagaaagaagcctgaaaatatcccccagcccatcagcaatacatctagagccaacctgaataagctgctgaccgattacaccgaaatgaagaaggcgatcctgcatgtgtactgggaagagttccagaaggaccctgtgggcctgatgagccgggtggcccagcctgccagcaagaagatcgatcagaacaagctgaaacctgagatggacgagaagggcaacctgaccaccgccggctttgcctgctctcagtgtggccagcccctgttcgtgtacaagctggagcaggtgtctgagaagggcaaggcttacaccaactacttcggacggtgcaatgtggccgagcacgaaaagctgatcctgctggcccagctgaagcccgagaaggatagcgacgaagccgtgacatatagcctgggaaagtttgggcagagggccctggatttctacagcattcatgtgaccaaggagtccacccaccccgtgaagcccctggcccagatcgccggaaacagatacgcctccggacctgtgggaaaggccctgagcgacgcatgtatgggcacaatcgcctccttcctgtctaagtaccaggacatcatcatcgaacaccagaaggtggtgaagggcaaccagaagagactggagagcctgcgggagctggccggcaaggaaaacctggaataccctagcgtgaccctgccacctcagcctcacaccaaggagggcgttgatgcctacaacgaagtgatcgcccgggtgcgaatgtgggtgaacctgaacctgtggcagaagctgaagctaagcagagatgatgccaagcctctgctgagactgaagggattcccttcctttcctctggtcgagagacaggccaacgaagtggactggtgggacatggtgtgtaacgtgaagaagctgatcaacgagaaaaaggaggatggcaaggtgttttggcagaatctggctggctacaagagacaggaagccctgagaccatacctgagcagcgaggaagatcggaagaagggaaagaaattcgctcggtaccagctgggcgacctgctgctgcacctggaaaagaagcacggcgaggactggggaaaggtgtacgacgaggcctgggagcggattgacaagaaagtggaaggcctgagcaagcacatcaagctggaagaggaacggagaagcgaggacgcccagagcaaggccgccctgaccgactggctgcgggctaaggccagcttcgtgatcgagggcctgaaggaggccgacaaggacgagttctgcagatgcgagctgaagctgcagaagtggtacggggacctgcggggaaagcccttcgccatcgaagccgagaacagcatcctggacatcagcggcttcagcaagcagtacaactgtgccttcatctggcagaaggacggcgtgaagaagctgaacctgtacctgatcatcaactacttcaagggcggcaagctgcggttcaagaagatcaaacctgaagccttcgaagccaacagattctacaccgtgatcaacaaaaagagcggcgagatcgtgcccatggaggtgaacttcaacttcgacgaccccaacctgatcatcctgcctctggcctttggcaagagacagggcagagaattcatctggaacgacctgctgtccctggaaaccggcagcctgaagctggccaacggaagagtgatcgagaagacactgtacaacagaagaacccggcaggatgagcctgccctgttcgtggccctgaccttcgagcggcgggaggtcctggactcctccaatatcaaaccaatgaacctgatcggcgtggcaagaggcgaaaacatccccgccgtgatcgccctgaccgaccccgagggctgcccactgagccggtttaaggatagcctgggaaacccaacccacatcctgagaatcggcgagagctataaggagaagcagcggaccatccaggccaagaaggaggtggagcagcggagagccggcggctacagccggaagtacgccagcaaagccaagaatctggcagacgatatggtgagaaacaccgctagagatctgctgtactacgccgtgacccaggatgccatgctgatcttcgccaacctgagccggggcttcggccggcagggcaagcggaccttcatggccgagagacagtacacacggatggaggactggctgaccgccaagctggcctacgagggcctgagcaagacctacctgtccaagacactggcccagtacacctccaagacatgcagcaactgtgggtttaccatcaccagcgccgactacgacagggtgctggagaagctgaagaagacagcaacaggctggatgaccacaattaacggcaaggagctgaaggtggagggccagattacctactacaacagatacaagagacagaacgtagtcaaggacctgtccgtcgagctggatagactgagcgaagaatctgtgaacaacgacatctcctcctggacaaagggcagaagcggagaagctctgagcctcctgaagaaaagattctcccatagacccgtgcaggagaagttcgtgtgcctgaactgcggcttcgagacacacgcagccgagcaagccgccctgaacatcgccagatcctggctgttcctgcggagccaggagtacaagaaataccagacaaacaagacaaccggcaacaccgataagagagccttcgtcgagacctggcagtccttttaccggaagaagcttaaggaggtgtggaaacctgccgtgcggtctggcggatctggcggaggctccaccagccccaagaaaaagagaaaagtctaagctgccttctgcggggcttgccttctggccatgcccttcttctctcccttgcacctgtacctcttggtctttgaataaagcctgagtaggaaggctagcaaaaaaaaaaaaaaaaaaaaaaaaaaaaaaaaaaaaaaaaaaaaaaaaaaaaaaaaaaaaaaaaaaaaaaaaaaaaaaaa

SEQ ID NO: 13673 - RNA, 5785 nt, synthetic construct
  source 1..5785: mol_type = other RNA
aggaaataagagagaaaagaagagtaagaagaaatataagagccaccatggcccctaagaagaagcgtaaagtgagccggatggaacgcctcgtctacgaggtgcggcagaagtgcagaaacatcgaggacatctgcatctcctgcggatctctgaacgtgaccctggagcacccactgttcatcggcggcatgtgccagaactgtaaaaactgttttctggagtgtgcctatcaatacgacgatgacggctaccagagctactgcaccatctgttgcggcggaagagaggtgctgatgtgtggaaataacaactgctgccggtgcttctgcgtggaatgcgtggacctgctggtgggccccggcgccgcccaggccgctattaaggaagatccttggaactgctacatgtgcggccacaagggcacatacggcctgctgagacggagagaggactggcctagcagactgcagatgttcttcgccaataaccacgaccaggagttcgacccccctaaggtgtaccctcccgtccccgccgagaagagaaagcccatccgggtcctgagcctgttcgatggcatcgccaccggtctgctggtgctgaaggacctgggcatccaggtggataggtacattgcctccgaggtgtgcgaggactccatcaccgtgggaatggtgcgtcatcagggcaagatcatgtacgtgggcgacgtgcggagcgtgacacagaagcatatccaggagtggggccctttcgacctggtgatcggcggcagcccttgcaatgacctgagcatcgtgaacccagcccggaagggcctgtacgagggaaccggcagactgttcttcgagttttacagactgctgcacgacgcccggcctaaggaaggcgacgaccggcccttcttttggctgttcgagaatgtggtggccatgggagtcagcgacaagcgggatattagccggttcctggagagcaaccccgtgatgatcgatgccaaggaagtgagcgccgcccaccgggccagatacttctggggcaatctgcctggcatgaacagacccctggccagcaccgtgaacgacaagctggagctgcaggagtgcctggagcacggccggatcgccaagttcagcaaggtgagaaccatcaccacccgaagcaacagcatcaaacaaggcaaggaccagcactttcctgtgttcatgaacgagaaggaggacatcctgtggtgtaccgagatggagagagtgttcgggttcccagtccactacacagatgtcagcaacatgtctagactggccagacagagactgctgggaagaagctggtccgtccctgtgatcagacacctgttcgcccctctgaaggagtacttcgcctgcgtgagcagcggcaacagcaacgccaacagccggggccccagcttctctagcggcctggtgccactgtccctgagagggagccacatgggccccatggagatctacaaaaccgtgagcgcctggaagcggcagcctgtgcgcgtgctgagcctgtttcggaatatcgataaagtcctgaaaagcctgggattcctggagagcggctctggctccggcggtggcaccctgaagtacgtggaggatgtgacaaacgtggtcagacgggatgtggagaagtggggccccttcgatctggtgtacggcagcacccaacccctgggcagctcttgtgaccggtgccctggctggtacatgtttcagttccaccggatcctgcagtacgccctgccgagacaggagtcccagcggccattcttttggattttcatggacaacttgctgctgaccgaggatgaccaggaaactaccactcggttcctgcagaccgaagccgtgaccctgcaggacgtgagaggccgggactaccagaacgccatgcgggtgtggtccaacatccctggactgaaaagcaagcacgcacctctgacccctaaagaagaggagtacctgcaggcccaggtgcggagcagaagcaagctggacgcccctaaggtggatctgctggtgaagaattgcctcctgcccctgagagagtacttcaagtatttcagccagaatagtctgcccctgggaggcagcggcggcggcctgcaggagcccgtgaccttcgccgacgtggccgtgctgttcacccccgaggagtggatgttcctggacagcgcccagaggagcctgtacagggacgtgatgctggagaactacaggaacctggccagcgtgggcgaccagctgggcaagcccagcatgctgagcctgagcgagcccggcgaggagctgtgggcccccgagaggaggaccttccccggcaccaggcccgagccccagcaccagggcggcccaagcagcggcgcccctcctcccagcggcggcagcccagccggctccccaacctctaccgaggagggcacctctgagtccgccacccccgagagcggccctggcacctccaccgagcccagcgagggcagcgcacccggcagccctgccggcagccccacctccacagaggagggaaccagcaccgagcccagcgaaggcagcgccccaggcaccagcaccgagcctagtgagcaggagattaaacggatcaacaagatcagaagaagacttgtgaaagacagcaacaccaagaaggccggcaagacaggccccatgaaaaccctgctggttagagtgatgacacccgatctgagagagcggctggaaaacctgagaaagaagcctgaaaatatcccccagcccatcagcaatacatctagagccaacctgaataagctgctgaccgattacaccgaaatgaagaaggcgatcctgcatgtgtactgggaagagttccagaaggaccctgtgggcctgatgagccgggtggcccagcctgccagcaagaagatcgatcagaacaagctgaaacctgagatggacgagaagggcaacctgaccaccgccggctttgcctgctctcagtgtggccagcccctgttcgtgtacaagctggagcaggtgtctgagaagggcaaggcttacaccaactacttcggacggtgcaatgtggccgagcacgaaaagctgatcctgctggcccagctgaagcccgagaaggatagcgacgaagccgtgacatatagcctgggaaagtttgggcagagggccctggatttctacagcattcatgtgaccaaggagtccacccaccccgtgaagcccctggcccagatcgccggaaacagatacgcctccggacctgtgggaaaggccctgagcgacgcatgtatgggcacaatcgcctccttcctgtctaagtaccaggacatcatcatcgaacaccagaaggtggtgaagggcaaccagaagagactggagagcctgcgggagctggccggcaaggaaaacctggaataccctagcgtgaccctgccacctcagcctcacaccaaggagggcgttgatgcctacaacgaagtgatcgcccgggtgcgaatgtgggtgaacctgaacctgtggcagaagctgaagctaagcagagatgatgccaagcctctgctgagactgaagggattcccttcctttcctctggtcgagagacaggccaacgaagtggactggtgggacatggtgtgtaacgtgaagaagctgatcaacgagaaaaaggaggatggcaaggtgttttggcagaatctggctggctacaagagacaggaagccctgagaccatacctgagcagcgaggaagatcggaagaagggaaagaaattcgctcggtaccagctgggcgacctgctgctgcacctggaaaagaagcacggcgaggactggggaaaggtgtacgacgaggcctgggagcggattgacaagaaagtggaaggcctgagcaagcacatcaagctggaagaggaacggagaagcgaggacgcccagagcaaggccgccctgaccgactggctgcgggctaaggccagcttcgtgatcgagggcctgaaggaggccgacaaggacgagttctgcagatgcgagctgaagctgcagaagtggtacggggacctgcggggaaagcccttcgccatcgaagccgagaacagcatcctggacatcagcggcttcagcaagcagtacaactgtgccttcatctggcagaaggacggcgtgaagaagctgaacctgtacctgatcatcaactacttcaagggcggcaagctgcggttcaagaagatcaaacctgaagccttcgaagccaacagattctacaccgtgatcaacaaaaagagcggcgagatcgtgcccatggaggtgaacttcaacttcgacgaccccaacctgatcatcctgcctctggcctttggcaagagacagggcagagaattcatctggaacgacctgctgtccctggaaaccggcagcctgaagctggccaacggaagagtgatcgagaagacactgtacaacagaagaacccggcaggatgagcctgccctgttcgtggccctgaccttcgagcggcgggaggtcctggactcctccaatatcaaaccaatgaacctgatcggcgtggcaagaggcgaaaacatccccgccgtgatcgccctgaccgaccccgagggctgcccactgagccggtttaaggatagcctgggaaacccaacccacatcctgagaatcggcgagagctataaggagaagcagcggaccatccaggccaagaaggaggtggagcagcggagagccggcggctacagccggaagtacgccagcaaagccaagaatctggcagacgatatggtgagaaacaccgctagagatctgctgtactacgccgtgacccaggatgccatgctgatcttcgccaacctgagccggggcttcggccggcagggcaagcggaccttcatggccgagagacagtacacacggatggaggactggctgaccgccaagctggcctacgagggcctgagcaagacctacctgtccaagacactggcccagtacacctccaagacatgcagcaactgtgggtttaccatcaccagcgccgactacgacagggtgctggagaagctgaagaagacagcaacaggctggatgaccacaattaacggcaaggagctgaaggtggagggccagattacctactacaacagatacaagagacagaacgtagtcaaggacctgtccgtcgagctggatagactgagcgaagaatctgtgaacaacgacatctcctcctggacaaagggcagaagcggagaagctctgagcctcctgaagaaaagattctcccatagacccgtgcaggagaagttcgtgtgcctgaactgcggcttcgagacacacgcagccgagcaagccgccctgaacatcgccagatcctggctgttcctgcggagccaggagtacaagaaataccagacaaacaagacaaccggcaacaccgataagagagccttcgtcgagacctggcagtccttttaccggaagaagcttaaggaggtgtggaaacctgccgtgcggtctggcggatctggcggaggctccaccagccccaagaaaaagagaaaagtctaagctgccttctgcggggcttgccttctggccatgcccttcttctctcccttgcacctgtacctcttggtctttgaataaagcctgagtaggaaggctagcaaaaaaaaaaaaaaaaaaaaaaaaaaaaaaaaaaaaaaaaaaaaaaaaaaaaaaaaaaaaaaaaaaaaaaaaaaaaaaaa

SEQ ID NO: 13674 - RNA, 5785 nt, synthetic construct
  source 1..5785: mol_type = other RNA
aggaaataagagagaaaagaagagtaagaagaaatataagagccaccatggcccctaagaagaagcgtaaagtgagccggatggaacgcctcgtctacgaggtgcggcagaagtgcagaaacatcgaggacatctgcatctcctgcggatctctgaacgtgaccctggagcacccactgttcatcggcggcatgtgccagaactgtaaaaactgttttctggagtgtgcctatcaatacgacgatgacggctaccagagctactgcaccatctgttgcggcggaagagaggtgctgatgtgtggaaataacaactgctgccggtgcttctgcgtggaatgcgtggacctgctggtgggccccggcgccgcccaggccgctattaaggaagatccttggaactgctacatgtgcggccacaagggcacatacggcctgctgagacggagagaggactggcctagcagactgcagatgttcttcgccaataaccacgaccaggagttcgacccccctaaggtgtaccctcccgtccccgccgagaagagaaagcccatccgggtcctgagcctgttcgatggcatcgccaccggtctgctggtgctgaaggacctgggcatccaggtggataggtacattgcctccgaggtgtgcgaggactccatcaccgtgggaatggtgcgtcatcagggcaagatcatgtacgtgggcgacgtgcggagcgtgacacagaagcatatccaggagtggggccctttcgacctggtgatcggcggcagcccttgcaatgacctgagcatcgtgaacccagcccggaagggcctgtacgagggaaccggcagactgttcttcgagttttacagactgctgcacgacgcccggcctaaggaaggcgacgaccggcccttcttttggctgttcgagaatgtggtggccatgggagtcagcgacaagcgggatattagccggttcctggagagcaaccccgtgatgatcgatgccaaggaagtgagcgccgcccaccgggccagatacttctggggcaatctgcctggcatgaacagacccctggccagcaccgtgaacgacaagctggagctgcaggagtgcctggagcacggccggatcgccaagttcagcaaggtgagaaccatcaccacccgaagcaacagcatcaaacaaggcaaggaccagcactttcctgtgttcatgaacgagaaggaggacatcctgtggtgtaccgagatggagagagtgttcgggttcccagtccactacacagatgtcagcaacatgtctagactggccagacagagactgctgggaagaagctggtccgtccctgtgatcagacacctgttcgcccctctgaaggagtacttcgcctgcgtgagcagcggcaacagcaacgccaacagccggggccccagcttctctagcggcctggtgccactgtccctgagagggagccacatgggccccatggagatctacaaaaccgtgagcgcctggaagcggcagcctgtgcgcgtgctgagcctgtttcggaatatcgataaagtcctgaaaagcctgggattcctggagagcggctctggctccggcggtggcaccctgaagtacgtggaggatgtgacaaacgtggtcagacgggatgtggagaagtggggccccttcgatctggtgtacggcagcacccaacccctgggcagctcttgtgaccggtgccctggctggtacatgtttcagttccaccggatcctgcagtacgccctgccgagacaggagtcccagcggccattcttttggattttcatggacaacttgctgctgaccgaggatgaccaggaaactaccactcggttcctgcagaccgaagccgtgaccctgcaggacgtgagaggccgggactaccagaacgccatgcgggtgtggtccaacatccctggactgaaaagcaagcacgcacctctgacccctaaagaagaggagtacctgcaggcccaggtgcggagcagaagcaagctggacgcccctaaggtggatctgctggtgaagaattgcctcctgcccctgagagagtacttcaagtatttcagccagaatagtctgcccctgggaggcagcggcggcggcatcagggagttcggcggcatgggcgccggcatcgccaacatctggagcttccagggcagcgtgaccttcagggacgtggccatcgacttcagccaggaggagtggaagtggctgcagcccgcccagagggacctgtacaggtgcgtgatgctggagaactacggccacctggtgagcctgggcctgagcatcagcaagcccgacgtggtgagcctgctggagcagggcaaggagccctggctgggcggcccaagcagcggcgcccctcctcccagcggcggcagcccagccggctccccaacctctaccgaggagggcacctctgagtccgccacccccgagagcggccctggcacctccaccgagcccagcgagggcagcgcacccggcagccctgccggcagccccacctccacagaggagggaaccagcaccgagcccagcgaaggcagcgccccaggcaccagcaccgagcctagtgagcaggagattaaacggatcaacaagatcagaagaagacttgtgaaagacagcaacaccaagaaggccggcaagacaggccccatgaaaaccctgctggttagagtgatgacacccgatctgagagagcggctggaaaacctgagaaagaagcctgaaaatatcccccagcccatcagcaatacatctagagccaacctgaataagctgctgaccgattacaccgaaatgaagaaggcgatcctgcatgtgtactgggaagagttccagaaggaccctgtgggcctgatgagccgggtggcccagcctgccagcaagaagatcgatcagaacaagctgaaacctgagatggacgagaagggcaacctgaccaccgccggctttgcctgctctcagtgtggccagcccctgttcgtgtacaagctggagcaggtgtctgagaagggcaaggcttacaccaactacttcggacggtgcaatgtggccgagcacgaaaagctgatcctgctggcccagctgaagcccgagaaggatagcgacgaagccgtgacatatagcctgggaaagtttgggcagagggccctggatttctacagcattcatgtgaccaaggagtccacccaccccgtgaagcccctggcccagatcgccggaaacagatacgcctccggacctgtgggaaaggccctgagcgacgcatgtatgggcacaatcgcctccttcctgtctaagtaccaggacatcatcatcgaacaccagaaggtggtgaagggcaaccagaagagactggagagcctgcgggagctggccggcaaggaaaacctggaataccctagcgtgaccctgccacctcagcctcacaccaaggagggcgttgatgcctacaacgaagtgatcgcccgggtgcgaatgtgggtgaacctgaacctgtggcagaagctgaagctaagcagagatgatgccaagcctctgctgagactgaagggattcccttcctttcctctggtcgagagacaggccaacgaagtggactggtgggacatggtgtgtaacgtgaagaagctgatcaacgagaaaaaggaggatggcaaggtgttttggcagaatctggctggctacaagagacaggaagccctgagaccatacctgagcagcgaggaagatcggaagaagggaaagaaattcgctcggtaccagctgggcgacctgctgctgcacctggaaaagaagcacggcgaggactggggaaaggtgtacgacgaggcctgggagcggattgacaagaaagtggaaggcctgagcaagcacatcaagctggaagaggaacggagaagcgaggacgcccagagcaaggccgccctgaccgactggctgcgggctaaggccagcttcgtgatcgagggcctgaaggaggccgacaaggacgagttctgcagatgcgagctgaagctgcagaagtggtacggggacctgcggggaaagcccttcgccatcgaagccgagaacagcatcctggacatcagcggcttcagcaagcagtacaactgtgccttcatctggcagaaggacggcgtgaagaagctgaacctgtacctgatcatcaactacttcaagggcggcaagctgcggttcaagaagatcaaacctgaagccttcgaagccaacagattctacaccgtgatcaacaaaaagagcggcgagatcgtgcccatggaggtgaacttcaacttcgacgaccccaacctgatcatcctgcctctggcctttggcaagagacagggcagagaattcatctggaacgacctgctgtccctggaaaccggcagcctgaagctggccaacggaagagtgatcgagaagacactgtacaacagaagaacccggcaggatgagcctgccctgttcgtggccctgaccttcgagcggcgggaggtcctggactcctccaatatcaaaccaatgaacctgatcggcgtggcaagaggcgaaaacatccccgccgtgatcgccctgaccgaccccgagggctgcccactgagccggtttaaggatagcctgggaaacccaacccacatcctgagaatcggcgagagctataaggagaagcagcggaccatccaggccaagaaggaggtggagcagcggagagccggcggctacagccggaagtacgccagcaaagccaagaatctggcagacgatatggtgagaaacaccgctagagatctgctgtactacgccgtgacccaggatgccatgctgatcttcgccaacctgagccggggcttcggccggcagggcaagcggaccttcatggccgagagacagtacacacggatggaggactggctgaccgccaagctggcctacgagggcctgagcaagacctacctgtccaagacactggcccagtacacctccaagacatgcagcaactgtgggtttaccatcaccagcgccgactacgacagggtgctggagaagctgaagaagacagcaacaggctggatgaccacaattaacggcaaggagctgaaggtggagggccagattacctactacaacagatacaagagacagaacgtagtcaaggacctgtccgtcgagctggatagactgagcgaagaatctgtgaacaacgacatctcctcctggacaaagggcagaagcggagaagctctgagcctcctgaagaaaagattctcccatagacccgtgcaggagaagttcgtgtgcctgaactgcggcttcgagacacacgcagccgagcaagccgccctgaacatcgccagatcctggctgttcctgcggagccaggagtacaagaaataccagacaaacaagacaaccggcaacaccgataagagagccttcgtcgagacctggcagtccttttaccggaagaagcttaaggaggtgtggaaacctgccgtgcggtctggcggatctggcggaggctccaccagccccaagaaaaagagaaaagtctaagctgccttctgcggggcttgccttctggccatgcccttcttctctcccttgcacctgtacctcttggtctttgaataaagcctgagtaggaaggctagcaaaaaaaaaaaaaaaaaaaaaaaaaaaaaaaaaaaaaaaaaaaaaaaaaaaaaaaaaaaaaaaaaaaaaaaaaaaaaaaa

SEQ ID NO: 13675 - RNA, 5785 nt, synthetic construct
  source 1..5785: mol_type = other RNA
aggaaataagagagaaaagaagagtaagaagaaatataagagccaccatggcccctaagaagaagcgtaaagtgagccggatggaacgcctcgtctacgaggtgcggcagaagtgcagaaacatcgaggacatctgcatctcctgcggatctctgaacgtgaccctggagcacccactgttcatcggcggcatgtgccagaactgtaaaaactgttttctggagtgtgcctatcaatacgacgatgacggctaccagagctactgcaccatctgttgcggcggaagagaggtgctgatgtgtggaaataacaactgctgccggtgcttctgcgtggaatgcgtggacctgctggtgggccccggcgccgcccaggccgctattaaggaagatccttggaactgctacatgtgcggccacaagggcacatacggcctgctgagacggagagaggactggcctagcagactgcagatgttcttcgccaataaccacgaccaggagttcgacccccctaaggtgtaccctcccgtccccgccgagaagagaaagcccatccgggtcctgagcctgttcgatggcatcgccaccggtctgctggtgctgaaggacctgggcatccaggtggataggtacattgcctccgaggtgtgcgaggactccatcaccgtgggaatggtgcgtcatcagggcaagatcatgtacgtgggcgacgtgcggagcgtgacacagaagcatatccaggagtggggccctttcgacctggtgatcggcggcagcccttgcaatgacctgagcatcgtgaacccagcccggaagggcctgtacgagggaaccggcagactgttcttcgagttttacagactgctgcacgacgcccggcctaaggaaggcgacgaccggcccttcttttggctgttcgagaatgtggtggccatgggagtcagcgacaagcgggatattagccggttcctggagagcaaccccgtgatgatcgatgccaaggaagtgagcgccgcccaccgggccagatacttctggggcaatctgcctggcatgaacagacccctggccagcaccgtgaacgacaagctggagctgcaggagtgcctggagcacggccggatcgccaagttcagcaaggtgagaaccatcaccacccgaagcaacagcatcaaacaaggcaaggaccagcactttcctgtgttcatgaacgagaaggaggacatcctgtggtgtaccgagatggagagagtgttcgggttcccagtccactacacagatgtcagcaacatgtctagactggccagacagagactgctgggaagaagctggtccgtccctgtgatcagacacctgttcgcccctctgaaggagtacttcgcctgcgtgagcagcggcaacagcaacgccaacagccggggccccagcttctctagcggcctggtgccactgtccctgagagggagccacatgggccccatggagatctacaaaaccgtgagcgcctggaagcggcagcctgtgcgcgtgctgagcctgtttcggaatatcgataaagtcctgaaaagcctgggattcctggagagcggctctggctccggcggtggcaccctgaagtacgtggaggatgtgacaaacgtggtcagacgggatgtggagaagtggggccccttcgatctggtgtacggcagcacccaacccctgggcagctcttgtgaccggtgccctggctggtacatgtttcagttccaccggatcctgcagtacgccctgccgagacaggagtcccagcggccattcttttggattttcatggacaacttgctgctgaccgaggatgaccaggaaactaccactcggttcctgcagaccgaagccgtgaccctgcaggacgtgagaggccgggactaccagaacgccatgcgggtgtggtccaacatccctggactgaaaagcaagcacgcacctctgacccctaaagaagaggagtacctgcaggcccaggtgcggagcagaagcaagctggacgcccctaaggtggatctgctggtgaagaattgcctcctgcccctgagagagtacttcaagtatttcagccagaatagtctgcccctgggaggcagcggcggcggcacccagggcctggtgaccttcagggacgtggccatcgagttcagccaggaggagtggaagtgcctggagcccgcccagaaggacctgtacaaggacgtgaccctggagaacttcagcaacctggtgagcctgggcctgagcctgcccaagcccgacgtgatcagcctgctggagcagggcaaggagccctggatggtgatcaacgacatgaccggcccctggtgccccgacctggagagcaggggcggcccaagcagcggcgcccctcctcccagcggcggcagcccagccggctccccaacctctaccgaggagggcacctctgagtccgccacccccgagagcggccctggcacctccaccgagcccagcgagggcagcgcacccggcagccctgccggcagccccacctccacagaggagggaaccagcaccgagcccagcgaaggcagcgccccaggcaccagcaccgagcctagtgagcaggagattaaacggatcaacaagatcagaagaagacttgtgaaagacagcaacaccaagaaggccggcaagacaggccccatgaaaaccctgctggttagagtgatgacacccgatctgagagagcggctggaaaacctgagaaagaagcctgaaaatatcccccagcccatcagcaatacatctagagccaacctgaataagctgctgaccgattacaccgaaatgaagaaggcgatcctgcatgtgtactgggaagagttccagaaggaccctgtgggcctgatgagccgggtggcccagcctgccagcaagaagatcgatcagaacaagctgaaacctgagatggacgagaagggcaacctgaccaccgccggctttgcctgctctcagtgtggccagcccctgttcgtgtacaagctggagcaggtgtctgagaagggcaaggcttacaccaactacttcggacggtgcaatgtggccgagcacgaaaagctgatcctgctggcccagctgaagcccgagaaggatagcgacgaagccgtgacatatagcctgggaaagtttgggcagagggccctggatttctacagcattcatgtgaccaaggagtccacccaccccgtgaagcccctggcccagatcgccggaaacagatacgcctccggacctgtgggaaaggccctgagcgacgcatgtatgggcacaatcgcctccttcctgtctaagtaccaggacatcatcatcgaacaccagaaggtggtgaagggcaaccagaagagactggagagcctgcgggagctggccggcaaggaaaacctggaataccctagcgtgaccctgccacctcagcctcacaccaaggagggcgttgatgcctacaacgaagtgatcgcccgggtgcgaatgtgggtgaacctgaacctgtggcagaagctgaagctaagcagagatgatgccaagcctctgctgagactgaagggattcccttcctttcctctggtcgagagacaggccaacgaagtggactggtgggacatggtgtgtaacgtgaagaagctgatcaacgagaaaaaggaggatggcaaggtgttttggcagaatctggctggctacaagagacaggaagccctgagaccatacctgagcagcgaggaagatcggaagaagggaaagaaattcgctcggtaccagctgggcgacctgctgctgcacctggaaaagaagcacggcgaggactggggaaaggtgtacgacgaggcctgggagcggattgacaagaaagtggaaggcctgagcaagcacatcaagctggaagaggaacggagaagcgaggacgcccagagcaaggccgccctgaccgactggctgcgggctaaggccagcttcgtgatcgagggcctgaaggaggccgacaaggacgagttctgcagatgcgagctgaagctgcagaagtggtacggggacctgcggggaaagcccttcgccatcgaagccgagaacagcatcctggacatcagcggcttcagcaagcagtacaactgtgccttcatctggcagaaggacggcgtgaagaagctgaacctgtacctgatcatcaactacttcaagggcggcaagctgcggttcaagaagatcaaacctgaagccttcgaagccaacagattctacaccgtgatcaacaaaaagagcggcgagatcgtgcccatggaggtgaacttcaacttcgacgaccccaacctgatcatcctgcctctggcctttggcaagagacagggcagagaattcatctggaacgacctgctgtccctggaaaccggcagcctgaagctggccaacggaagagtgatcgagaagacactgtacaacagaagaacccggcaggatgagcctgccctgttcgtggccctgaccttcgagcggcgggaggtcctggactcctccaatatcaaaccaatgaacctgatcggcgtggcaagaggcgaaaacatccccgccgtgatcgccctgaccgaccccgagggctgcccactgagccggtttaaggatagcctgggaaacccaacccacatcctgagaatcggcgagagctataaggagaagcagcggaccatccaggccaagaaggaggtggagcagcggagagccggcggctacagccggaagtacgccagcaaagccaagaatctggcagacgatatggtgagaaacaccgctagagatctgctgtactacgccgtgacccaggatgccatgctgatcttcgccaacctgagccggggcttcggccggcagggcaagcggaccttcatggccgagagacagtacacacggatggaggactggctgaccgccaagctggcctacgagggcctgagcaagacctacctgtccaagacactggcccagtacacctccaagacatgcagcaactgtgggtttaccatcaccagcgccgactacgacagggtgctggagaagctgaagaagacagcaacaggctggatgaccacaattaacggcaaggagctgaaggtggagggccagattacctactacaacagatacaagagacagaacgtagtcaaggacctgtccgtcgagctggatagactgagcgaagaatctgtgaacaacgacatctcctcctggacaaagggcagaagcggagaagctctgagcctcctgaagaaaagattctcccatagacccgtgcaggagaagttcgtgtgcctgaactgcggcttcgagacacacgcagccgagcaagccgccctgaacatcgccagatcctggctgttcctgcggagccaggagtacaagaaataccagacaaacaagacaaccggcaacaccgataagagagccttcgtcgagacctggcagtccttttaccggaagaagcttaaggaggtgtggaaacctgccgtgcggtctggcggatctggcggaggctccaccagccccaagaaaaagagaaaagtctaagctgccttctgcggggcttgccttctggccatgcccttcttctctcccttgcacctgtacctcttggtctttgaataaagcctgagtaggaaggctagcaaaaaaaaaaaaaaaaaaaaaaaaaaaaaaaaaaaaaaaaaaaaaaaaaaaaaaaaaaaaaaaaaaaaaaaaaaaaaaaa

SEQ ID NO: 13676 - RNA, 5785 nt, synthetic construct
  source 1..5785: mol_type = other RNA
aggaaataagagagaaaagaagagtaagaagaaatataagagccaccatggcccctaagaagaagcgtaaagtgagccggatggaacgcctcgtctacgaggtgcggcagaagtgcagaaacatcgaggacatctgcatctcctgcggatctctgaacgtgaccctggagcacccactgttcatcggcggcatgtgccagaactgtaaaaactgttttctggagtgtgcctatcaatacgacgatgacggctaccagagctactgcaccatctgttgcggcggaagagaggtgctgatgtgtggaaataacaactgctgccggtgcttctgcgtggaatgcgtggacctgctggtgggccccggcgccgcccaggccgctattaaggaagatccttggaactgctacatgtgcggccacaagggcacatacggcctgctgagacggagagaggactggcctagcagactgcagatgttcttcgccaataaccacgaccaggagttcgacccccctaaggtgtaccctcccgtccccgccgagaagagaaagcccatccgggtcctgagcctgttcgatggcatcgccaccggtctgctggtgctgaaggacctgggcatccaggtggataggtacattgcctccgaggtgtgcgaggactccatcaccgtgggaatggtgcgtcatcagggcaagatcatgtacgtgggcgacgtgcggagcgtgacacagaagcatatccaggagtggggccctttcgacctggtgatcggcggcagcccttgcaatgacctgagcatcgtgaacccagcccggaagggcctgtacgagggaaccggcagactgttcttcgagttttacagactgctgcacgacgcccggcctaaggaaggcgacgaccggcccttcttttggctgttcgagaatgtggtggccatgggagtcagcgacaagcgggatattagccggttcctggagagcaaccccgtgatgatcgatgccaaggaagtgagcgccgcccaccgggccagatacttctggggcaatctgcctggcatgaacagacccctggccagcaccgtgaacgacaagctggagctgcaggagtgcctggagcacggccggatcgccaagttcagcaaggtgagaaccatcaccacccgaagcaacagcatcaaacaaggcaaggaccagcactttcctgtgttcatgaacgagaaggaggacatcctgtggtgtaccgagatggagagagtgttcgggttcccagtccactacacagatgtcagcaacatgtctagactggccagacagagactgctgggaagaagctggtccgtccctgtgatcagacacctgttcgcccctctgaaggagtacttcgcctgcgtgagcagcggcaacagcaacgccaacagccggggccccagcttctctagcggcctggtgccactgtccctgagagggagccacatgggccccatggagatctacaaaaccgtgagcgcctggaagcggcagcctgtgcgcgtgctgagcctgtttcggaatatcgataaagtcctgaaaagcctgggattcctggagagcggctctggctccggcggtggcaccctgaagtacgtggaggatgtgacaaacgtggtcagacgggatgtggagaagtggggccccttcgatctggtgtacggcagcacccaacccctgggcagctcttgtgaccggtgccctggctggtacatgtttcagttccaccggatcctgcagtacgccctgccgagacaggagtcccagcggccattcttttggattttcatggacaacttgctgctgaccgaggatgaccaggaaactaccactcggttcctgcagaccgaagccgtgaccctgcaggacgtgagaggccgggactaccagaacgccatgcgggtgtggtccaacatccctggactgaaaagcaagcacgcacctctgacccctaaagaagaggagtacctgcaggcccaggtgcggagcagaagcaagctggacgcccctaaggtggatctgctggtgaagaattgcctcctgcccctgagagagtacttcaagtatttcagccagaatagtctgcccctgggaggcagcggcggcggcggcaggagccccaggaagaccgaccagttctgcaacagcaagaacatggtgcccggcagcgtgaccttcagggacgtggccatcgacttcagccaggaggagtgggagtgcctgcagcccgcccagaggaccctgtacagggacgtgatgctggagaactacagccacctgatcagcctgggcagcagcatcagcaagcccgacgtgatcaccctgctggagcaggagaaggagccctggatgggcggcccaagcagcggcgcccctcctcccagcggcggcagcccagccggctccccaacctctaccgaggagggcacctctgagtccgccacccccgagagcggccctggcacctccaccgagcccagcgagggcagcgcacccggcagccctgccggcagccccacctccacagaggagggaaccagcaccgagcccagcgaaggcagcgccccaggcaccagcaccgagcctagtgagcaggagattaaacggatcaacaagatcagaagaagacttgtgaaagacagcaacaccaagaaggccggcaagacaggccccatgaaaaccctgctggttagagtgatgacacccgatctgagagagcggctggaaaacctgagaaagaagcctgaaaatatcccccagcccatcagcaatacatctagagccaacctgaataagctgctgaccgattacaccgaaatgaagaaggcgatcctgcatgtgtactgggaagagttccagaaggaccctgtgggcctgatgagccgggtggcccagcctgccagcaagaagatcgatcagaacaagctgaaacctgagatggacgagaagggcaacctgaccaccgccggctttgcctgctctcagtgtggccagcccctgttcgtgtacaagctggagcaggtgtctgagaagggcaaggcttacaccaactacttcggacggtgcaatgtggccgagcacgaaaagctgatcctgctggcccagctgaagcccgagaaggatagcgacgaagccgtgacatatagcctgggaaagtttgggcagagggccctggatttctacagcattcatgtgaccaaggagtccacccaccccgtgaagcccctggcccagatcgccggaaacagatacgcctccggacctgtgggaaaggccctgagcgacgcatgtatgggcacaatcgcctccttcctgtctaagtaccaggacatcatcatcgaacaccagaaggtggtgaagggcaaccagaagagactggagagcctgcgggagctggccggcaaggaaaacctggaataccctagcgtgaccctgccacctcagcctcacaccaaggagggcgttgatgcctacaacgaagtgatcgcccgggtgcgaatgtgggtgaacctgaacctgtggcagaagctgaagctaagcagagatgatgccaagcctctgctgagactgaagggattcccttcctttcctctggtcgagagacaggccaacgaagtggactggtgggacatggtgtgtaacgtgaagaagctgatcaacgagaaaaaggaggatggcaaggtgttttggcagaatctggctggctacaagagacaggaagccctgagaccatacctgagcagcgaggaagatcggaagaagggaaagaaattcgctcggtaccagctgggcgacctgctgctgcacctggaaaagaagcacggcgaggactggggaaaggtgtacgacgaggcctgggagcggattgacaagaaagtggaaggcctgagcaagcacatcaagctggaagaggaacggagaagcgaggacgcccagagcaaggccgccctgaccgactggctgcgggctaaggccagcttcgtgatcgagggcctgaaggaggccgacaaggacgagttctgcagatgcgagctgaagctgcagaagtggtacggggacctgcggggaaagcccttcgccatcgaagccgagaacagcatcctggacatcagcggcttcagcaagcagtacaactgtgccttcatctggcagaaggacggcgtgaagaagctgaacctgtacctgatcatcaactacttcaagggcggcaagctgcggttcaagaagatcaaacctgaagccttcgaagccaacagattctacaccgtgatcaacaaaaagagcggcgagatcgtgcccatggaggtgaacttcaacttcgacgaccccaacctgatcatcctgcctctggcctttggcaagagacagggcagagaattcatctggaacgacctgctgtccctggaaaccggcagcctgaagctggccaacggaagagtgatcgagaagacactgtacaacagaagaacccggcaggatgagcctgccctgttcgtggccctgaccttcgagcggcgggaggtcctggactcctccaatatcaaaccaatgaacctgatcggcgtggcaagaggcgaaaacatccccgccgtgatcgccctgaccgaccccgagggctgcccactgagccggtttaaggatagcctgggaaacccaacccacatcctgagaatcggcgagagctataaggagaagcagcggaccatccaggccaagaaggaggtggagcagcggagagccggcggctacagccggaagtacgccagcaaagccaagaatctggcagacgatatggtgagaaacaccgctagagatctgctgtactacgccgtgacccaggatgccatgctgatcttcgccaacctgagccggggcttcggccggcagggcaagcggaccttcatggccgagagacagtacacacggatggaggactggctgaccgccaagctggcctacgagggcctgagcaagacctacctgtccaagacactggcccagtacacctccaagacatgcagcaactgtgggtttaccatcaccagcgccgactacgacagggtgctggagaagctgaagaagacagcaacaggctggatgaccacaattaacggcaaggagctgaaggtggagggccagattacctactacaacagatacaagagacagaacgtagtcaaggacctgtccgtcgagctggatagactgagcgaagaatctgtgaacaacgacatctcctcctggacaaagggcagaagcggagaagctctgagcctcctgaagaaaagattctcccatagacccgtgcaggagaagttcgtgtgcctgaactgcggcttcgagacacacgcagccgagcaagccgccctgaacatcgccagatcctggctgttcctgcggagccaggagtacaagaaataccagacaaacaagacaaccggcaacaccgataagagagccttcgtcgagacctggcagtccttttaccggaagaagcttaaggaggtgtggaaacctgccgtgcggtctggcggatctggcggaggctccaccagccccaagaaaaagagaaaagtctaagctgccttctgcggggcttgccttctggccatgcccttcttctctcccttgcacctgtacctcttggtctttgaataaagcctgagtaggaaggctagcaaaaaaaaaaaaaaaaaaaaaaaaaaaaaaaaaaaaaaaaaaaaaaaaaaaaaaaaaaaaaaaaaaaaaaaaaaaaaaaa

SEQ ID NO: 13677 - RNA, 5785 nt, synthetic construct
  source 1..5785: mol_type = other RNA
aggaaataagagagaaaagaagagtaagaagaaatataagagccaccatggcccctaagaagaagcgtaaagtgagccggatggaacgcctcgtctacgaggtgcggcagaagtgcagaaacatcgaggacatctgcatctcctgcggatctctgaacgtgaccctggagcacccactgttcatcggcggcatgtgccagaactgtaaaaactgttttctggagtgtgcctatcaatacgacgatgacggctaccagagctactgcaccatctgttgcggcggaagagaggtgctgatgtgtggaaataacaactgctgccggtgcttctgcgtggaatgcgtggacctgctggtgggccccggcgccgcccaggccgctattaaggaagatccttggaactgctacatgtgcggccacaagggcacatacggcctgctgagacggagagaggactggcctagcagactgcagatgttcttcgccaataaccacgaccaggagttcgacccccctaaggtgtaccctcccgtccccgccgagaagagaaagcccatccgggtcctgagcctgttcgatggcatcgccaccggtctgctggtgctgaaggacctgggcatccaggtggataggtacattgcctccgaggtgtgcgaggactccatcaccgtgggaatggtgcgtcatcagggcaagatcatgtacgtgggcgacgtgcggagcgtgacacagaagcatatccaggagtggggccctttcgacctggtgatcggcggcagcccttgcaatgacctgagcatcgtgaacccagcccggaagggcctgtacgagggaaccggcagactgttcttcgagttttacagactgctgcacgacgcccggcctaaggaaggcgacgaccggcccttcttttggctgttcgagaatgtggtggccatgggagtcagcgacaagcgggatattagccggttcctggagagcaaccccgtgatgatcgatgccaaggaagtgagcgccgcccaccgggccagatacttctggggcaatctgcctggcatgaacagacccctggccagcaccgtgaacgacaagctggagctgcaggagtgcctggagcacggccggatcgccaagttcagcaaggtgagaaccatcaccacccgaagcaacagcatcaaacaaggcaaggaccagcactttcctgtgttcatgaacgagaaggaggacatcctgtggtgtaccgagatggagagagtgttcgggttcccagtccactacacagatgtcagcaacatgtctagactggccagacagagactgctgggaagaagctggtccgtccctgtgatcagacacctgttcgcccctctgaaggagtacttcgcctgcgtgagcagcggcaacagcaacgccaacagccggggccccagcttctctagcggcctggtgccactgtccctgagagggagccacatgggccccatggagatctacaaaaccgtgagcgcctggaagcggcagcctgtgcgcgtgctgagcctgtttcggaatatcgataaagtcctgaaaagcctgggattcctggagagcggctctggctccggcggtggcaccctgaagtacgtggaggatgtgacaaacgtggtcagacgggatgtggagaagtggggccccttcgatctggtgtacggcagcacccaacccctgggcagctcttgtgaccggtgccctggctggtacatgtttcagttccaccggatcctgcagtacgccctgccgagacaggagtcccagcggccattcttttggattttcatggacaacttgctgctgaccgaggatgaccaggaaactaccactcggttcctgcagaccgaagccgtgaccctgcaggacgtgagaggccgggactaccagaacgccatgcgggtgtggtccaacatccctggactgaaaagcaagcacgcacctctgacccctaaagaagaggagtacctgcaggcccaggtgcggagcagaagcaagctggacgcccctaaggtggatctgctggtgaagaattgcctcctgcccctgagagagtacttcaagtatttcagccagaatagtctgcccctgggaggcagcggcggcggctgcagccacaggagctgcagggaggaccccggcaccagcgagagcagggagatggaccccgtggccttcgacgacgtggccgtgaacttcacccaggaggagtgggccctgctggacatcagccagaggaagctgtacagggaggtgatgctggagaccttcaggaacctgaccagcatcggcaagaagtggaaggaccagaacatcgagtacgagtaccagaaccccaggaggaacttcaggggcggcccaagcagcggcgcccctcctcccagcggcggcagcccagccggctccccaacctctaccgaggagggcacctctgagtccgccacccccgagagcggccctggcacctccaccgagcccagcgagggcagcgcacccggcagccctgccggcagccccacctccacagaggagggaaccagcaccgagcccagcgaaggcagcgccccaggcaccagcaccgagcctagtgagcaggagattaaacggatcaacaagatcagaagaagacttgtgaaagacagcaacaccaagaaggccggcaagacaggccccatgaaaaccctgctggttagagtgatgacacccgatctgagagagcggctggaaaacctgagaaagaagcctgaaaatatcccccagcccatcagcaatacatctagagccaacctgaataagctgctgaccgattacaccgaaatgaagaaggcgatcctgcatgtgtactgggaagagttccagaaggaccctgtgggcctgatgagccgggtggcccagcctgccagcaagaagatcgatcagaacaagctgaaacctgagatggacgagaagggcaacctgaccaccgccggctttgcctgctctcagtgtggccagcccctgttcgtgtacaagctggagcaggtgtctgagaagggcaaggcttacaccaactacttcggacggtgcaatgtggccgagcacgaaaagctgatcctgctggcccagctgaagcccgagaaggatagcgacgaagccgtgacatatagcctgggaaagtttgggcagagggccctggatttctacagcattcatgtgaccaaggagtccacccaccccgtgaagcccctggcccagatcgccggaaacagatacgcctccggacctgtgggaaaggccctgagcgacgcatgtatgggcacaatcgcctccttcctgtctaagtaccaggacatcatcatcgaacaccagaaggtggtgaagggcaaccagaagagactggagagcctgcgggagctggccggcaaggaaaacctggaataccctagcgtgaccctgccacctcagcctcacaccaaggagggcgttgatgcctacaacgaagtgatcgcccgggtgcgaatgtgggtgaacctgaacctgtggcagaagctgaagctaagcagagatgatgccaagcctctgctgagactgaagggattcccttcctttcctctggtcgagagacaggccaacgaagtggactggtgggacatggtgtgtaacgtgaagaagctgatcaacgagaaaaaggaggatggcaaggtgttttggcagaatctggctggctacaagagacaggaagccctgagaccatacctgagcagcgaggaagatcggaagaagggaaagaaattcgctcggtaccagctgggcgacctgctgctgcacctggaaaagaagcacggcgaggactggggaaaggtgtacgacgaggcctgggagcggattgacaagaaagtggaaggcctgagcaagcacatcaagctggaagaggaacggagaagcgaggacgcccagagcaaggccgccctgaccgactggctgcgggctaaggccagcttcgtgatcgagggcctgaaggaggccgacaaggacgagttctgcagatgcgagctgaagctgcagaagtggtacggggacctgcggggaaagcccttcgccatcgaagccgagaacagcatcctggacatcagcggcttcagcaagcagtacaactgtgccttcatctggcagaaggacggcgtgaagaagctgaacctgtacctgatcatcaactacttcaagggcggcaagctgcggttcaagaagatcaaacctgaagccttcgaagccaacagattctacaccgtgatcaacaaaaagagcggcgagatcgtgcccatggaggtgaacttcaacttcgacgaccccaacctgatcatcctgcctctggcctttggcaagagacagggcagagaattcatctggaacgacctgctgtccctggaaaccggcagcctgaagctggccaacggaagagtgatcgagaagacactgtacaacagaagaacccggcaggatgagcctgccctgttcgtggccctgaccttcgagcggcgggaggtcctggactcctccaatatcaaaccaatgaacctgatcggcgtggcaagaggcgaaaacatccccgccgtgatcgccctgaccgaccccgagggctgcccactgagccggtttaaggatagcctgggaaacccaacccacatcctgagaatcggcgagagctataaggagaagcagcggaccatccaggccaagaaggaggtggagcagcggagagccggcggctacagccggaagtacgccagcaaagccaagaatctggcagacgatatggtgagaaacaccgctagagatctgctgtactacgccgtgacccaggatgccatgctgatcttcgccaacctgagccggggcttcggccggcagggcaagcggaccttcatggccgagagacagtacacacggatggaggactggctgaccgccaagctggcctacgagggcctgagcaagacctacctgtccaagacactggcccagtacacctccaagacatgcagcaactgtgggtttaccatcaccagcgccgactacgacagggtgctggagaagctgaagaagacagcaacaggctggatgaccacaattaacggcaaggagctgaaggtggagggccagattacctactacaacagatacaagagacagaacgtagtcaaggacctgtccgtcgagctggatagactgagcgaagaatctgtgaacaacgacatctcctcctggacaaagggcagaagcggagaagctctgagcctcctgaagaaaagattctcccatagacccgtgcaggagaagttcgtgtgcctgaactgcggcttcgagacacacgcagccgagcaagccgccctgaacatcgccagatcctggctgttcctgcggagccaggagtacaagaaataccagacaaacaagacaaccggcaacaccgataagagagccttcgtcgagacctggcagtccttttaccggaagaagcttaaggaggtgtggaaacctgccgtgcggtctggcggatctggcggaggctccaccagccccaagaaaaagagaaaagtctaagctgccttctgcggggcttgccttctggccatgcccttcttctctcccttgcacctgtacctcttggtctttgaataaagcctgagtaggaaggctagcaaaaaaaaaaaaaaaaaaaaaaaaaaaaaaaaaaaaaaaaaaaaaaaaaaaaaaaaaaaaaaaaaaaaaaaaaaaaaaaa

SEQ ID NO: 13678 - RNA, 5785 nt, synthetic construct
  source 1..5785: mol_type = other RNA
aggaaataagagagaaaagaagagtaagaagaaatataagagccaccatggcccctaagaagaagcgtaaagtgagccggatggaacgcctcgtctacgaggtgcggcagaagtgcagaaacatcgaggacatctgcatctcctgcggatctctgaacgtgaccctggagcacccactgttcatcggcggcatgtgccagaactgtaaaaactgttttctggagtgtgcctatcaatacgacgatgacggctaccagagctactgcaccatctgttgcggcggaagagaggtgctgatgtgtggaaataacaactgctgccggtgcttctgcgtggaatgcgtggacctgctggtgggccccggcgccgcccaggccgctattaaggaagatccttggaactgctacatgtgcggccacaagggcacatacggcctgctgagacggagagaggactggcctagcagactgcagatgttcttcgccaataaccacgaccaggagttcgacccccctaaggtgtaccctcccgtccccgccgagaagagaaagcccatccgggtcctgagcctgttcgatggcatcgccaccggtctgctggtgctgaaggacctgggcatccaggtggataggtacattgcctccgaggtgtgcgaggactccatcaccgtgggaatggtgcgtcatcagggcaagatcatgtacgtgggcgacgtgcggagcgtgacacagaagcatatccaggagtggggccctttcgacctggtgatcggcggcagcccttgcaatgacctgagcatcgtgaacccagcccggaagggcctgtacgagggaaccggcagactgttcttcgagttttacagactgctgcacgacgcccggcctaaggaaggcgacgaccggcccttcttttggctgttcgagaatgtggtggccatgggagtcagcgacaagcgggatattagccggttcctggagagcaaccccgtgatgatcgatgccaaggaagtgagcgccgcccaccgggccagatacttctggggcaatctgcctggcatgaacagacccctggccagcaccgtgaacgacaagctggagctgcaggagtgcctggagcacggccggatcgccaagttcagcaaggtgagaaccatcaccacccgaagcaacagcatcaaacaaggcaaggaccagcactttcctgtgttcatgaacgagaaggaggacatcctgtggtgtaccgagatggagagagtgttcgggttcccagtccactacacagatgtcagcaacatgtctagactggccagacagagactgctgggaagaagctggtccgtccctgtgatcagacacctgttcgcccctctgaaggagtacttcgcctgcgtgagcagcggcaacagcaacgccaacagccggggccccagcttctctagcggcctggtgccactgtccctgagagggagccacatgggccccatggagatctacaaaaccgtgagcgcctggaagcggcagcctgtgcgcgtgctgagcctgtttcggaatatcgataaagtcctgaaaagcctgggattcctggagagcggctctggctccggcggtggcaccctgaagtacgtggaggatgtgacaaacgtggtcagacgggatgtggagaagtggggccccttcgatctggtgtacggcagcacccaacccctgggcagctcttgtgaccggtgccctggctggtacatgtttcagttccaccggatcctgcagtacgccctgccgagacaggagtcccagcggccattcttttggattttcatggacaacttgctgctgaccgaggatgaccaggaaactaccactcggttcctgcagaccgaagccgtgaccctgcaggacgtgagaggccgggactaccagaacgccatgcgggtgtggtccaacatccctggactgaaaagcaagcacgcacctctgacccctaaagaagaggagtacctgcaggcccaggtgcggagcagaagcaagctggacgcccctaaggtggatctgctggtgaagaattgcctcctgcccctgagagagtacttcaagtatttcagccagaatagtctgcccctgggaggcagcggcggcggcgcccagaggtgggaggccttcgaggacgtggccctgtacttcacccagaaggagtgggagctgctgagggacggcgacaaggtgctgtaccaggagcagatgctgaggaactaccaggccctggtgagcctgggctaccagggccccacccccgacctgatctgcaggatccagaggggcgacatggagctgtgggtgtgcgacgacgaggaccccaaggagagcatgtggagcgagggcctgggcggcccaagcagcggcgcccctcctcccagcggcggcagcccagccggctccccaacctctaccgaggagggcacctctgagtccgccacccccgagagcggccctggcacctccaccgagcccagcgagggcagcgcacccggcagccctgccggcagccccacctccacagaggagggaaccagcaccgagcccagcgaaggcagcgccccaggcaccagcaccgagcctagtgagcaggagattaaacggatcaacaagatcagaagaagacttgtgaaagacagcaacaccaagaaggccggcaagacaggccccatgaaaaccctgctggttagagtgatgacacccgatctgagagagcggctggaaaacctgagaaagaagcctgaaaatatcccccagcccatcagcaatacatctagagccaacctgaataagctgctgaccgattacaccgaaatgaagaaggcgatcctgcatgtgtactgggaagagttccagaaggaccctgtgggcctgatgagccgggtggcccagcctgccagcaagaagatcgatcagaacaagctgaaacctgagatggacgagaagggcaacctgaccaccgccggctttgcctgctctcagtgtggccagcccctgttcgtgtacaagctggagcaggtgtctgagaagggcaaggcttacaccaactacttcggacggtgcaatgtggccgagcacgaaaagctgatcctgctggcccagctgaagcccgagaaggatagcgacgaagccgtgacatatagcctgggaaagtttgggcagagggccctggatttctacagcattcatgtgaccaaggagtccacccaccccgtgaagcccctggcccagatcgccggaaacagatacgcctccggacctgtgggaaaggccctgagcgacgcatgtatgggcacaatcgcctccttcctgtctaagtaccaggacatcatcatcgaacaccagaaggtggtgaagggcaaccagaagagactggagagcctgcgggagctggccggcaaggaaaacctggaataccctagcgtgaccctgccacctcagcctcacaccaaggagggcgttgatgcctacaacgaagtgatcgcccgggtgcgaatgtgggtgaacctgaacctgtggcagaagctgaagctaagcagagatgatgccaagcctctgctgagactgaagggattcccttcctttcctctggtcgagagacaggccaacgaagtggactggtgggacatggtgtgtaacgtgaagaagctgatcaacgagaaaaaggaggatggcaaggtgttttggcagaatctggctggctacaagagacaggaagccctgagaccatacctgagcagcgaggaagatcggaagaagggaaagaaattcgctcggtaccagctgggcgacctgctgctgcacctggaaaagaagcacggcgaggactggggaaaggtgtacgacgaggcctgggagcggattgacaagaaagtggaaggcctgagcaagcacatcaagctggaagaggaacggagaagcgaggacgcccagagcaaggccgccctgaccgactggctgcgggctaaggccagcttcgtgatcgagggcctgaaggaggccgacaaggacgagttctgcagatgcgagctgaagctgcagaagtggtacggggacctgcggggaaagcccttcgccatcgaagccgagaacagcatcctggacatcagcggcttcagcaagcagtacaactgtgccttcatctggcagaaggacggcgtgaagaagctgaacctgtacctgatcatcaactacttcaagggcggcaagctgcggttcaagaagatcaaacctgaagccttcgaagccaacagattctacaccgtgatcaacaaaaagagcggcgagatcgtgcccatggaggtgaacttcaacttcgacgaccccaacctgatcatcctgcctctggcctttggcaagagacagggcagagaattcatctggaacgacctgctgtccctggaaaccggcagcctgaagctggccaacggaagagtgatcgagaagacactgtacaacagaagaacccggcaggatgagcctgccctgttcgtggccctgaccttcgagcggcgggaggtcctggactcctccaatatcaaaccaatgaacctgatcggcgtggcaagaggcgaaaacatccccgccgtgatcgccctgaccgaccccgagggctgcccactgagccggtttaaggatagcctgggaaacccaacccacatcctgagaatcggcgagagctataaggagaagcagcggaccatccaggccaagaaggaggtggagcagcggagagccggcggctacagccggaagtacgccagcaaagccaagaatctggcagacgatatggtgagaaacaccgctagagatctgctgtactacgccgtgacccaggatgccatgctgatcttcgccaacctgagccggggcttcggccggcagggcaagcggaccttcatggccgagagacagtacacacggatggaggactggctgaccgccaagctggcctacgagggcctgagcaagacctacctgtccaagacactggcccagtacacctccaagacatgcagcaactgtgggtttaccatcaccagcgccgactacgacagggtgctggagaagctgaagaagacagcaacaggctggatgaccacaattaacggcaaggagctgaaggtggagggccagattacctactacaacagatacaagagacagaacgtagtcaaggacctgtccgtcgagctggatagactgagcgaagaatctgtgaacaacgacatctcctcctggacaaagggcagaagcggagaagctctgagcctcctgaagaaaagattctcccatagacccgtgcaggagaagttcgtgtgcctgaactgcggcttcgagacacacgcagccgagcaagccgccctgaacatcgccagatcctggctgttcctgcggagccaggagtacaagaaataccagacaaacaagacaaccggcaacaccgataagagagccttcgtcgagacctggcagtccttttaccggaagaagcttaaggaggtgtggaaacctgccgtgcggtctggcggatctggcggaggctccaccagccccaagaaaaagagaaaagtctaagctgccttctgcggggcttgccttctggccatgcccttcttctctcccttgcacctgtacctcttggtctttgaataaagcctgagtaggaaggctagcaaaaaaaaaaaaaaaaaaaaaaaaaaaaaaaaaaaaaaaaaaaaaaaaaaaaaaaaaaaaaaaaaaaaaaaaaaaaaaaa

SEQ ID NO: 13679 - RNA, 5785 nt, synthetic construct
  source 1..5785: mol_type = other RNA
aggaaataagagagaaaagaagagtaagaagaaatataagagccaccatggcccctaagaagaagcgtaaagtgagccggatggaacgcctcgtctacgaggtgcggcagaagtgcagaaacatcgaggacatctgcatctcctgcggatctctgaacgtgaccctggagcacccactgttcatcggcggcatgtgccagaactgtaaaaactgttttctggagtgtgcctatcaatacgacgatgacggctaccagagctactgcaccatctgttgcggcggaagagaggtgctgatgtgtggaaataacaactgctgccggtgcttctgcgtggaatgcgtggacctgctggtgggccccggcgccgcccaggccgctattaaggaagatccttggaactgctacatgtgcggccacaagggcacatacggcctgctgagacggagagaggactggcctagcagactgcagatgttcttcgccaataaccacgaccaggagttcgacccccctaaggtgtaccctcccgtccccgccgagaagagaaagcccatccgggtcctgagcctgttcgatggcatcgccaccggtctgctggtgctgaaggacctgggcatccaggtggataggtacattgcctccgaggtgtgcgaggactccatcaccgtgggaatggtgcgtcatcagggcaagatcatgtacgtgggcgacgtgcggagcgtgacacagaagcatatccaggagtggggccctttcgacctggtgatcggcggcagcccttgcaatgacctgagcatcgtgaacccagcccggaagggcctgtacgagggaaccggcagactgttcttcgagttttacagactgctgcacgacgcccggcctaaggaaggcgacgaccggcccttcttttggctgttcgagaatgtggtggccatgggagtcagcgacaagcgggatattagccggttcctggagagcaaccccgtgatgatcgatgccaaggaagtgagcgccgcccaccgggccagatacttctggggcaatctgcctggcatgaacagacccctggccagcaccgtgaacgacaagctggagctgcaggagtgcctggagcacggccggatcgccaagttcagcaaggtgagaaccatcaccacccgaagcaacagcatcaaacaaggcaaggaccagcactttcctgtgttcatgaacgagaaggaggacatcctgtggtgtaccgagatggagagagtgttcgggttcccagtccactacacagatgtcagcaacatgtctagactggccagacagagactgctgggaagaagctggtccgtccctgtgatcagacacctgttcgcccctctgaaggagtacttcgcctgcgtgagcagcggcaacagcaacgccaacagccggggccccagcttctctagcggcctggtgccactgtccctgagagggagccacatgggccccatggagatctacaaaaccgtgagcgcctggaagcggcagcctgtgcgcgtgctgagcctgtttcggaatatcgataaagtcctgaaaagcctgggattcctggagagcggctctggctccggcggtggcaccctgaagtacgtggaggatgtgacaaacgtggtcagacgggatgtggagaagtggggccccttcgatctggtgtacggcagcacccaacccctgggcagctcttgtgaccggtgccctggctggtacatgtttcagttccaccggatcctgcagtacgccctgccgagacaggagtcccagcggccattcttttggattttcatggacaacttgctgctgaccgaggatgaccaggaaactaccactcggttcctgcagaccgaagccgtgaccctgcaggacgtgagaggccgggactaccagaacgccatgcgggtgtggtccaacatccctggactgaaaagcaagcacgcacctctgacccctaaagaagaggagtacctgcaggcccaggtgcggagcagaagcaagctggacgcccctaaggtggatctgctggtgaagaattgcctcctgcccctgagagagtacttcaagtatttcagccagaatagtctgcccctgggaggcagcggcggcggccccaaggtgcccgtgagcttcgaggacgtggccatgtacttcaccaagaccgagtggaagctgctggacctgaagcagaggatcctgtacaagcaggtgatgctggagaactacggccacctggtgagcctgggcttcgccttcagcaagcccaggctggtgagccagctggagaggggcgagggcccctgggtggccgacagcctgaggggccaggccgaggccgagagccacgccggcgagggcggcccaagcagcggcgcccctcctcccagcggcggcagcccagccggctccccaacctctaccgaggagggcacctctgagtccgccacccccgagagcggccctggcacctccaccgagcccagcgagggcagcgcacccggcagccctgccggcagccccacctccacagaggagggaaccagcaccgagcccagcgaaggcagcgccccaggcaccagcaccgagcctagtgagcaggagattaaacggatcaacaagatcagaagaagacttgtgaaagacagcaacaccaagaaggccggcaagacaggccccatgaaaaccctgctggttagagtgatgacacccgatctgagagagcggctggaaaacctgagaaagaagcctgaaaatatcccccagcccatcagcaatacatctagagccaacctgaataagctgctgaccgattacaccgaaatgaagaaggcgatcctgcatgtgtactgggaagagttccagaaggaccctgtgggcctgatgagccgggtggcccagcctgccagcaagaagatcgatcagaacaagctgaaacctgagatggacgagaagggcaacctgaccaccgccggctttgcctgctctcagtgtggccagcccctgttcgtgtacaagctggagcaggtgtctgagaagggcaaggcttacaccaactacttcggacggtgcaatgtggccgagcacgaaaagctgatcctgctggcccagctgaagcccgagaaggatagcgacgaagccgtgacatatagcctgggaaagtttgggcagagggccctggatttctacagcattcatgtgaccaaggagtccacccaccccgtgaagcccctggcccagatcgccggaaacagatacgcctccggacctgtgggaaaggccctgagcgacgcatgtatgggcacaatcgcctccttcctgtctaagtaccaggacatcatcatcgaacaccagaaggtggtgaagggcaaccagaagagactggagagcctgcgggagctggccggcaaggaaaacctggaataccctagcgtgaccctgccacctcagcctcacaccaaggagggcgttgatgcctacaacgaagtgatcgcccgggtgcgaatgtgggtgaacctgaacctgtggcagaagctgaagctaagcagagatgatgccaagcctctgctgagactgaagggattcccttcctttcctctggtcgagagacaggccaacgaagtggactggtgggacatggtgtgtaacgtgaagaagctgatcaacgagaaaaaggaggatggcaaggtgttttggcagaatctggctggctacaagagacaggaagccctgagaccatacctgagcagcgaggaagatcggaagaagggaaagaaattcgctcggtaccagctgggcgacctgctgctgcacctggaaaagaagcacggcgaggactggggaaaggtgtacgacgaggcctgggagcggattgacaagaaagtggaaggcctgagcaagcacatcaagctggaagaggaacggagaagcgaggacgcccagagcaaggccgccctgaccgactggctgcgggctaaggccagcttcgtgatcgagggcctgaaggaggccgacaaggacgagttctgcagatgcgagctgaagctgcagaagtggtacggggacctgcggggaaagcccttcgccatcgaagccgagaacagcatcctggacatcagcggcttcagcaagcagtacaactgtgccttcatctggcagaaggacggcgtgaagaagctgaacctgtacctgatcatcaactacttcaagggcggcaagctgcggttcaagaagatcaaacctgaagccttcgaagccaacagattctacaccgtgatcaacaaaaagagcggcgagatcgtgcccatggaggtgaacttcaacttcgacgaccccaacctgatcatcctgcctctggcctttggcaagagacagggcagagaattcatctggaacgacctgctgtccctggaaaccggcagcctgaagctggccaacggaagagtgatcgagaagacactgtacaacagaagaacccggcaggatgagcctgccctgttcgtggccctgaccttcgagcggcgggaggtcctggactcctccaatatcaaaccaatgaacctgatcggcgtggcaagaggcgaaaacatccccgccgtgatcgccctgaccgaccccgagggctgcccactgagccggtttaaggatagcctgggaaacccaacccacatcctgagaatcggcgagagctataaggagaagcagcggaccatccaggccaagaaggaggtggagcagcggagagccggcggctacagccggaagtacgccagcaaagccaagaatctggcagacgatatggtgagaaacaccgctagagatctgctgtactacgccgtgacccaggatgccatgctgatcttcgccaacctgagccggggcttcggccggcagggcaagcggaccttcatggccgagagacagtacacacggatggaggactggctgaccgccaagctggcctacgagggcctgagcaagacctacctgtccaagacactggcccagtacacctccaagacatgcagcaactgtgggtttaccatcaccagcgccgactacgacagggtgctggagaagctgaagaagacagcaacaggctggatgaccacaattaacggcaaggagctgaaggtggagggccagattacctactacaacagatacaagagacagaacgtagtcaaggacctgtccgtcgagctggatagactgagcgaagaatctgtgaacaacgacatctcctcctggacaaagggcagaagcggagaagctctgagcctcctgaagaaaagattctcccatagacccgtgcaggagaagttcgtgtgcctgaactgcggcttcgagacacacgcagccgagcaagccgccctgaacatcgccagatcctggctgttcctgcggagccaggagtacaagaaataccagacaaacaagacaaccggcaacaccgataagagagccttcgtcgagacctggcagtccttttaccggaagaagcttaaggaggtgtggaaacctgccgtgcggtctggcggatctggcggaggctccaccagccccaagaaaaagagaaaagtctaagctgccttctgcggggcttgccttctggccatgcccttcttctctcccttgcacctgtacctcttggtctttgaataaagcctgagtaggaaggctagcaaaaaaaaaaaaaaaaaaaaaaaaaaaaaaaaaaaaaaaaaaaaaaaaaaaaaaaaaaaaaaaaaaaaaaaaaaaaaaaa

SEQ ID NO: 13680 - RNA, 5785 nt, synthetic construct
  source 1..5785: mol_type = other RNA
aggaaataagagagaaaagaagagtaagaagaaatataagagccaccatggcccctaagaagaagcgtaaagtgagccggatggaacgcctcgtctacgaggtgcggcagaagtgcagaaacatcgaggacatctgcatctcctgcggatctctgaacgtgaccctggagcacccactgttcatcggcggcatgtgccagaactgtaaaaactgttttctggagtgtgcctatcaatacgacgatgacggctaccagagctactgcaccatctgttgcggcggaagagaggtgctgatgtgtggaaataacaactgctgccggtgcttctgcgtggaatgcgtggacctgctggtgggccccggcgccgcccaggccgctattaaggaagatccttggaactgctacatgtgcggccacaagggcacatacggcctgctgagacggagagaggactggcctagcagactgcagatgttcttcgccaataaccacgaccaggagttcgacccccctaaggtgtaccctcccgtccccgccgagaagagaaagcccatccgggtcctgagcctgttcgatggcatcgccaccggtctgctggtgctgaaggacctgggcatccaggtggataggtacattgcctccgaggtgtgcgaggactccatcaccgtgggaatggtgcgtcatcagggcaagatcatgtacgtgggcgacgtgcggagcgtgacacagaagcatatccaggagtggggccctttcgacctggtgatcggcggcagcccttgcaatgacctgagcatcgtgaacccagcccggaagggcctgtacgagggaaccggcagactgttcttcgagttttacagactgctgcacgacgcccggcctaaggaaggcgacgaccggcccttcttttggctgttcgagaatgtggtggccatgggagtcagcgacaagcgggatattagccggttcctggagagcaaccccgtgatgatcgatgccaaggaagtgagcgccgcccaccgggccagatacttctggggcaatctgcctggcatgaacagacccctggccagcaccgtgaacgacaagctggagctgcaggagtgcctggagcacggccggatcgccaagttcagcaaggtgagaaccatcaccacccgaagcaacagcatcaaacaaggcaaggaccagcactttcctgtgttcatgaacgagaaggaggacatcctgtggtgtaccgagatggagagagtgttcgggttcccagtccactacacagatgtcagcaacatgtctagactggccagacagagactgctgggaagaagctggtccgtccctgtgatcagacacctgttcgcccctctgaaggagtacttcgcctgcgtgagcagcggcaacagcaacgccaacagccggggccccagcttctctagcggcctggtgccactgtccctgagagggagccacatgggccccatggagatctacaaaaccgtgagcgcctggaagcggcagcctgtgcgcgtgctgagcctgtttcggaatatcgataaagtcctgaaaagcctgggattcctggagagcggctctggctccggcggtggcaccctgaagtacgtggaggatgtgacaaacgtggtcagacgggatgtggagaagtggggccccttcgatctggtgtacggcagcacccaacccctgggcagctcttgtgaccggtgccctggctggtacatgtttcagttccaccggatcctgcagtacgccctgccgagacaggagtcccagcggccattcttttggattttcatggacaacttgctgctgaccgaggatgaccaggaaactaccactcggttcctgcagaccgaagccgtgaccctgcaggacgtgagaggccgggactaccagaacgccatgcgggtgtggtccaacatccctggactgaaaagcaagcacgcacctctgacccctaaagaagaggagtacctgcaggcccaggtgcggagcagaagcaagctggacgcccctaaggtggatctgctggtgaagaattgcctcctgcccctgagagagtacttcaagtatttcagccagaatagtctgcccctgggaggcagcggcggcggcagccagggcagcgtgagcttcaaggacgtgaccgtgggcttcacccaggaggagtggcagcacctggaccccagccagaagagcctgtacagggacgtgatgctggagaactacagccacctggtgagcgtgggctactgcgtgaccaagcccgagctgatcttcaggctggagcagggcgaggagccctgggtgctggaggaggagttccccaggcccggcttcctggagttctggaagaccggcggcccaagcagcggcgcccctcctcccagcggcggcagcccagccggctccccaacctctaccgaggagggcacctctgagtccgccacccccgagagcggccctggcacctccaccgagcccagcgagggcagcgcacccggcagccctgccggcagccccacctccacagaggagggaaccagcaccgagcccagcgaaggcagcgccccaggcaccagcaccgagcctagtgagcaggagattaaacggatcaacaagatcagaagaagacttgtgaaagacagcaacaccaagaaggccggcaagacaggccccatgaaaaccctgctggttagagtgatgacacccgatctgagagagcggctggaaaacctgagaaagaagcctgaaaatatcccccagcccatcagcaatacatctagagccaacctgaataagctgctgaccgattacaccgaaatgaagaaggcgatcctgcatgtgtactgggaagagttccagaaggaccctgtgggcctgatgagccgggtggcccagcctgccagcaagaagatcgatcagaacaagctgaaacctgagatggacgagaagggcaacctgaccaccgccggctttgcctgctctcagtgtggccagcccctgttcgtgtacaagctggagcaggtgtctgagaagggcaaggcttacaccaactacttcggacggtgcaatgtggccgagcacgaaaagctgatcctgctggcccagctgaagcccgagaaggatagcgacgaagccgtgacatatagcctgggaaagtttgggcagagggccctggatttctacagcattcatgtgaccaaggagtccacccaccccgtgaagcccctggcccagatcgccggaaacagatacgcctccggacctgtgggaaaggccctgagcgacgcatgtatgggcacaatcgcctccttcctgtctaagtaccaggacatcatcatcgaacaccagaaggtggtgaagggcaaccagaagagactggagagcctgcgggagctggccggcaaggaaaacctggaataccctagcgtgaccctgccacctcagcctcacaccaaggagggcgttgatgcctacaacgaagtgatcgcccgggtgcgaatgtgggtgaacctgaacctgtggcagaagctgaagctaagcagagatgatgccaagcctctgctgagactgaagggattcccttcctttcctctggtcgagagacaggccaacgaagtggactggtgggacatggtgtgtaacgtgaagaagctgatcaacgagaaaaaggaggatggcaaggtgttttggcagaatctggctggctacaagagacaggaagccctgagaccatacctgagcagcgaggaagatcggaagaagggaaagaaattcgctcggtaccagctgggcgacctgctgctgcacctggaaaagaagcacggcgaggactggggaaaggtgtacgacgaggcctgggagcggattgacaagaaagtggaaggcctgagcaagcacatcaagctggaagaggaacggagaagcgaggacgcccagagcaaggccgccctgaccgactggctgcgggctaaggccagcttcgtgatcgagggcctgaaggaggccgacaaggacgagttctgcagatgcgagctgaagctgcagaagtggtacggggacctgcggggaaagcccttcgccatcgaagccgagaacagcatcctggacatcagcggcttcagcaagcagtacaactgtgccttcatctggcagaaggacggcgtgaagaagctgaacctgtacctgatcatcaactacttcaagggcggcaagctgcggttcaagaagatcaaacctgaagccttcgaagccaacagattctacaccgtgatcaacaaaaagagcggcgagatcgtgcccatggaggtgaacttcaacttcgacgaccccaacctgatcatcctgcctctggcctttggcaagagacagggcagagaattcatctggaacgacctgctgtccctggaaaccggcagcctgaagctggccaacggaagagtgatcgagaagacactgtacaacagaagaacccggcaggatgagcctgccctgttcgtggccctgaccttcgagcggcgggaggtcctggactcctccaatatcaaaccaatgaacctgatcggcgtggcaagaggcgaaaacatccccgccgtgatcgccctgaccgaccccgagggctgcccactgagccggtttaaggatagcctgggaaacccaacccacatcctgagaatcggcgagagctataaggagaagcagcggaccatccaggccaagaaggaggtggagcagcggagagccggcggctacagccggaagtacgccagcaaagccaagaatctggcagacgatatggtgagaaacaccgctagagatctgctgtactacgccgtgacccaggatgccatgctgatcttcgccaacctgagccggggcttcggccggcagggcaagcggaccttcatggccgagagacagtacacacggatggaggactggctgaccgccaagctggcctacgagggcctgagcaagacctacctgtccaagacactggcccagtacacctccaagacatgcagcaactgtgggtttaccatcaccagcgccgactacgacagggtgctggagaagctgaagaagacagcaacaggctggatgaccacaattaacggcaaggagctgaaggtggagggccagattacctactacaacagatacaagagacagaacgtagtcaaggacctgtccgtcgagctggatagactgagcgaagaatctgtgaacaacgacatctcctcctggacaaagggcagaagcggagaagctctgagcctcctgaagaaaagattctcccatagacccgtgcaggagaagttcgtgtgcctgaactgcggcttcgagacacacgcagccgagcaagccgccctgaacatcgccagatcctggctgttcctgcggagccaggagtacaagaaataccagacaaacaagacaaccggcaacaccgataagagagccttcgtcgagacctggcagtccttttaccggaagaagcttaaggaggtgtggaaacctgccgtgcggtctggcggatctggcggaggctccaccagccccaagaaaaagagaaaagtctaagctgccttctgcggggcttgccttctggccatgcccttcttctctcccttgcacctgtacctcttggtctttgaataaagcctgagtaggaaggctagcaaaaaaaaaaaaaaaaaaaaaaaaaaaaaaaaaaaaaaaaaaaaaaaaaaaaaaaaaaaaaaaaaaaaaaaaaaaaaaaa

SEQ ID NO: 13681 - RNA, 5785 nt, synthetic construct
  source 1..5785: mol_type = other RNA
aggaaataagagagaaaagaagagtaagaagaaatataagagccaccatggcccctaagaagaagcgtaaagtgagccggatggaacgcctcgtctacgaggtgcggcagaagtgcagaaacatcgaggacatctgcatctcctgcggatctctgaacgtgaccctggagcacccactgttcatcggcggcatgtgccagaactgtaaaaactgttttctggagtgtgcctatcaatacgacgatgacggctaccagagctactgcaccatctgttgcggcggaagagaggtgctgatgtgtggaaataacaactgctgccggtgcttctgcgtggaatgcgtggacctgctggtgggccccggcgccgcccaggccgctattaaggaagatccttggaactgctacatgtgcggccacaagggcacatacggcctgctgagacggagagaggactggcctagcagactgcagatgttcttcgccaataaccacgaccaggagttcgacccccctaaggtgtaccctcccgtccccgccgagaagagaaagcccatccgggtcctgagcctgttcgatggcatcgccaccggtctgctggtgctgaaggacctgggcatccaggtggataggtacattgcctccgaggtgtgcgaggactccatcaccgtgggaatggtgcgtcatcagggcaagatcatgtacgtgggcgacgtgcggagcgtgacacagaagcatatccaggagtggggccctttcgacctggtgatcggcggcagcccttgcaatgacctgagcatcgtgaacccagcccggaagggcctgtacgagggaaccggcagactgttcttcgagttttacagactgctgcacgacgcccggcctaaggaaggcgacgaccggcccttcttttggctgttcgagaatgtggtggccatgggagtcagcgacaagcgggatattagccggttcctggagagcaaccccgtgatgatcgatgccaaggaagtgagcgccgcccaccgggccagatacttctggggcaatctgcctggcatgaacagacccctggccagcaccgtgaacgacaagctggagctgcaggagtgcctggagcacggccggatcgccaagttcagcaaggtgagaaccatcaccacccgaagcaacagcatcaaacaaggcaaggaccagcactttcctgtgttcatgaacgagaaggaggacatcctgtggtgtaccgagatggagagagtgttcgggttcccagtccactacacagatgtcagcaacatgtctagactggccagacagagactgctgggaagaagctggtccgtccctgtgatcagacacctgttcgcccctctgaaggagtacttcgcctgcgtgagcagcggcaacagcaacgccaacagccggggccccagcttctctagcggcctggtgccactgtccctgagagggagccacatgggccccatggagatctacaaaaccgtgagcgcctggaagcggcagcctgtgcgcgtgctgagcctgtttcggaatatcgataaagtcctgaaaagcctgggattcctggagagcggctctggctccggcggtggcaccctgaagtacgtggaggatgtgacaaacgtggtcagacgggatgtggagaagtggggccccttcgatctggtgtacggcagcacccaacccctgggcagctcttgtgaccggtgccctggctggtacatgtttcagttccaccggatcctgcagtacgccctgccgagacaggagtcccagcggccattcttttggattttcatggacaacttgctgctgaccgaggatgaccaggaaactaccactcggttcctgcagaccgaagccgtgaccctgcaggacgtgagaggccgggactaccagaacgccatgcgggtgtggtccaacatccctggactgaaaagcaagcacgcacctctgacccctaaagaagaggagtacctgcaggcccaggtgcggagcagaagcaagctggacgcccctaaggtggatctgctggtgaagaattgcctcctgcccctgagagagtacttcaagtatttcagccagaatagtctgcccctgggaggcagcggcggcggcatgggcctgctgaccttcagggacgtggccatcgagttcagcctggaggagtggcagtgcctggacaccgcccagcagaacctgtacaggaacgtgatgctggagaactacaggaacctggccttcctgggcatcgccgtgagcaagcccgacctgatcacctgcctggagcagggcaaggagccctggaacatgaagaggcacgagatggtggacgagccccccggcgtgtgcccccacttcggcggcccaagcagcggcgcccctcctcccagcggcggcagcccagccggctccccaacctctaccgaggagggcacctctgagtccgccacccccgagagcggccctggcacctccaccgagcccagcgagggcagcgcacccggcagccctgccggcagccccacctccacagaggagggaaccagcaccgagcccagcgaaggcagcgccccaggcaccagcaccgagcctagtgagcaggagattaaacggatcaacaagatcagaagaagacttgtgaaagacagcaacaccaagaaggccggcaagacaggccccatgaaaaccctgctggttagagtgatgacacccgatctgagagagcggctggaaaacctgagaaagaagcctgaaaatatcccccagcccatcagcaatacatctagagccaacctgaataagctgctgaccgattacaccgaaatgaagaaggcgatcctgcatgtgtactgggaagagttccagaaggaccctgtgggcctgatgagccgggtggcccagcctgccagcaagaagatcgatcagaacaagctgaaacctgagatggacgagaagggcaacctgaccaccgccggctttgcctgctctcagtgtggccagcccctgttcgtgtacaagctggagcaggtgtctgagaagggcaaggcttacaccaactacttcggacggtgcaatgtggccgagcacgaaaagctgatcctgctggcccagctgaagcccgagaaggatagcgacgaagccgtgacatatagcctgggaaagtttgggcagagggccctggatttctacagcattcatgtgaccaaggagtccacccaccccgtgaagcccctggcccagatcgccggaaacagatacgcctccggacctgtgggaaaggccctgagcgacgcatgtatgggcacaatcgcctccttcctgtctaagtaccaggacatcatcatcgaacaccagaaggtggtgaagggcaaccagaagagactggagagcctgcgggagctggccggcaaggaaaacctggaataccctagcgtgaccctgccacctcagcctcacaccaaggagggcgttgatgcctacaacgaagtgatcgcccgggtgcgaatgtgggtgaacctgaacctgtggcagaagctgaagctaagcagagatgatgccaagcctctgctgagactgaagggattcccttcctttcctctggtcgagagacaggccaacgaagtggactggtgggacatggtgtgtaacgtgaagaagctgatcaacgagaaaaaggaggatggcaaggtgttttggcagaatctggctggctacaagagacaggaagccctgagaccatacctgagcagcgaggaagatcggaagaagggaaagaaattcgctcggtaccagctgggcgacctgctgctgcacctggaaaagaagcacggcgaggactggggaaaggtgtacgacgaggcctgggagcggattgacaagaaagtggaaggcctgagcaagcacatcaagctggaagaggaacggagaagcgaggacgcccagagcaaggccgccctgaccgactggctgcgggctaaggccagcttcgtgatcgagggcctgaaggaggccgacaaggacgagttctgcagatgcgagctgaagctgcagaagtggtacggggacctgcggggaaagcccttcgccatcgaagccgagaacagcatcctggacatcagcggcttcagcaagcagtacaactgtgccttcatctggcagaaggacggcgtgaagaagctgaacctgtacctgatcatcaactacttcaagggcggcaagctgcggttcaagaagatcaaacctgaagccttcgaagccaacagattctacaccgtgatcaacaaaaagagcggcgagatcgtgcccatggaggtgaacttcaacttcgacgaccccaacctgatcatcctgcctctggcctttggcaagagacagggcagagaattcatctggaacgacctgctgtccctggaaaccggcagcctgaagctggccaacggaagagtgatcgagaagacactgtacaacagaagaacccggcaggatgagcctgccctgttcgtggccctgaccttcgagcggcgggaggtcctggactcctccaatatcaaaccaatgaacctgatcggcgtggcaagaggcgaaaacatccccgccgtgatcgccctgaccgaccccgagggctgcccactgagccggtttaaggatagcctgggaaacccaacccacatcctgagaatcggcgagagctataaggagaagcagcggaccatccaggccaagaaggaggtggagcagcggagagccggcggctacagccggaagtacgccagcaaagccaagaatctggcagacgatatggtgagaaacaccgctagagatctgctgtactacgccgtgacccaggatgccatgctgatcttcgccaacctgagccggggcttcggccggcagggcaagcggaccttcatggccgagagacagtacacacggatggaggactggctgaccgccaagctggcctacgagggcctgagcaagacctacctgtccaagacactggcccagtacacctccaagacatgcagcaactgtgggtttaccatcaccagcgccgactacgacagggtgctggagaagctgaagaagacagcaacaggctggatgaccacaattaacggcaaggagctgaaggtggagggccagattacctactacaacagatacaagagacagaacgtagtcaaggacctgtccgtcgagctggatagactgagcgaagaatctgtgaacaacgacatctcctcctggacaaagggcagaagcggagaagctctgagcctcctgaagaaaagattctcccatagacccgtgcaggagaagttcgtgtgcctgaactgcggcttcgagacacacgcagccgagcaagccgccctgaacatcgccagatcctggctgttcctgcggagccaggagtacaagaaataccagacaaacaagacaaccggcaacaccgataagagagccttcgtcgagacctggcagtccttttaccggaagaagcttaaggaggtgtggaaacctgccgtgcggtctggcggatctggcggaggctccaccagccccaagaaaaagagaaaagtctaagctgccttctgcggggcttgccttctggccatgcccttcttctctcccttgcacctgtacctcttggtctttgaataaagcctgagtaggaaggctagcaaaaaaaaaaaaaaaaaaaaaaaaaaaaaaaaaaaaaaaaaaaaaaaaaaaaaaaaaaaaaaaaaaaaaaaaaaaaaaaa

SEQ ID NO: 13682 - RNA, 5785 nt, synthetic construct
  source 1..5785: mol_type = other RNA
aggaaataagagagaaaagaagagtaagaagaaatataagagccaccatggcccctaagaagaagcgtaaagtgagccggatggaacgcctcgtctacgaggtgcggcagaagtgcagaaacatcgaggacatctgcatctcctgcggatctctgaacgtgaccctggagcacccactgttcatcggcggcatgtgccagaactgtaaaaactgttttctggagtgtgcctatcaatacgacgatgacggctaccagagctactgcaccatctgttgcggcggaagagaggtgctgatgtgtggaaataacaactgctgccggtgcttctgcgtggaatgcgtggacctgctggtgggccccggcgccgcccaggccgctattaaggaagatccttggaactgctacatgtgcggccacaagggcacatacggcctgctgagacggagagaggactggcctagcagactgcagatgttcttcgccaataaccacgaccaggagttcgacccccctaaggtgtaccctcccgtccccgccgagaagagaaagcccatccgggtcctgagcctgttcgatggcatcgccaccggtctgctggtgctgaaggacctgggcatccaggtggataggtacattgcctccgaggtgtgcgaggactccatcaccgtgggaatggtgcgtcatcagggcaagatcatgtacgtgggcgacgtgcggagcgtgacacagaagcatatccaggagtggggccctttcgacctggtgatcggcggcagcccttgcaatgacctgagcatcgtgaacccagcccggaagggcctgtacgagggaaccggcagactgttcttcgagttttacagactgctgcacgacgcccggcctaaggaaggcgacgaccggcccttcttttggctgttcgagaatgtggtggccatgggagtcagcgacaagcgggatattagccggttcctggagagcaaccccgtgatgatcgatgccaaggaagtgagcgccgcccaccgggccagatacttctggggcaatctgcctggcatgaacagacccctggccagcaccgtgaacgacaagctggagctgcaggagtgcctggagcacggccggatcgccaagttcagcaaggtgagaaccatcaccacccgaagcaacagcatcaaacaaggcaaggaccagcactttcctgtgttcatgaacgagaaggaggacatcctgtggtgtaccgagatggagagagtgttcgggttcccagtccactacacagatgtcagcaacatgtctagactggccagacagagactgctgggaagaagctggtccgtccctgtgatcagacacctgttcgcccctctgaaggagtacttcgcctgcgtgagcagcggcaacagcaacgccaacagccggggccccagcttctctagcggcctggtgccactgtccctgagagggagccacatgggccccatggagatctacaaaaccgtgagcgcctggaagcggcagcctgtgcgcgtgctgagcctgtttcggaatatcgataaagtcctgaaaagcctgggattcctggagagcggctctggctccggcggtggcaccctgaagtacgtggaggatgtgacaaacgtggtcagacgggatgtggagaagtggggccccttcgatctggtgtacggcagcacccaacccctgggcagctcttgtgaccggtgccctggctggtacatgtttcagttccaccggatcctgcagtacgccctgccgagacaggagtcccagcggccattcttttggattttcatggacaacttgctgctgaccgaggatgaccaggaaactaccactcggttcctgcagaccgaagccgtgaccctgcaggacgtgagaggccgggactaccagaacgccatgcgggtgtggtccaacatccctggactgaaaagcaagcacgcacctctgacccctaaagaagaggagtacctgcaggcccaggtgcggagcagaagcaagctggacgcccctaaggtggatctgctggtgaagaattgcctcctgcccctgagagagtacttcaagtatttcagccagaatagtctgcccctgggaggcagcggcggcggcagcaaggtgcccgtgaccttcggcgacctggccatctacttcagccaggaggagtgggagtggctgagccccatccagaaggacctgtacgaggacgtgatgctggagaactaccagaacctggtgagcctgggcctgagcttcaggaggcccaacgtgatcaccctgctggagaagggcagggccccctggatggtggagcccgtgaggaagaggagggtgctggacagcaggagcaagtacggcggcccaagcagcggcgcccctcctcccagcggcggcagcccagccggctccccaacctctaccgaggagggcacctctgagtccgccacccccgagagcggccctggcacctccaccgagcccagcgagggcagcgcacccggcagccctgccggcagccccacctccacagaggagggaaccagcaccgagcccagcgaaggcagcgccccaggcaccagcaccgagcctagtgagcaggagattaaacggatcaacaagatcagaagaagacttgtgaaagacagcaacaccaagaaggccggcaagacaggccccatgaaaaccctgctggttagagtgatgacacccgatctgagagagcggctggaaaacctgagaaagaagcctgaaaatatcccccagcccatcagcaatacatctagagccaacctgaataagctgctgaccgattacaccgaaatgaagaaggcgatcctgcatgtgtactgggaagagttccagaaggaccctgtgggcctgatgagccgggtggcccagcctgccagcaagaagatcgatcagaacaagctgaaacctgagatggacgagaagggcaacctgaccaccgccggctttgcctgctctcagtgtggccagcccctgttcgtgtacaagctggagcaggtgtctgagaagggcaaggcttacaccaactacttcggacggtgcaatgtggccgagcacgaaaagctgatcctgctggcccagctgaagcccgagaaggatagcgacgaagccgtgacatatagcctgggaaagtttgggcagagggccctggatttctacagcattcatgtgaccaaggagtccacccaccccgtgaagcccctggcccagatcgccggaaacagatacgcctccggacctgtgggaaaggccctgagcgacgcatgtatgggcacaatcgcctccttcctgtctaagtaccaggacatcatcatcgaacaccagaaggtggtgaagggcaaccagaagagactggagagcctgcgggagctggccggcaaggaaaacctggaataccctagcgtgaccctgccacctcagcctcacaccaaggagggcgttgatgcctacaacgaagtgatcgcccgggtgcgaatgtgggtgaacctgaacctgtggcagaagctgaagctaagcagagatgatgccaagcctctgctgagactgaagggattcccttcctttcctctggtcgagagacaggccaacgaagtggactggtgggacatggtgtgtaacgtgaagaagctgatcaacgagaaaaaggaggatggcaaggtgttttggcagaatctggctggctacaagagacaggaagccctgagaccatacctgagcagcgaggaagatcggaagaagggaaagaaattcgctcggtaccagctgggcgacctgctgctgcacctggaaaagaagcacggcgaggactggggaaaggtgtacgacgaggcctgggagcggattgacaagaaagtggaaggcctgagcaagcacatcaagctggaagaggaacggagaagcgaggacgcccagagcaaggccgccctgaccgactggctgcgggctaaggccagcttcgtgatcgagggcctgaaggaggccgacaaggacgagttctgcagatgcgagctgaagctgcagaagtggtacggggacctgcggggaaagcccttcgccatcgaagccgagaacagcatcctggacatcagcggcttcagcaagcagtacaactgtgccttcatctggcagaaggacggcgtgaagaagctgaacctgtacctgatcatcaactacttcaagggcggcaagctgcggttcaagaagatcaaacctgaagccttcgaagccaacagattctacaccgtgatcaacaaaaagagcggcgagatcgtgcccatggaggtgaacttcaacttcgacgaccccaacctgatcatcctgcctctggcctttggcaagagacagggcagagaattcatctggaacgacctgctgtccctggaaaccggcagcctgaagctggccaacggaagagtgatcgagaagacactgtacaacagaagaacccggcaggatgagcctgccctgttcgtggccctgaccttcgagcggcgggaggtcctggactcctccaatatcaaaccaatgaacctgatcggcgtggcaagaggcgaaaacatccccgccgtgatcgccctgaccgaccccgagggctgcccactgagccggtttaaggatagcctgggaaacccaacccacatcctgagaatcggcgagagctataaggagaagcagcggaccatccaggccaagaaggaggtggagcagcggagagccggcggctacagccggaagtacgccagcaaagccaagaatctggcagacgatatggtgagaaacaccgctagagatctgctgtactacgccgtgacccaggatgccatgctgatcttcgccaacctgagccggggcttcggccggcagggcaagcggaccttcatggccgagagacagtacacacggatggaggactggctgaccgccaagctggcctacgagggcctgagcaagacctacctgtccaagacactggcccagtacacctccaagacatgcagcaactgtgggtttaccatcaccagcgccgactacgacagggtgctggagaagctgaagaagacagcaacaggctggatgaccacaattaacggcaaggagctgaaggtggagggccagattacctactacaacagatacaagagacagaacgtagtcaaggacctgtccgtcgagctggatagactgagcgaagaatctgtgaacaacgacatctcctcctggacaaagggcagaagcggagaagctctgagcctcctgaagaaaagattctcccatagacccgtgcaggagaagttcgtgtgcctgaactgcggcttcgagacacacgcagccgagcaagccgccctgaacatcgccagatcctggctgttcctgcggagccaggagtacaagaaataccagacaaacaagacaaccggcaacaccgataagagagccttcgtcgagacctggcagtccttttaccggaagaagcttaaggaggtgtggaaacctgccgtgcggtctggcggatctggcggaggctccaccagccccaagaaaaagagaaaagtctaagctgccttctgcggggcttgccttctggccatgcccttcttctctcccttgcacctgtacctcttggtctttgaataaagcctgagtaggaaggctagcaaaaaaaaaaaaaaaaaaaaaaaaaaaaaaaaaaaaaaaaaaaaaaaaaaaaaaaaaaaaaaaaaaaaaaaaaaaaaaaa

SEQ ID NO: 13683 - RNA, 5785 nt, synthetic construct
  source 1..5785: mol_type = other RNA
aggaaataagagagaaaagaagagtaagaagaaatataagagccaccatggcccctaagaagaagcgtaaagtgagccggatggaacgcctcgtctacgaggtgcggcagaagtgcagaaacatcgaggacatctgcatctcctgcggatctctgaacgtgaccctggagcacccactgttcatcggcggcatgtgccagaactgtaaaaactgttttctggagtgtgcctatcaatacgacgatgacggctaccagagctactgcaccatctgttgcggcggaagagaggtgctgatgtgtggaaataacaactgctgccggtgcttctgcgtggaatgcgtggacctgctggtgggccccggcgccgcccaggccgctattaaggaagatccttggaactgctacatgtgcggccacaagggcacatacggcctgctgagacggagagaggactggcctagcagactgcagatgttcttcgccaataaccacgaccaggagttcgacccccctaaggtgtaccctcccgtccccgccgagaagagaaagcccatccgggtcctgagcctgttcgatggcatcgccaccggtctgctggtgctgaaggacctgggcatccaggtggataggtacattgcctccgaggtgtgcgaggactccatcaccgtgggaatggtgcgtcatcagggcaagatcatgtacgtgggcgacgtgcggagcgtgacacagaagcatatccaggagtggggccctttcgacctggtgatcggcggcagcccttgcaatgacctgagcatcgtgaacccagcccggaagggcctgtacgagggaaccggcagactgttcttcgagttttacagactgctgcacgacgcccggcctaaggaaggcgacgaccggcccttcttttggctgttcgagaatgtggtggccatgggagtcagcgacaagcgggatattagccggttcctggagagcaaccccgtgatgatcgatgccaaggaagtgagcgccgcccaccgggccagatacttctggggcaatctgcctggcatgaacagacccctggccagcaccgtgaacgacaagctggagctgcaggagtgcctggagcacggccggatcgccaagttcagcaaggtgagaaccatcaccacccgaagcaacagcatcaaacaaggcaaggaccagcactttcctgtgttcatgaacgagaaggaggacatcctgtggtgtaccgagatggagagagtgttcgggttcccagtccactacacagatgtcagcaacatgtctagactggccagacagagactgctgggaagaagctggtccgtccctgtgatcagacacctgttcgcccctctgaaggagtacttcgcctgcgtgagcagcggcaacagcaacgccaacagccggggccccagcttctctagcggcctggtgccactgtccctgagagggagccacatgggccccatggagatctacaaaaccgtgagcgcctggaagcggcagcctgtgcgcgtgctgagcctgtttcggaatatcgataaagtcctgaaaagcctgggattcctggagagcggctctggctccggcggtggcaccctgaagtacgtggaggatgtgacaaacgtggtcagacgggatgtggagaagtggggccccttcgatctggtgtacggcagcacccaacccctgggcagctcttgtgaccggtgccctggctggtacatgtttcagttccaccggatcctgcagtacgccctgccgagacaggagtcccagcggccattcttttggattttcatggacaacttgctgctgaccgaggatgaccaggaaactaccactcggttcctgcagaccgaagccgtgaccctgcaggacgtgagaggccgggactaccagaacgccatgcgggtgtggtccaacatccctggactgaaaagcaagcacgcacctctgacccctaaagaagaggagtacctgcaggcccaggtgcggagcagaagcaagctggacgcccctaaggtggatctgctggtgaagaattgcctcctgcccctgagagagtacttcaagtatttcagccagaatagtctgcccctgggaggcagcggcggcggcgcccccctgcccctgaccttcgaggacgtggccgtgtacttcagcgagcaggagtggaggaacctggaggcctggcagaaggagctgtacaagcaggtgatgaggaccaactacgagatcctggtgagcctggacgacggcctgcccaagcccgagctgatcagctggctggagcagggcagggagctgttcaagaactggggcgagagccagaagagcggcaacatcatctgcttcagcgccggcggcccaagcagcggcgcccctcctcccagcggcggcagcccagccggctccccaacctctaccgaggagggcacctctgagtccgccacccccgagagcggccctggcacctccaccgagcccagcgagggcagcgcacccggcagccctgccggcagccccacctccacagaggagggaaccagcaccgagcccagcgaaggcagcgccccaggcaccagcaccgagcctagtgagcaggagattaaacggatcaacaagatcagaagaagacttgtgaaagacagcaacaccaagaaggccggcaagacaggccccatgaaaaccctgctggttagagtgatgacacccgatctgagagagcggctggaaaacctgagaaagaagcctgaaaatatcccccagcccatcagcaatacatctagagccaacctgaataagctgctgaccgattacaccgaaatgaagaaggcgatcctgcatgtgtactgggaagagttccagaaggaccctgtgggcctgatgagccgggtggcccagcctgccagcaagaagatcgatcagaacaagctgaaacctgagatggacgagaagggcaacctgaccaccgccggctttgcctgctctcagtgtggccagcccctgttcgtgtacaagctggagcaggtgtctgagaagggcaaggcttacaccaactacttcggacggtgcaatgtggccgagcacgaaaagctgatcctgctggcccagctgaagcccgagaaggatagcgacgaagccgtgacatatagcctgggaaagtttgggcagagggccctggatttctacagcattcatgtgaccaaggagtccacccaccccgtgaagcccctggcccagatcgccggaaacagatacgcctccggacctgtgggaaaggccctgagcgacgcatgtatgggcacaatcgcctccttcctgtctaagtaccaggacatcatcatcgaacaccagaaggtggtgaagggcaaccagaagagactggagagcctgcgggagctggccggcaaggaaaacctggaataccctagcgtgaccctgccacctcagcctcacaccaaggagggcgttgatgcctacaacgaagtgatcgcccgggtgcgaatgtgggtgaacctgaacctgtggcagaagctgaagctaagcagagatgatgccaagcctctgctgagactgaagggattcccttcctttcctctggtcgagagacaggccaacgaagtggactggtgggacatggtgtgtaacgtgaagaagctgatcaacgagaaaaaggaggatggcaaggtgttttggcagaatctggctggctacaagagacaggaagccctgagaccatacctgagcagcgaggaagatcggaagaagggaaagaaattcgctcggtaccagctgggcgacctgctgctgcacctggaaaagaagcacggcgaggactggggaaaggtgtacgacgaggcctgggagcggattgacaagaaagtggaaggcctgagcaagcacatcaagctggaagaggaacggagaagcgaggacgcccagagcaaggccgccctgaccgactggctgcgggctaaggccagcttcgtgatcgagggcctgaaggaggccgacaaggacgagttctgcagatgcgagctgaagctgcagaagtggtacggggacctgcggggaaagcccttcgccatcgaagccgagaacagcatcctggacatcagcggcttcagcaagcagtacaactgtgccttcatctggcagaaggacggcgtgaagaagctgaacctgtacctgatcatcaactacttcaagggcggcaagctgcggttcaagaagatcaaacctgaagccttcgaagccaacagattctacaccgtgatcaacaaaaagagcggcgagatcgtgcccatggaggtgaacttcaacttcgacgaccccaacctgatcatcctgcctctggcctttggcaagagacagggcagagaattcatctggaacgacctgctgtccctggaaaccggcagcctgaagctggccaacggaagagtgatcgagaagacactgtacaacagaagaacccggcaggatgagcctgccctgttcgtggccctgaccttcgagcggcgggaggtcctggactcctccaatatcaaaccaatgaacctgatcggcgtggcaagaggcgaaaacatccccgccgtgatcgccctgaccgaccccgagggctgcccactgagccggtttaaggatagcctgggaaacccaacccacatcctgagaatcggcgagagctataaggagaagcagcggaccatccaggccaagaaggaggtggagcagcggagagccggcggctacagccggaagtacgccagcaaagccaagaatctggcagacgatatggtgagaaacaccgctagagatctgctgtactacgccgtgacccaggatgccatgctgatcttcgccaacctgagccggggcttcggccggcagggcaagcggaccttcatggccgagagacagtacacacggatggaggactggctgaccgccaagctggcctacgagggcctgagcaagacctacctgtccaagacactggcccagtacacctccaagacatgcagcaactgtgggtttaccatcaccagcgccgactacgacagggtgctggagaagctgaagaagacagcaacaggctggatgaccacaattaacggcaaggagctgaaggtggagggccagattacctactacaacagatacaagagacagaacgtagtcaaggacctgtccgtcgagctggatagactgagcgaagaatctgtgaacaacgacatctcctcctggacaaagggcagaagcggagaagctctgagcctcctgaagaaaagattctcccatagacccgtgcaggagaagttcgtgtgcctgaactgcggcttcgagacacacgcagccgagcaagccgccctgaacatcgccagatcctggctgttcctgcggagccaggagtacaagaaataccagacaaacaagacaaccggcaacaccgataagagagccttcgtcgagacctggcagtccttttaccggaagaagcttaaggaggtgtggaaacctgccgtgcggtctggcggatctggcggaggctccaccagccccaagaaaaagagaaaagtctaagctgccttctgcggggcttgccttctggccatgcccttcttctctcccttgcacctgtacctcttggtctttgaataaagcctgagtaggaaggctagcaaaaaaaaaaaaaaaaaaaaaaaaaaaaaaaaaaaaaaaaaaaaaaaaaaaaaaaaaaaaaaaaaaaaaaaaaaaaaaaa

SEQ ID NO: 13684 - RNA, 5785 nt, synthetic construct
  source 1..5785: mol_type = other RNA
aggaaataagagagaaaagaagagtaagaagaaatataagagccaccatggcccctaagaagaagcgtaaagtgagccggatggaacgcctcgtctacgaggtgcggcagaagtgcagaaacatcgaggacatctgcatctcctgcggatctctgaacgtgaccctggagcacccactgttcatcggcggcatgtgccagaactgtaaaaactgttttctggagtgtgcctatcaatacgacgatgacggctaccagagctactgcaccatctgttgcggcggaagagaggtgctgatgtgtggaaataacaactgctgccggtgcttctgcgtggaatgcgtggacctgctggtgggccccggcgccgcccaggccgctattaaggaagatccttggaactgctacatgtgcggccacaagggcacatacggcctgctgagacggagagaggactggcctagcagactgcagatgttcttcgccaataaccacgaccaggagttcgacccccctaaggtgtaccctcccgtccccgccgagaagagaaagcccatccgggtcctgagcctgttcgatggcatcgccaccggtctgctggtgctgaaggacctgggcatccaggtggataggtacattgcctccgaggtgtgcgaggactccatcaccgtgggaatggtgcgtcatcagggcaagatcatgtacgtgggcgacgtgcggagcgtgacacagaagcatatccaggagtggggccctttcgacctggtgatcggcggcagcccttgcaatgacctgagcatcgtgaacccagcccggaagggcctgtacgagggaaccggcagactgttcttcgagttttacagactgctgcacgacgcccggcctaaggaaggcgacgaccggcccttcttttggctgttcgagaatgtggtggccatgggagtcagcgacaagcgggatattagccggttcctggagagcaaccccgtgatgatcgatgccaaggaagtgagcgccgcccaccgggccagatacttctggggcaatctgcctggcatgaacagacccctggccagcaccgtgaacgacaagctggagctgcaggagtgcctggagcacggccggatcgccaagttcagcaaggtgagaaccatcaccacccgaagcaacagcatcaaacaaggcaaggaccagcactttcctgtgttcatgaacgagaaggaggacatcctgtggtgtaccgagatggagagagtgttcgggttcccagtccactacacagatgtcagcaacatgtctagactggccagacagagactgctgggaagaagctggtccgtccctgtgatcagacacctgttcgcccctctgaaggagtacttcgcctgcgtgagcagcggcaacagcaacgccaacagccggggccccagcttctctagcggcctggtgccactgtccctgagagggagccacatgggccccatggagatctacaaaaccgtgagcgcctggaagcggcagcctgtgcgcgtgctgagcctgtttcggaatatcgataaagtcctgaaaagcctgggattcctggagagcggctctggctccggcggtggcaccctgaagtacgtggaggatgtgacaaacgtggtcagacgggatgtggagaagtggggccccttcgatctggtgtacggcagcacccaacccctgggcagctcttgtgaccggtgccctggctggtacatgtttcagttccaccggatcctgcagtacgccctgccgagacaggagtcccagcggccattcttttggattttcatggacaacttgctgctgaccgaggatgaccaggaaactaccactcggttcctgcagaccgaagccgtgaccctgcaggacgtgagaggccgggactaccagaacgccatgcgggtgtggtccaacatccctggactgaaaagcaagcacgcacctctgacccctaaagaagaggagtacctgcaggcccaggtgcggagcagaagcaagctggacgcccctaaggtggatctgctggtgaagaattgcctcctgcccctgagagagtacttcaagtatttcagccagaatagtctgcccctgggaggcagcggcggcggcagctacggcagcttcagcttcgaggacgtgaccgtgggcttcacccaggaggagtggcagcacctgggccccgcccagaggatcctgtacagggacgtgatgctggagaactacagccacctggtgagcgtgggctgctgcatccccaagcccgaggtgatcctgaagctggagcagggcgagcagccctggatcctggaggaggagagccccagccagagctaccccggcctgcccaccgacggcggcccaagcagcggcgcccctcctcccagcggcggcagcccagccggctccccaacctctaccgaggagggcacctctgagtccgccacccccgagagcggccctggcacctccaccgagcccagcgagggcagcgcacccggcagccctgccggcagccccacctccacagaggagggaaccagcaccgagcccagcgaaggcagcgccccaggcaccagcaccgagcctagtgagcaggagattaaacggatcaacaagatcagaagaagacttgtgaaagacagcaacaccaagaaggccggcaagacaggccccatgaaaaccctgctggttagagtgatgacacccgatctgagagagcggctggaaaacctgagaaagaagcctgaaaatatcccccagcccatcagcaatacatctagagccaacctgaataagctgctgaccgattacaccgaaatgaagaaggcgatcctgcatgtgtactgggaagagttccagaaggaccctgtgggcctgatgagccgggtggcccagcctgccagcaagaagatcgatcagaacaagctgaaacctgagatggacgagaagggcaacctgaccaccgccggctttgcctgctctcagtgtggccagcccctgttcgtgtacaagctggagcaggtgtctgagaagggcaaggcttacaccaactacttcggacggtgcaatgtggccgagcacgaaaagctgatcctgctggcccagctgaagcccgagaaggatagcgacgaagccgtgacatatagcctgggaaagtttgggcagagggccctggatttctacagcattcatgtgaccaaggagtccacccaccccgtgaagcccctggcccagatcgccggaaacagatacgcctccggacctgtgggaaaggccctgagcgacgcatgtatgggcacaatcgcctccttcctgtctaagtaccaggacatcatcatcgaacaccagaaggtggtgaagggcaaccagaagagactggagagcctgcgggagctggccggcaaggaaaacctggaataccctagcgtgaccctgccacctcagcctcacaccaaggagggcgttgatgcctacaacgaagtgatcgcccgggtgcgaatgtgggtgaacctgaacctgtggcagaagctgaagctaagcagagatgatgccaagcctctgctgagactgaagggattcccttcctttcctctggtcgagagacaggccaacgaagtggactggtgggacatggtgtgtaacgtgaagaagctgatcaacgagaaaaaggaggatggcaaggtgttttggcagaatctggctggctacaagagacaggaagccctgagaccatacctgagcagcgaggaagatcggaagaagggaaagaaattcgctcggtaccagctgggcgacctgctgctgcacctggaaaagaagcacggcgaggactggggaaaggtgtacgacgaggcctgggagcggattgacaagaaagtggaaggcctgagcaagcacatcaagctggaagaggaacggagaagcgaggacgcccagagcaaggccgccctgaccgactggctgcgggctaaggccagcttcgtgatcgagggcctgaaggaggccgacaaggacgagttctgcagatgcgagctgaagctgcagaagtggtacggggacctgcggggaaagcccttcgccatcgaagccgagaacagcatcctggacatcagcggcttcagcaagcagtacaactgtgccttcatctggcagaaggacggcgtgaagaagctgaacctgtacctgatcatcaactacttcaagggcggcaagctgcggttcaagaagatcaaacctgaagccttcgaagccaacagattctacaccgtgatcaacaaaaagagcggcgagatcgtgcccatggaggtgaacttcaacttcgacgaccccaacctgatcatcctgcctctggcctttggcaagagacagggcagagaattcatctggaacgacctgctgtccctggaaaccggcagcctgaagctggccaacggaagagtgatcgagaagacactgtacaacagaagaacccggcaggatgagcctgccctgttcgtggccctgaccttcgagcggcgggaggtcctggactcctccaatatcaaaccaatgaacctgatcggcgtggcaagaggcgaaaacatccccgccgtgatcgccctgaccgaccccgagggctgcccactgagccggtttaaggatagcctgggaaacccaacccacatcctgagaatcggcgagagctataaggagaagcagcggaccatccaggccaagaaggaggtggagcagcggagagccggcggctacagccggaagtacgccagcaaagccaagaatctggcagacgatatggtgagaaacaccgctagagatctgctgtactacgccgtgacccaggatgccatgctgatcttcgccaacctgagccggggcttcggccggcagggcaagcggaccttcatggccgagagacagtacacacggatggaggactggctgaccgccaagctggcctacgagggcctgagcaagacctacctgtccaagacactggcccagtacacctccaagacatgcagcaactgtgggtttaccatcaccagcgccgactacgacagggtgctggagaagctgaagaagacagcaacaggctggatgaccacaattaacggcaaggagctgaaggtggagggccagattacctactacaacagatacaagagacagaacgtagtcaaggacctgtccgtcgagctggatagactgagcgaagaatctgtgaacaacgacatctcctcctggacaaagggcagaagcggagaagctctgagcctcctgaagaaaagattctcccatagacccgtgcaggagaagttcgtgtgcctgaactgcggcttcgagacacacgcagccgagcaagccgccctgaacatcgccagatcctggctgttcctgcggagccaggagtacaagaaataccagacaaacaagacaaccggcaacaccgataagagagccttcgtcgagacctggcagtccttttaccggaagaagcttaaggaggtgtggaaacctgccgtgcggtctggcggatctggcggaggctccaccagccccaagaaaaagagaaaagtctaagctgccttctgcggggcttgccttctggccatgcccttcttctctcccttgcacctgtacctcttggtctttgaataaagcctgagtaggaaggctagcaaaaaaaaaaaaaaaaaaaaaaaaaaaaaaaaaaaaaaaaaaaaaaaaaaaaaaaaaaaaaaaaaaaaaaaaaaaaaaaa

SEQ ID NO: 13685 - RNA, 5785 nt, synthetic construct
  source 1..5785: mol_type = other RNA
aggaaataagagagaaaagaagagtaagaagaaatataagagccaccatggcccctaagaagaagcgtaaagtgagccggatggaacgcctcgtctacgaggtgcggcagaagtgcagaaacatcgaggacatctgcatctcctgcggatctctgaacgtgaccctggagcacccactgttcatcggcggcatgtgccagaactgtaaaaactgttttctggagtgtgcctatcaatacgacgatgacggctaccagagctactgcaccatctgttgcggcggaagagaggtgctgatgtgtggaaataacaactgctgccggtgcttctgcgtggaatgcgtggacctgctggtgggccccggcgccgcccaggccgctattaaggaagatccttggaactgctacatgtgcggccacaagggcacatacggcctgctgagacggagagaggactggcctagcagactgcagatgttcttcgccaataaccacgaccaggagttcgacccccctaaggtgtaccctcccgtccccgccgagaagagaaagcccatccgggtcctgagcctgttcgatggcatcgccaccggtctgctggtgctgaaggacctgggcatccaggtggataggtacattgcctccgaggtgtgcgaggactccatcaccgtgggaatggtgcgtcatcagggcaagatcatgtacgtgggcgacgtgcggagcgtgacacagaagcatatccaggagtggggccctttcgacctggtgatcggcggcagcccttgcaatgacctgagcatcgtgaacccagcccggaagggcctgtacgagggaaccggcagactgttcttcgagttttacagactgctgcacgacgcccggcctaaggaaggcgacgaccggcccttcttttggctgttcgagaatgtggtggccatgggagtcagcgacaagcgggatattagccggttcctggagagcaaccccgtgatgatcgatgccaaggaagtgagcgccgcccaccgggccagatacttctggggcaatctgcctggcatgaacagacccctggccagcaccgtgaacgacaagctggagctgcaggagtgcctggagcacggccggatcgccaagttcagcaaggtgagaaccatcaccacccgaagcaacagcatcaaacaaggcaaggaccagcactttcctgtgttcatgaacgagaaggaggacatcctgtggtgtaccgagatggagagagtgttcgggttcccagtccactacacagatgtcagcaacatgtctagactggccagacagagactgctgggaagaagctggtccgtccctgtgatcagacacctgttcgcccctctgaaggagtacttcgcctgcgtgagcagcggcaacagcaacgccaacagccggggccccagcttctctagcggcctggtgccactgtccctgagagggagccacatgggccccatggagatctacaaaaccgtgagcgcctggaagcggcagcctgtgcgcgtgctgagcctgtttcggaatatcgataaagtcctgaaaagcctgggattcctggagagcggctctggctccggcggtggcaccctgaagtacgtggaggatgtgacaaacgtggtcagacgggatgtggagaagtggggccccttcgatctggtgtacggcagcacccaacccctgggcagctcttgtgaccggtgccctggctggtacatgtttcagttccaccggatcctgcagtacgccctgccgagacaggagtcccagcggccattcttttggattttcatggacaacttgctgctgaccgaggatgaccaggaaactaccactcggttcctgcagaccgaagccgtgaccctgcaggacgtgagaggccgggactaccagaacgccatgcgggtgtggtccaacatccctggactgaaaagcaagcacgcacctctgacccctaaagaagaggagtacctgcaggcccaggtgcggagcagaagcaagctggacgcccctaaggtggatctgctggtgaagaattgcctcctgcccctgagagagtacttcaagtatttcagccagaatagtctgcccctgggaggcagcggcggcggccccagcggcctggtgaccttcgaggaggtggccgtgtacttcaccagggaggagggcgccctgctggaccccacccagagggccctgtacagggacgtgatgcaggagaactacgagaccgtggtgctgctgggcttccccgtgagcaagcccgacgtgatcagccagctggagaggggcgaggagccctgggtgcccgacctgcagggcagcgagaaggaggtgctgcccagggccgcctgcggcggcccaagcagcggcgcccctcctcccagcggcggcagcccagccggctccccaacctctaccgaggagggcacctctgagtccgccacccccgagagcggccctggcacctccaccgagcccagcgagggcagcgcacccggcagccctgccggcagccccacctccacagaggagggaaccagcaccgagcccagcgaaggcagcgccccaggcaccagcaccgagcctagtgagcaggagattaaacggatcaacaagatcagaagaagacttgtgaaagacagcaacaccaagaaggccggcaagacaggccccatgaaaaccctgctggttagagtgatgacacccgatctgagagagcggctggaaaacctgagaaagaagcctgaaaatatcccccagcccatcagcaatacatctagagccaacctgaataagctgctgaccgattacaccgaaatgaagaaggcgatcctgcatgtgtactgggaagagttccagaaggaccctgtgggcctgatgagccgggtggcccagcctgccagcaagaagatcgatcagaacaagctgaaacctgagatggacgagaagggcaacctgaccaccgccggctttgcctgctctcagtgtggccagcccctgttcgtgtacaagctggagcaggtgtctgagaagggcaaggcttacaccaactacttcggacggtgcaatgtggccgagcacgaaaagctgatcctgctggcccagctgaagcccgagaaggatagcgacgaagccgtgacatatagcctgggaaagtttgggcagagggccctggatttctacagcattcatgtgaccaaggagtccacccaccccgtgaagcccctggcccagatcgccggaaacagatacgcctccggacctgtgggaaaggccctgagcgacgcatgtatgggcacaatcgcctccttcctgtctaagtaccaggacatcatcatcgaacaccagaaggtggtgaagggcaaccagaagagactggagagcctgcgggagctggccggcaaggaaaacctggaataccctagcgtgaccctgccacctcagcctcacaccaaggagggcgttgatgcctacaacgaagtgatcgcccgggtgcgaatgtgggtgaacctgaacctgtggcagaagctgaagctaagcagagatgatgccaagcctctgctgagactgaagggattcccttcctttcctctggtcgagagacaggccaacgaagtggactggtgggacatggtgtgtaacgtgaagaagctgatcaacgagaaaaaggaggatggcaaggtgttttggcagaatctggctggctacaagagacaggaagccctgagaccatacctgagcagcgaggaagatcggaagaagggaaagaaattcgctcggtaccagctgggcgacctgctgctgcacctggaaaagaagcacggcgaggactggggaaaggtgtacgacgaggcctgggagcggattgacaagaaagtggaaggcctgagcaagcacatcaagctggaagaggaacggagaagcgaggacgcccagagcaaggccgccctgaccgactggctgcgggctaaggccagcttcgtgatcgagggcctgaaggaggccgacaaggacgagttctgcagatgcgagctgaagctgcagaagtggtacggggacctgcggggaaagcccttcgccatcgaagccgagaacagcatcctggacatcagcggcttcagcaagcagtacaactgtgccttcatctggcagaaggacggcgtgaagaagctgaacctgtacctgatcatcaactacttcaagggcggcaagctgcggttcaagaagatcaaacctgaagccttcgaagccaacagattctacaccgtgatcaacaaaaagagcggcgagatcgtgcccatggaggtgaacttcaacttcgacgaccccaacctgatcatcctgcctctggcctttggcaagagacagggcagagaattcatctggaacgacctgctgtccctggaaaccggcagcctgaagctggccaacggaagagtgatcgagaagacactgtacaacagaagaacccggcaggatgagcctgccctgttcgtggccctgaccttcgagcggcgggaggtcctggactcctccaatatcaaaccaatgaacctgatcggcgtggcaagaggcgaaaacatccccgccgtgatcgccctgaccgaccccgagggctgcccactgagccggtttaaggatagcctgggaaacccaacccacatcctgagaatcggcgagagctataaggagaagcagcggaccatccaggccaagaaggaggtggagcagcggagagccggcggctacagccggaagtacgccagcaaagccaagaatctggcagacgatatggtgagaaacaccgctagagatctgctgtactacgccgtgacccaggatgccatgctgatcttcgccaacctgagccggggcttcggccggcagggcaagcggaccttcatggccgagagacagtacacacggatggaggactggctgaccgccaagctggcctacgagggcctgagcaagacctacctgtccaagacactggcccagtacacctccaagacatgcagcaactgtgggtttaccatcaccagcgccgactacgacagggtgctggagaagctgaagaagacagcaacaggctggatgaccacaattaacggcaaggagctgaaggtggagggccagattacctactacaacagatacaagagacagaacgtagtcaaggacctgtccgtcgagctggatagactgagcgaagaatctgtgaacaacgacatctcctcctggacaaagggcagaagcggagaagctctgagcctcctgaagaaaagattctcccatagacccgtgcaggagaagttcgtgtgcctgaactgcggcttcgagacacacgcagccgagcaagccgccctgaacatcgccagatcctggctgttcctgcggagccaggagtacaagaaataccagacaaacaagacaaccggcaacaccgataagagagccttcgtcgagacctggcagtccttttaccggaagaagcttaaggaggtgtggaaacctgccgtgcggtctggcggatctggcggaggctccaccagccccaagaaaaagagaaaagtctaagctgccttctgcggggcttgccttctggccatgcccttcttctctcccttgcacctgtacctcttggtctttgaataaagcctgagtaggaaggctagcaaaaaaaaaaaaaaaaaaaaaaaaaaaaaaaaaaaaaaaaaaaaaaaaaaaaaaaaaaaaaaaaaaaaaaaaaaaaaaaa

SEQ ID NO: 13686 - RNA, 5785 nt, synthetic construct
  source 1..5785: mol_type = other RNA
aggaaataagagagaaaagaagagtaagaagaaatataagagccaccatggcccctaagaagaagcgtaaagtgagccggatggaacgcctcgtctacgaggtgcggcagaagtgcagaaacatcgaggacatctgcatctcctgcggatctctgaacgtgaccctggagcacccactgttcatcggcggcatgtgccagaactgtaaaaactgttttctggagtgtgcctatcaatacgacgatgacggctaccagagctactgcaccatctgttgcggcggaagagaggtgctgatgtgtggaaataacaactgctgccggtgcttctgcgtggaatgcgtggacctgctggtgggccccggcgccgcccaggccgctattaaggaagatccttggaactgctacatgtgcggccacaagggcacatacggcctgctgagacggagagaggactggcctagcagactgcagatgttcttcgccaataaccacgaccaggagttcgacccccctaaggtgtaccctcccgtccccgccgagaagagaaagcccatccgggtcctgagcctgttcgatggcatcgccaccggtctgctggtgctgaaggacctgggcatccaggtggataggtacattgcctccgaggtgtgcgaggactccatcaccgtgggaatggtgcgtcatcagggcaagatcatgtacgtgggcgacgtgcggagcgtgacacagaagcatatccaggagtggggccctttcgacctggtgatcggcggcagcccttgcaatgacctgagcatcgtgaacccagcccggaagggcctgtacgagggaaccggcagactgttcttcgagttttacagactgctgcacgacgcccggcctaaggaaggcgacgaccggcccttcttttggctgttcgagaatgtggtggccatgggagtcagcgacaagcgggatattagccggttcctggagagcaaccccgtgatgatcgatgccaaggaagtgagcgccgcccaccgggccagatacttctggggcaatctgcctggcatgaacagacccctggccagcaccgtgaacgacaagctggagctgcaggagtgcctggagcacggccggatcgccaagttcagcaaggtgagaaccatcaccacccgaagcaacagcatcaaacaaggcaaggaccagcactttcctgtgttcatgaacgagaaggaggacatcctgtggtgtaccgagatggagagagtgttcgggttcccagtccactacacagatgtcagcaacatgtctagactggccagacagagactgctgggaagaagctggtccgtccctgtgatcagacacctgttcgcccctctgaaggagtacttcgcctgcgtgagcagcggcaacagcaacgccaacagccggggccccagcttctctagcggcctggtgccactgtccctgagagggagccacatgggccccatggagatctacaaaaccgtgagcgcctggaagcggcagcctgtgcgcgtgctgagcctgtttcggaatatcgataaagtcctgaaaagcctgggattcctggagagcggctctggctccggcggtggcaccctgaagtacgtggaggatgtgacaaacgtggtcagacgggatgtggagaagtggggccccttcgatctggtgtacggcagcacccaacccctgggcagctcttgtgaccggtgccctggctggtacatgtttcagttccaccggatcctgcagtacgccctgccgagacaggagtcccagcggccattcttttggattttcatggacaacttgctgctgaccgaggatgaccaggaaactaccactcggttcctgcagaccgaagccgtgaccctgcaggacgtgagaggccgggactaccagaacgccatgcgggtgtggtccaacatccctggactgaaaagcaagcacgcacctctgacccctaaagaagaggagtacctgcaggcccaggtgcggagcagaagcaagctggacgcccctaaggtggatctgctggtgaagaattgcctcctgcccctgagagagtacttcaagtatttcagccagaatagtctgcccctgggaggcagcggcggcggcatggccttcagggacgtggccgtggacttcacccaggaggagtggatgctgctgagccccgcccagaggagcctgtacagggaggtgatgctggagaactacagcaacctggtgagcctgggcatccccttcagcaagcccaagctgatcacccagctggagcagggcaaggagacctggagggaggagaggaagtgcccccccgccaacggcccccccgagcccaagcccgagctgcacctgggcggcccaagcagcggcgcccctcctcccagcggcggcagcccagccggctccccaacctctaccgaggagggcacctctgagtccgccacccccgagagcggccctggcacctccaccgagcccagcgagggcagcgcacccggcagccctgccggcagccccacctccacagaggagggaaccagcaccgagcccagcgaaggcagcgccccaggcaccagcaccgagcctagtgagcaggagattaaacggatcaacaagatcagaagaagacttgtgaaagacagcaacaccaagaaggccggcaagacaggccccatgaaaaccctgctggttagagtgatgacacccgatctgagagagcggctggaaaacctgagaaagaagcctgaaaatatcccccagcccatcagcaatacatctagagccaacctgaataagctgctgaccgattacaccgaaatgaagaaggcgatcctgcatgtgtactgggaagagttccagaaggaccctgtgggcctgatgagccgggtggcccagcctgccagcaagaagatcgatcagaacaagctgaaacctgagatggacgagaagggcaacctgaccaccgccggctttgcctgctctcagtgtggccagcccctgttcgtgtacaagctggagcaggtgtctgagaagggcaaggcttacaccaactacttcggacggtgcaatgtggccgagcacgaaaagctgatcctgctggcccagctgaagcccgagaaggatagcgacgaagccgtgacatatagcctgggaaagtttgggcagagggccctggatttctacagcattcatgtgaccaaggagtccacccaccccgtgaagcccctggcccagatcgccggaaacagatacgcctccggacctgtgggaaaggccctgagcgacgcatgtatgggcacaatcgcctccttcctgtctaagtaccaggacatcatcatcgaacaccagaaggtggtgaagggcaaccagaagagactggagagcctgcgggagctggccggcaaggaaaacctggaataccctagcgtgaccctgccacctcagcctcacaccaaggagggcgttgatgcctacaacgaagtgatcgcccgggtgcgaatgtgggtgaacctgaacctgtggcagaagctgaagctaagcagagatgatgccaagcctctgctgagactgaagggattcccttcctttcctctggtcgagagacaggccaacgaagtggactggtgggacatggtgtgtaacgtgaagaagctgatcaacgagaaaaaggaggatggcaaggtgttttggcagaatctggctggctacaagagacaggaagccctgagaccatacctgagcagcgaggaagatcggaagaagggaaagaaattcgctcggtaccagctgggcgacctgctgctgcacctggaaaagaagcacggcgaggactggggaaaggtgtacgacgaggcctgggagcggattgacaagaaagtggaaggcctgagcaagcacatcaagctggaagaggaacggagaagcgaggacgcccagagcaaggccgccctgaccgactggctgcgggctaaggccagcttcgtgatcgagggcctgaaggaggccgacaaggacgagttctgcagatgcgagctgaagctgcagaagtggtacggggacctgcggggaaagcccttcgccatcgaagccgagaacagcatcctggacatcagcggcttcagcaagcagtacaactgtgccttcatctggcagaaggacggcgtgaagaagctgaacctgtacctgatcatcaactacttcaagggcggcaagctgcggttcaagaagatcaaacctgaagccttcgaagccaacagattctacaccgtgatcaacaaaaagagcggcgagatcgtgcccatggaggtgaacttcaacttcgacgaccccaacctgatcatcctgcctctggcctttggcaagagacagggcagagaattcatctggaacgacctgctgtccctggaaaccggcagcctgaagctggccaacggaagagtgatcgagaagacactgtacaacagaagaacccggcaggatgagcctgccctgttcgtggccctgaccttcgagcggcgggaggtcctggactcctccaatatcaaaccaatgaacctgatcggcgtggcaagaggcgaaaacatccccgccgtgatcgccctgaccgaccccgagggctgcccactgagccggtttaaggatagcctgggaaacccaacccacatcctgagaatcggcgagagctataaggagaagcagcggaccatccaggccaagaaggaggtggagcagcggagagccggcggctacagccggaagtacgccagcaaagccaagaatctggcagacgatatggtgagaaacaccgctagagatctgctgtactacgccgtgacccaggatgccatgctgatcttcgccaacctgagccggggcttcggccggcagggcaagcggaccttcatggccgagagacagtacacacggatggaggactggctgaccgccaagctggcctacgagggcctgagcaagacctacctgtccaagacactggcccagtacacctccaagacatgcagcaactgtgggtttaccatcaccagcgccgactacgacagggtgctggagaagctgaagaagacagcaacaggctggatgaccacaattaacggcaaggagctgaaggtggagggccagattacctactacaacagatacaagagacagaacgtagtcaaggacctgtccgtcgagctggatagactgagcgaagaatctgtgaacaacgacatctcctcctggacaaagggcagaagcggagaagctctgagcctcctgaagaaaagattctcccatagacccgtgcaggagaagttcgtgtgcctgaactgcggcttcgagacacacgcagccgagcaagccgccctgaacatcgccagatcctggctgttcctgcggagccaggagtacaagaaataccagacaaacaagacaaccggcaacaccgataagagagccttcgtcgagacctggcagtccttttaccggaagaagcttaaggaggtgtggaaacctgccgtgcggtctggcggatctggcggaggctccaccagccccaagaaaaagagaaaagtctaagctgccttctgcggggcttgccttctggccatgcccttcttctctcccttgcacctgtacctcttggtctttgaataaagcctgagtaggaaggctagcaaaaaaaaaaaaaaaaaaaaaaaaaaaaaaaaaaaaaaaaaaaaaaaaaaaaaaaaaaaaaaaaaaaaaaaaaaaaaaaa

SEQ ID NO: 13687 - RNA, 5785 nt, synthetic construct
  source 1..5785: mol_type = other RNA
aggaaataagagagaaaagaagagtaagaagaaatataagagccaccatggcccctaagaagaagcgtaaagtgagccggatggaacgcctcgtctacgaggtgcggcagaagtgcagaaacatcgaggacatctgcatctcctgcggatctctgaacgtgaccctggagcacccactgttcatcggcggcatgtgccagaactgtaaaaactgttttctggagtgtgcctatcaatacgacgatgacggctaccagagctactgcaccatctgttgcggcggaagagaggtgctgatgtgtggaaataacaactgctgccggtgcttctgcgtggaatgcgtggacctgctggtgggccccggcgccgcccaggccgctattaaggaagatccttggaactgctacatgtgcggccacaagggcacatacggcctgctgagacggagagaggactggcctagcagactgcagatgttcttcgccaataaccacgaccaggagttcgacccccctaaggtgtaccctcccgtccccgccgagaagagaaagcccatccgggtcctgagcctgttcgatggcatcgccaccggtctgctggtgctgaaggacctgggcatccaggtggataggtacattgcctccgaggtgtgcgaggactccatcaccgtgggaatggtgcgtcatcagggcaagatcatgtacgtgggcgacgtgcggagcgtgacacagaagcatatccaggagtggggccctttcgacctggtgatcggcggcagcccttgcaatgacctgagcatcgtgaacccagcccggaagggcctgtacgagggaaccggcagactgttcttcgagttttacagactgctgcacgacgcccggcctaaggaaggcgacgaccggcccttcttttggctgttcgagaatgtggtggccatgggagtcagcgacaagcgggatattagccggttcctggagagcaaccccgtgatgatcgatgccaaggaagtgagcgccgcccaccgggccagatacttctggggcaatctgcctggcatgaacagacccctggccagcaccgtgaacgacaagctggagctgcaggagtgcctggagcacggccggatcgccaagttcagcaaggtgagaaccatcaccacccgaagcaacagcatcaaacaaggcaaggaccagcactttcctgtgttcatgaacgagaaggaggacatcctgtggtgtaccgagatggagagagtgttcgggttcccagtccactacacagatgtcagcaacatgtctagactggccagacagagactgctgggaagaagctggtccgtccctgtgatcagacacctgttcgcccctctgaaggagtacttcgcctgcgtgagcagcggcaacagcaacgccaacagccggggccccagcttctctagcggcctggtgccactgtccctgagagggagccacatgggccccatggagatctacaaaaccgtgagcgcctggaagcggcagcctgtgcgcgtgctgagcctgtttcggaatatcgataaagtcctgaaaagcctgggattcctggagagcggctctggctccggcggtggcaccctgaagtacgtggaggatgtgacaaacgtggtcagacgggatgtggagaagtggggccccttcgatctggtgtacggcagcacccaacccctgggcagctcttgtgaccggtgccctggctggtacatgtttcagttccaccggatcctgcagtacgccctgccgagacaggagtcccagcggccattcttttggattttcatggacaacttgctgctgaccgaggatgaccaggaaactaccactcggttcctgcagaccgaagccgtgaccctgcaggacgtgagaggccgggactaccagaacgccatgcgggtgtggtccaacatccctggactgaaaagcaagcacgcacctctgacccctaaagaagaggagtacctgcaggcccaggtgcggagcagaagcaagctggacgcccctaaggtggatctgctggtgaagaattgcctcctgcccctgagagagtacttcaagtatttcagccagaatagtctgcccctgggaggcagcggcggcggcatgggcctgctgaccttccaggacgtgaccgtggacttcacccaggaggagtgggagtgcctggacctgggccagaggggcctgtacagggacgtgatgctggagaactacggcaacctggcctgcctgggcctggtggtgagcaagcccgacctggtgaccttcctggagcagatgaaggacccctggaacgtgaggaggatcgagaccgccatctaccccggcatgtgcctgctgaacatcggcggcccaagcagcggcgcccctcctcccagcggcggcagcccagccggctccccaacctctaccgaggagggcacctctgagtccgccacccccgagagcggccctggcacctccaccgagcccagcgagggcagcgcacccggcagccctgccggcagccccacctccacagaggagggaaccagcaccgagcccagcgaaggcagcgccccaggcaccagcaccgagcctagtgagcaggagattaaacggatcaacaagatcagaagaagacttgtgaaagacagcaacaccaagaaggccggcaagacaggccccatgaaaaccctgctggttagagtgatgacacccgatctgagagagcggctggaaaacctgagaaagaagcctgaaaatatcccccagcccatcagcaatacatctagagccaacctgaataagctgctgaccgattacaccgaaatgaagaaggcgatcctgcatgtgtactgggaagagttccagaaggaccctgtgggcctgatgagccgggtggcccagcctgccagcaagaagatcgatcagaacaagctgaaacctgagatggacgagaagggcaacctgaccaccgccggctttgcctgctctcagtgtggccagcccctgttcgtgtacaagctggagcaggtgtctgagaagggcaaggcttacaccaactacttcggacggtgcaatgtggccgagcacgaaaagctgatcctgctggcccagctgaagcccgagaaggatagcgacgaagccgtgacatatagcctgggaaagtttgggcagagggccctggatttctacagcattcatgtgaccaaggagtccacccaccccgtgaagcccctggcccagatcgccggaaacagatacgcctccggacctgtgggaaaggccctgagcgacgcatgtatgggcacaatcgcctccttcctgtctaagtaccaggacatcatcatcgaacaccagaaggtggtgaagggcaaccagaagagactggagagcctgcgggagctggccggcaaggaaaacctggaataccctagcgtgaccctgccacctcagcctcacaccaaggagggcgttgatgcctacaacgaagtgatcgcccgggtgcgaatgtgggtgaacctgaacctgtggcagaagctgaagctaagcagagatgatgccaagcctctgctgagactgaagggattcccttcctttcctctggtcgagagacaggccaacgaagtggactggtgggacatggtgtgtaacgtgaagaagctgatcaacgagaaaaaggaggatggcaaggtgttttggcagaatctggctggctacaagagacaggaagccctgagaccatacctgagcagcgaggaagatcggaagaagggaaagaaattcgctcggtaccagctgggcgacctgctgctgcacctggaaaagaagcacggcgaggactggggaaaggtgtacgacgaggcctgggagcggattgacaagaaagtggaaggcctgagcaagcacatcaagctggaagaggaacggagaagcgaggacgcccagagcaaggccgccctgaccgactggctgcgggctaaggccagcttcgtgatcgagggcctgaaggaggccgacaaggacgagttctgcagatgcgagctgaagctgcagaagtggtacggggacctgcggggaaagcccttcgccatcgaagccgagaacagcatcctggacatcagcggcttcagcaagcagtacaactgtgccttcatctggcagaaggacggcgtgaagaagctgaacctgtacctgatcatcaactacttcaagggcggcaagctgcggttcaagaagatcaaacctgaagccttcgaagccaacagattctacaccgtgatcaacaaaaagagcggcgagatcgtgcccatggaggtgaacttcaacttcgacgaccccaacctgatcatcctgcctctggcctttggcaagagacagggcagagaattcatctggaacgacctgctgtccctggaaaccggcagcctgaagctggccaacggaagagtgatcgagaagacactgtacaacagaagaacccggcaggatgagcctgccctgttcgtggccctgaccttcgagcggcgggaggtcctggactcctccaatatcaaaccaatgaacctgatcggcgtggcaagaggcgaaaacatccccgccgtgatcgccctgaccgaccccgagggctgcccactgagccggtttaaggatagcctgggaaacccaacccacatcctgagaatcggcgagagctataaggagaagcagcggaccatccaggccaagaaggaggtggagcagcggagagccggcggctacagccggaagtacgccagcaaagccaagaatctggcagacgatatggtgagaaacaccgctagagatctgctgtactacgccgtgacccaggatgccatgctgatcttcgccaacctgagccggggcttcggccggcagggcaagcggaccttcatggccgagagacagtacacacggatggaggactggctgaccgccaagctggcctacgagggcctgagcaagacctacctgtccaagacactggcccagtacacctccaagacatgcagcaactgtgggtttaccatcaccagcgccgactacgacagggtgctggagaagctgaagaagacagcaacaggctggatgaccacaattaacggcaaggagctgaaggtggagggccagattacctactacaacagatacaagagacagaacgtagtcaaggacctgtccgtcgagctggatagactgagcgaagaatctgtgaacaacgacatctcctcctggacaaagggcagaagcggagaagctctgagcctcctgaagaaaagattctcccatagacccgtgcaggagaagttcgtgtgcctgaactgcggcttcgagacacacgcagccgagcaagccgccctgaacatcgccagatcctggctgttcctgcggagccaggagtacaagaaataccagacaaacaagacaaccggcaacaccgataagagagccttcgtcgagacctggcagtccttttaccggaagaagcttaaggaggtgtggaaacctgccgtgcggtctggcggatctggcggaggctccaccagccccaagaaaaagagaaaagtctaagctgccttctgcggggcttgccttctggccatgcccttcttctctcccttgcacctgtacctcttggtctttgaataaagcctgagtaggaaggctagcaaaaaaaaaaaaaaaaaaaaaaaaaaaaaaaaaaaaaaaaaaaaaaaaaaaaaaaaaaaaaaaaaaaaaaaaaaaaaaaa

SEQ ID NO: 13688 - RNA, 5785 nt, synthetic construct
  source 1..5785: mol_type = other RNA
aggaaataagagagaaaagaagagtaagaagaaatataagagccaccatggcccctaagaagaagcgtaaagtgagccggatggaacgcctcgtctacgaggtgcggcagaagtgcagaaacatcgaggacatctgcatctcctgcggatctctgaacgtgaccctggagcacccactgttcatcggcggcatgtgccagaactgtaaaaactgttttctggagtgtgcctatcaatacgacgatgacggctaccagagctactgcaccatctgttgcggcggaagagaggtgctgatgtgtggaaataacaactgctgccggtgcttctgcgtggaatgcgtggacctgctggtgggccccggcgccgcccaggccgctattaaggaagatccttggaactgctacatgtgcggccacaagggcacatacggcctgctgagacggagagaggactggcctagcagactgcagatgttcttcgccaataaccacgaccaggagttcgacccccctaaggtgtaccctcccgtccccgccgagaagagaaagcccatccgggtcctgagcctgttcgatggcatcgccaccggtctgctggtgctgaaggacctgggcatccaggtggataggtacattgcctccgaggtgtgcgaggactccatcaccgtgggaatggtgcgtcatcagggcaagatcatgtacgtgggcgacgtgcggagcgtgacacagaagcatatccaggagtggggccctttcgacctggtgatcggcggcagcccttgcaatgacctgagcatcgtgaacccagcccggaagggcctgtacgagggaaccggcagactgttcttcgagttttacagactgctgcacgacgcccggcctaaggaaggcgacgaccggcccttcttttggctgttcgagaatgtggtggccatgggagtcagcgacaagcgggatattagccggttcctggagagcaaccccgtgatgatcgatgccaaggaagtgagcgccgcccaccgggccagatacttctggggcaatctgcctggcatgaacagacccctggccagcaccgtgaacgacaagctggagctgcaggagtgcctggagcacggccggatcgccaagttcagcaaggtgagaaccatcaccacccgaagcaacagcatcaaacaaggcaaggaccagcactttcctgtgttcatgaacgagaaggaggacatcctgtggtgtaccgagatggagagagtgttcgggttcccagtccactacacagatgtcagcaacatgtctagactggccagacagagactgctgggaagaagctggtccgtccctgtgatcagacacctgttcgcccctctgaaggagtacttcgcctgcgtgagcagcggcaacagcaacgccaacagccggggccccagcttctctagcggcctggtgccactgtccctgagagggagccacatgggccccatggagatctacaaaaccgtgagcgcctggaagcggcagcctgtgcgcgtgctgagcctgtttcggaatatcgataaagtcctgaaaagcctgggattcctggagagcggctctggctccggcggtggcaccctgaagtacgtggaggatgtgacaaacgtggtcagacgggatgtggagaagtggggccccttcgatctggtgtacggcagcacccaacccctgggcagctcttgtgaccggtgccctggctggtacatgtttcagttccaccggatcctgcagtacgccctgccgagacaggagtcccagcggccattcttttggattttcatggacaacttgctgctgaccgaggatgaccaggaaactaccactcggttcctgcagaccgaagccgtgaccctgcaggacgtgagaggccgggactaccagaacgccatgcgggtgtggtccaacatccctggactgaaaagcaagcacgcacctctgacccctaaagaagaggagtacctgcaggcccaggtgcggagcagaagcaagctggacgcccctaaggtggatctgctggtgaagaattgcctcctgcccctgagagagtacttcaagtatttcagccagaatagtctgcccctgggaggcagcggcggcggcatccagggcctgctgaccttcggcgacgtggccgtggccttcaccaggatcgagtggaggcacctggacgccgcccagagggccctgtacagggacgtgatgctggagaactacggcaacctggtgagcgtgggcctgctgagcagcaagcccaagctgatcgcccagctggagcagggcgccgagccctggatggaggtgagggaggcccccagcggcaccagggccgtgcccgactactggggcggcccaagcagcggcgcccctcctcccagcggcggcagcccagccggctccccaacctctaccgaggagggcacctctgagtccgccacccccgagagcggccctggcacctccaccgagcccagcgagggcagcgcacccggcagccctgccggcagccccacctccacagaggagggaaccagcaccgagcccagcgaaggcagcgccccaggcaccagcaccgagcctagtgagcaggagattaaacggatcaacaagatcagaagaagacttgtgaaagacagcaacaccaagaaggccggcaagacaggccccatgaaaaccctgctggttagagtgatgacacccgatctgagagagcggctggaaaacctgagaaagaagcctgaaaatatcccccagcccatcagcaatacatctagagccaacctgaataagctgctgaccgattacaccgaaatgaagaaggcgatcctgcatgtgtactgggaagagttccagaaggaccctgtgggcctgatgagccgggtggcccagcctgccagcaagaagatcgatcagaacaagctgaaacctgagatggacgagaagggcaacctgaccaccgccggctttgcctgctctcagtgtggccagcccctgttcgtgtacaagctggagcaggtgtctgagaagggcaaggcttacaccaactacttcggacggtgcaatgtggccgagcacgaaaagctgatcctgctggcccagctgaagcccgagaaggatagcgacgaagccgtgacatatagcctgggaaagtttgggcagagggccctggatttctacagcattcatgtgaccaaggagtccacccaccccgtgaagcccctggcccagatcgccggaaacagatacgcctccggacctgtgggaaaggccctgagcgacgcatgtatgggcacaatcgcctccttcctgtctaagtaccaggacatcatcatcgaacaccagaaggtggtgaagggcaaccagaagagactggagagcctgcgggagctggccggcaaggaaaacctggaataccctagcgtgaccctgccacctcagcctcacaccaaggagggcgttgatgcctacaacgaagtgatcgcccgggtgcgaatgtgggtgaacctgaacctgtggcagaagctgaagctaagcagagatgatgccaagcctctgctgagactgaagggattcccttcctttcctctggtcgagagacaggccaacgaagtggactggtgggacatggtgtgtaacgtgaagaagctgatcaacgagaaaaaggaggatggcaaggtgttttggcagaatctggctggctacaagagacaggaagccctgagaccatacctgagcagcgaggaagatcggaagaagggaaagaaattcgctcggtaccagctgggcgacctgctgctgcacctggaaaagaagcacggcgaggactggggaaaggtgtacgacgaggcctgggagcggattgacaagaaagtggaaggcctgagcaagcacatcaagctggaagaggaacggagaagcgaggacgcccagagcaaggccgccctgaccgactggctgcgggctaaggccagcttcgtgatcgagggcctgaaggaggccgacaaggacgagttctgcagatgcgagctgaagctgcagaagtggtacggggacctgcggggaaagcccttcgccatcgaagccgagaacagcatcctggacatcagcggcttcagcaagcagtacaactgtgccttcatctggcagaaggacggcgtgaagaagctgaacctgtacctgatcatcaactacttcaagggcggcaagctgcggttcaagaagatcaaacctgaagccttcgaagccaacagattctacaccgtgatcaacaaaaagagcggcgagatcgtgcccatggaggtgaacttcaacttcgacgaccccaacctgatcatcctgcctctggcctttggcaagagacagggcagagaattcatctggaacgacctgctgtccctggaaaccggcagcctgaagctggccaacggaagagtgatcgagaagacactgtacaacagaagaacccggcaggatgagcctgccctgttcgtggccctgaccttcgagcggcgggaggtcctggactcctccaatatcaaaccaatgaacctgatcggcgtggcaagaggcgaaaacatccccgccgtgatcgccctgaccgaccccgagggctgcccactgagccggtttaaggatagcctgggaaacccaacccacatcctgagaatcggcgagagctataaggagaagcagcggaccatccaggccaagaaggaggtggagcagcggagagccggcggctacagccggaagtacgccagcaaagccaagaatctggcagacgatatggtgagaaacaccgctagagatctgctgtactacgccgtgacccaggatgccatgctgatcttcgccaacctgagccggggcttcggccggcagggcaagcggaccttcatggccgagagacagtacacacggatggaggactggctgaccgccaagctggcctacgagggcctgagcaagacctacctgtccaagacactggcccagtacacctccaagacatgcagcaactgtgggtttaccatcaccagcgccgactacgacagggtgctggagaagctgaagaagacagcaacaggctggatgaccacaattaacggcaaggagctgaaggtggagggccagattacctactacaacagatacaagagacagaacgtagtcaaggacctgtccgtcgagctggatagactgagcgaagaatctgtgaacaacgacatctcctcctggacaaagggcagaagcggagaagctctgagcctcctgaagaaaagattctcccatagacccgtgcaggagaagttcgtgtgcctgaactgcggcttcgagacacacgcagccgagcaagccgccctgaacatcgccagatcctggctgttcctgcggagccaggagtacaagaaataccagacaaacaagacaaccggcaacaccgataagagagccttcgtcgagacctggcagtccttttaccggaagaagcttaaggaggtgtggaaacctgccgtgcggtctggcggatctggcggaggctccaccagccccaagaaaaagagaaaagtctaagctgccttctgcggggcttgccttctggccatgcccttcttctctcccttgcacctgtacctcttggtctttgaataaagcctgagtaggaaggctagcaaaaaaaaaaaaaaaaaaaaaaaaaaaaaaaaaaaaaaaaaaaaaaaaaaaaaaaaaaaaaaaaaaaaaaaaaaaaaaaa

SEQ ID NO: 13689 - RNA, 5785 nt, synthetic construct
  source 1..5785: mol_type = other RNA
aggaaataagagagaaaagaagagtaagaagaaatataagagccaccatggcccctaagaagaagcgtaaagtgagccggatggaacgcctcgtctacgaggtgcggcagaagtgcagaaacatcgaggacatctgcatctcctgcggatctctgaacgtgaccctggagcacccactgttcatcggcggcatgtgccagaactgtaaaaactgttttctggagtgtgcctatcaatacgacgatgacggctaccagagctactgcaccatctgttgcggcggaagagaggtgctgatgtgtggaaataacaactgctgccggtgcttctgcgtggaatgcgtggacctgctggtgggccccggcgccgcccaggccgctattaaggaagatccttggaactgctacatgtgcggccacaagggcacatacggcctgctgagacggagagaggactggcctagcagactgcagatgttcttcgccaataaccacgaccaggagttcgacccccctaaggtgtaccctcccgtccccgccgagaagagaaagcccatccgggtcctgagcctgttcgatggcatcgccaccggtctgctggtgctgaaggacctgggcatccaggtggataggtacattgcctccgaggtgtgcgaggactccatcaccgtgggaatggtgcgtcatcagggcaagatcatgtacgtgggcgacgtgcggagcgtgacacagaagcatatccaggagtggggccctttcgacctggtgatcggcggcagcccttgcaatgacctgagcatcgtgaacccagcccggaagggcctgtacgagggaaccggcagactgttcttcgagttttacagactgctgcacgacgcccggcctaaggaaggcgacgaccggcccttcttttggctgttcgagaatgtggtggccatgggagtcagcgacaagcgggatattagccggttcctggagagcaaccccgtgatgatcgatgccaaggaagtgagcgccgcccaccgggccagatacttctggggcaatctgcctggcatgaacagacccctggccagcaccgtgaacgacaagctggagctgcaggagtgcctggagcacggccggatcgccaagttcagcaaggtgagaaccatcaccacccgaagcaacagcatcaaacaaggcaaggaccagcactttcctgtgttcatgaacgagaaggaggacatcctgtggtgtaccgagatggagagagtgttcgggttcccagtccactacacagatgtcagcaacatgtctagactggccagacagagactgctgggaagaagctggtccgtccctgtgatcagacacctgttcgcccctctgaaggagtacttcgcctgcgtgagcagcggcaacagcaacgccaacagccggggccccagcttctctagcggcctggtgccactgtccctgagagggagccacatgggccccatggagatctacaaaaccgtgagcgcctggaagcggcagcctgtgcgcgtgctgagcctgtttcggaatatcgataaagtcctgaaaagcctgggattcctggagagcggctctggctccggcggtggcaccctgaagtacgtggaggatgtgacaaacgtggtcagacgggatgtggagaagtggggccccttcgatctggtgtacggcagcacccaacccctgggcagctcttgtgaccggtgccctggctggtacatgtttcagttccaccggatcctgcagtacgccctgccgagacaggagtcccagcggccattcttttggattttcatggacaacttgctgctgaccgaggatgaccaggaaactaccactcggttcctgcagaccgaagccgtgaccctgcaggacgtgagaggccgggactaccagaacgccatgcgggtgtggtccaacatccctggactgaaaagcaagcacgcacctctgacccctaaagaagaggagtacctgcaggcccaggtgcggagcagaagcaagctggacgcccctaaggtggatctgctggtgaagaattgcctcctgcccctgagagagtacttcaagtatttcagccagaatagtctgcccctgggaggcagcggcggcggcctgctgaccttcgaggacgtggccctgttcttcaccgaggaggagtggcagctgctggaccccgcccagaagatcctgtactacaacgtgatgcaggagaactacgagaccgtgaccagcctgggcctgaagctgaagaacgacaccggcaacgaccagcccatcagcctgagcaccctggagatccaggccagcggctgcaaggtgctgaggaaggccaggatgaaggtggcccagaagaccggcggcccaagcagcggcgcccctcctcccagcggcggcagcccagccggctccccaacctctaccgaggagggcacctctgagtccgccacccccgagagcggccctggcacctccaccgagcccagcgagggcagcgcacccggcagccctgccggcagccccacctccacagaggagggaaccagcaccgagcccagcgaaggcagcgccccaggcaccagcaccgagcctagtgagcaggagattaaacggatcaacaagatcagaagaagacttgtgaaagacagcaacaccaagaaggccggcaagacaggccccatgaaaaccctgctggttagagtgatgacacccgatctgagagagcggctggaaaacctgagaaagaagcctgaaaatatcccccagcccatcagcaatacatctagagccaacctgaataagctgctgaccgattacaccgaaatgaagaaggcgatcctgcatgtgtactgggaagagttccagaaggaccctgtgggcctgatgagccgggtggcccagcctgccagcaagaagatcgatcagaacaagctgaaacctgagatggacgagaagggcaacctgaccaccgccggctttgcctgctctcagtgtggccagcccctgttcgtgtacaagctggagcaggtgtctgagaagggcaaggcttacaccaactacttcggacggtgcaatgtggccgagcacgaaaagctgatcctgctggcccagctgaagcccgagaaggatagcgacgaagccgtgacatatagcctgggaaagtttgggcagagggccctggatttctacagcattcatgtgaccaaggagtccacccaccccgtgaagcccctggcccagatcgccggaaacagatacgcctccggacctgtgggaaaggccctgagcgacgcatgtatgggcacaatcgcctccttcctgtctaagtaccaggacatcatcatcgaacaccagaaggtggtgaagggcaaccagaagagactggagagcctgcgggagctggccggcaaggaaaacctggaataccctagcgtgaccctgccacctcagcctcacaccaaggagggcgttgatgcctacaacgaagtgatcgcccgggtgcgaatgtgggtgaacctgaacctgtggcagaagctgaagctaagcagagatgatgccaagcctctgctgagactgaagggattcccttcctttcctctggtcgagagacaggccaacgaagtggactggtgggacatggtgtgtaacgtgaagaagctgatcaacgagaaaaaggaggatggcaaggtgttttggcagaatctggctggctacaagagacaggaagccctgagaccatacctgagcagcgaggaagatcggaagaagggaaagaaattcgctcggtaccagctgggcgacctgctgctgcacctggaaaagaagcacggcgaggactggggaaaggtgtacgacgaggcctgggagcggattgacaagaaagtggaaggcctgagcaagcacatcaagctggaagaggaacggagaagcgaggacgcccagagcaaggccgccctgaccgactggctgcgggctaaggccagcttcgtgatcgagggcctgaaggaggccgacaaggacgagttctgcagatgcgagctgaagctgcagaagtggtacggggacctgcggggaaagcccttcgccatcgaagccgagaacagcatcctggacatcagcggcttcagcaagcagtacaactgtgccttcatctggcagaaggacggcgtgaagaagctgaacctgtacctgatcatcaactacttcaagggcggcaagctgcggttcaagaagatcaaacctgaagccttcgaagccaacagattctacaccgtgatcaacaaaaagagcggcgagatcgtgcccatggaggtgaacttcaacttcgacgaccccaacctgatcatcctgcctctggcctttggcaagagacagggcagagaattcatctggaacgacctgctgtccctggaaaccggcagcctgaagctggccaacggaagagtgatcgagaagacactgtacaacagaagaacccggcaggatgagcctgccctgttcgtggccctgaccttcgagcggcgggaggtcctggactcctccaatatcaaaccaatgaacctgatcggcgtggcaagaggcgaaaacatccccgccgtgatcgccctgaccgaccccgagggctgcccactgagccggtttaaggatagcctgggaaacccaacccacatcctgagaatcggcgagagctataaggagaagcagcggaccatccaggccaagaaggaggtggagcagcggagagccggcggctacagccggaagtacgccagcaaagccaagaatctggcagacgatatggtgagaaacaccgctagagatctgctgtactacgccgtgacccaggatgccatgctgatcttcgccaacctgagccggggcttcggccggcagggcaagcggaccttcatggccgagagacagtacacacggatggaggactggctgaccgccaagctggcctacgagggcctgagcaagacctacctgtccaagacactggcccagtacacctccaagacatgcagcaactgtgggtttaccatcaccagcgccgactacgacagggtgctggagaagctgaagaagacagcaacaggctggatgaccacaattaacggcaaggagctgaaggtggagggccagattacctactacaacagatacaagagacagaacgtagtcaaggacctgtccgtcgagctggatagactgagcgaagaatctgtgaacaacgacatctcctcctggacaaagggcagaagcggagaagctctgagcctcctgaagaaaagattctcccatagacccgtgcaggagaagttcgtgtgcctgaactgcggcttcgagacacacgcagccgagcaagccgccctgaacatcgccagatcctggctgttcctgcggagccaggagtacaagaaataccagacaaacaagacaaccggcaacaccgataagagagccttcgtcgagacctggcagtccttttaccggaagaagcttaaggaggtgtggaaacctgccgtgcggtctggcggatctggcggaggctccaccagccccaagaaaaagagaaaagtctaagctgccttctgcggggcttgccttctggccatgcccttcttctctcccttgcacctgtacctcttggtctttgaataaagcctgagtaggaaggctagcaaaaaaaaaaaaaaaaaaaaaaaaaaaaaaaaaaaaaaaaaaaaaaaaaaaaaaaaaaaaaaaaaaaaaaaaaaaaaaaa

SEQ ID NO: 13690 - RNA, 5785 nt, synthetic construct
  source 1..5785: mol_type = other RNA
aggaaataagagagaaaagaagagtaagaagaaatataagagccaccatggcccctaagaagaagcgtaaagtgagccggatggaacgcctcgtctacgaggtgcggcagaagtgcagaaacatcgaggacatctgcatctcctgcggatctctgaacgtgaccctggagcacccactgttcatcggcggcatgtgccagaactgtaaaaactgttttctggagtgtgcctatcaatacgacgatgacggctaccagagctactgcaccatctgttgcggcggaagagaggtgctgatgtgtggaaataacaactgctgccggtgcttctgcgtggaatgcgtggacctgctggtgggccccggcgccgcccaggccgctattaaggaagatccttggaactgctacatgtgcggccacaagggcacatacggcctgctgagacggagagaggactggcctagcagactgcagatgttcttcgccaataaccacgaccaggagttcgacccccctaaggtgtaccctcccgtccccgccgagaagagaaagcccatccgggtcctgagcctgttcgatggcatcgccaccggtctgctggtgctgaaggacctgggcatccaggtggataggtacattgcctccgaggtgtgcgaggactccatcaccgtgggaatggtgcgtcatcagggcaagatcatgtacgtgggcgacgtgcggagcgtgacacagaagcatatccaggagtggggccctttcgacctggtgatcggcggcagcccttgcaatgacctgagcatcgtgaacccagcccggaagggcctgtacgagggaaccggcagactgttcttcgagttttacagactgctgcacgacgcccggcctaaggaaggcgacgaccggcccttcttttggctgttcgagaatgtggtggccatgggagtcagcgacaagcgggatattagccggttcctggagagcaaccccgtgatgatcgatgccaaggaagtgagcgccgcccaccgggccagatacttctggggcaatctgcctggcatgaacagacccctggccagcaccgtgaacgacaagctggagctgcaggagtgcctggagcacggccggatcgccaagttcagcaaggtgagaaccatcaccacccgaagcaacagcatcaaacaaggcaaggaccagcactttcctgtgttcatgaacgagaaggaggacatcctgtggtgtaccgagatggagagagtgttcgggttcccagtccactacacagatgtcagcaacatgtctagactggccagacagagactgctgggaagaagctggtccgtccctgtgatcagacacctgttcgcccctctgaaggagtacttcgcctgcgtgagcagcggcaacagcaacgccaacagccggggccccagcttctctagcggcctggtgccactgtccctgagagggagccacatgggccccatggagatctacaaaaccgtgagcgcctggaagcggcagcctgtgcgcgtgctgagcctgtttcggaatatcgataaagtcctgaaaagcctgggattcctggagagcggctctggctccggcggtggcaccctgaagtacgtggaggatgtgacaaacgtggtcagacgggatgtggagaagtggggccccttcgatctggtgtacggcagcacccaacccctgggcagctcttgtgaccggtgccctggctggtacatgtttcagttccaccggatcctgcagtacgccctgccgagacaggagtcccagcggccattcttttggattttcatggacaacttgctgctgaccgaggatgaccaggaaactaccactcggttcctgcagaccgaagccgtgaccctgcaggacgtgagaggccgggactaccagaacgccatgcgggtgtggtccaacatccctggactgaaaagcaagcacgcacctctgacccctaaagaagaggagtacctgcaggcccaggtgcggagcagaagcaagctggacgcccctaaggtggatctgctggtgaagaattgcctcctgcccctgagagagtacttcaagtatttcagccagaatagtctgcccctgggaggcagcggcggcggcatccaggagctggtgaccttcaaggacgtggccgtggacttcacccaggaggagtggggcctgctgaacaacccccagaaggagctgtacaaggaggtgatgctggagaacgcccagaacatgctgagcctgggcctgcccgtgcccagggaggacctgttcagctacttcgaggagagggaggccccctggctgctggagcaggagggcctgaggagctgctgcgccgagagggagatcaggggcggcccaagcagcggcgcccctcctcccagcggcggcagcccagccggctccccaacctctaccgaggagggcacctctgagtccgccacccccgagagcggccctggcacctccaccgagcccagcgagggcagcgcacccggcagccctgccggcagccccacctccacagaggagggaaccagcaccgagcccagcgaaggcagcgccccaggcaccagcaccgagcctagtgagcaggagattaaacggatcaacaagatcagaagaagacttgtgaaagacagcaacaccaagaaggccggcaagacaggccccatgaaaaccctgctggttagagtgatgacacccgatctgagagagcggctggaaaacctgagaaagaagcctgaaaatatcccccagcccatcagcaatacatctagagccaacctgaataagctgctgaccgattacaccgaaatgaagaaggcgatcctgcatgtgtactgggaagagttccagaaggaccctgtgggcctgatgagccgggtggcccagcctgccagcaagaagatcgatcagaacaagctgaaacctgagatggacgagaagggcaacctgaccaccgccggctttgcctgctctcagtgtggccagcccctgttcgtgtacaagctggagcaggtgtctgagaagggcaaggcttacaccaactacttcggacggtgcaatgtggccgagcacgaaaagctgatcctgctggcccagctgaagcccgagaaggatagcgacgaagccgtgacatatagcctgggaaagtttgggcagagggccctggatttctacagcattcatgtgaccaaggagtccacccaccccgtgaagcccctggcccagatcgccggaaacagatacgcctccggacctgtgggaaaggccctgagcgacgcatgtatgggcacaatcgcctccttcctgtctaagtaccaggacatcatcatcgaacaccagaaggtggtgaagggcaaccagaagagactggagagcctgcgggagctggccggcaaggaaaacctggaataccctagcgtgaccctgccacctcagcctcacaccaaggagggcgttgatgcctacaacgaagtgatcgcccgggtgcgaatgtgggtgaacctgaacctgtggcagaagctgaagctaagcagagatgatgccaagcctctgctgagactgaagggattcccttcctttcctctggtcgagagacaggccaacgaagtggactggtgggacatggtgtgtaacgtgaagaagctgatcaacgagaaaaaggaggatggcaaggtgttttggcagaatctggctggctacaagagacaggaagccctgagaccatacctgagcagcgaggaagatcggaagaagggaaagaaattcgctcggtaccagctgggcgacctgctgctgcacctggaaaagaagcacggcgaggactggggaaaggtgtacgacgaggcctgggagcggattgacaagaaagtggaaggcctgagcaagcacatcaagctggaagaggaacggagaagcgaggacgcccagagcaaggccgccctgaccgactggctgcgggctaaggccagcttcgtgatcgagggcctgaaggaggccgacaaggacgagttctgcagatgcgagctgaagctgcagaagtggtacggggacctgcggggaaagcccttcgccatcgaagccgagaacagcatcctggacatcagcggcttcagcaagcagtacaactgtgccttcatctggcagaaggacggcgtgaagaagctgaacctgtacctgatcatcaactacttcaagggcggcaagctgcggttcaagaagatcaaacctgaagccttcgaagccaacagattctacaccgtgatcaacaaaaagagcggcgagatcgtgcccatggaggtgaacttcaacttcgacgaccccaacctgatcatcctgcctctggcctttggcaagagacagggcagagaattcatctggaacgacctgctgtccctggaaaccggcagcctgaagctggccaacggaagagtgatcgagaagacactgtacaacagaagaacccggcaggatgagcctgccctgttcgtggccctgaccttcgagcggcgggaggtcctggactcctccaatatcaaaccaatgaacctgatcggcgtggcaagaggcgaaaacatccccgccgtgatcgccctgaccgaccccgagggctgcccactgagccggtttaaggatagcctgggaaacccaacccacatcctgagaatcggcgagagctataaggagaagcagcggaccatccaggccaagaaggaggtggagcagcggagagccggcggctacagccggaagtacgccagcaaagccaagaatctggcagacgatatggtgagaaacaccgctagagatctgctgtactacgccgtgacccaggatgccatgctgatcttcgccaacctgagccggggcttcggccggcagggcaagcggaccttcatggccgagagacagtacacacggatggaggactggctgaccgccaagctggcctacgagggcctgagcaagacctacctgtccaagacactggcccagtacacctccaagacatgcagcaactgtgggtttaccatcaccagcgccgactacgacagggtgctggagaagctgaagaagacagcaacaggctggatgaccacaattaacggcaaggagctgaaggtggagggccagattacctactacaacagatacaagagacagaacgtagtcaaggacctgtccgtcgagctggatagactgagcgaagaatctgtgaacaacgacatctcctcctggacaaagggcagaagcggagaagctctgagcctcctgaagaaaagattctcccatagacccgtgcaggagaagttcgtgtgcctgaactgcggcttcgagacacacgcagccgagcaagccgccctgaacatcgccagatcctggctgttcctgcggagccaggagtacaagaaataccagacaaacaagacaaccggcaacaccgataagagagccttcgtcgagacctggcagtccttttaccggaagaagcttaaggaggtgtggaaacctgccgtgcggtctggcggatctggcggaggctccaccagccccaagaaaaagagaaaagtctaagctgccttctgcggggcttgccttctggccatgcccttcttctctcccttgcacctgtacctcttggtctttgaataaagcctgagtaggaaggctagcaaaaaaaaaaaaaaaaaaaaaaaaaaaaaaaaaaaaaaaaaaaaaaaaaaaaaaaaaaaaaaaaaaaaaaaaaaaaaaaa

SEQ ID NO: 13691 - RNA, 5785 nt, synthetic construct
  source 1..5785: mol_type = other RNA
aggaaataagagagaaaagaagagtaagaagaaatataagagccaccatggcccctaagaagaagcgtaaagtgagccggatggaacgcctcgtctacgaggtgcggcagaagtgcagaaacatcgaggacatctgcatctcctgcggatctctgaacgtgaccctggagcacccactgttcatcggcggcatgtgccagaactgtaaaaactgttttctggagtgtgcctatcaatacgacgatgacggctaccagagctactgcaccatctgttgcggcggaagagaggtgctgatgtgtggaaataacaactgctgccggtgcttctgcgtggaatgcgtggacctgctggtgggccccggcgccgcccaggccgctattaaggaagatccttggaactgctacatgtgcggccacaagggcacatacggcctgctgagacggagagaggactggcctagcagactgcagatgttcttcgccaataaccacgaccaggagttcgacccccctaaggtgtaccctcccgtccccgccgagaagagaaagcccatccgggtcctgagcctgttcgatggcatcgccaccggtctgctggtgctgaaggacctgggcatccaggtggataggtacattgcctccgaggtgtgcgaggactccatcaccgtgggaatggtgcgtcatcagggcaagatcatgtacgtgggcgacgtgcggagcgtgacacagaagcatatccaggagtggggccctttcgacctggtgatcggcggcagcccttgcaatgacctgagcatcgtgaacccagcccggaagggcctgtacgagggaaccggcagactgttcttcgagttttacagactgctgcacgacgcccggcctaaggaaggcgacgaccggcccttcttttggctgttcgagaatgtggtggccatgggagtcagcgacaagcgggatattagccggttcctggagagcaaccccgtgatgatcgatgccaaggaagtgagcgccgcccaccgggccagatacttctggggcaatctgcctggcatgaacagacccctggccagcaccgtgaacgacaagctggagctgcaggagtgcctggagcacggccggatcgccaagttcagcaaggtgagaaccatcaccacccgaagcaacagcatcaaacaaggcaaggaccagcactttcctgtgttcatgaacgagaaggaggacatcctgtggtgtaccgagatggagagagtgttcgggttcccagtccactacacagatgtcagcaacatgtctagactggccagacagagactgctgggaagaagctggtccgtccctgtgatcagacacctgttcgcccctctgaaggagtacttcgcctgcgtgagcagcggcaacagcaacgccaacagccggggccccagcttctctagcggcctggtgccactgtccctgagagggagccacatgggccccatggagatctacaaaaccgtgagcgcctggaagcggcagcctgtgcgcgtgctgagcctgtttcggaatatcgataaagtcctgaaaagcctgggattcctggagagcggctctggctccggcggtggcaccctgaagtacgtggaggatgtgacaaacgtggtcagacgggatgtggagaagtggggccccttcgatctggtgtacggcagcacccaacccctgggcagctcttgtgaccggtgccctggctggtacatgtttcagttccaccggatcctgcagtacgccctgccgagacaggagtcccagcggccattcttttggattttcatggacaacttgctgctgaccgaggatgaccaggaaactaccactcggttcctgcagaccgaagccgtgaccctgcaggacgtgagaggccgggactaccagaacgccatgcgggtgtggtccaacatccctggactgaaaagcaagcacgcacctctgacccctaaagaagaggagtacctgcaggcccaggtgcggagcagaagcaagctggacgcccctaaggtggatctgctggtgaagaattgcctcctgcccctgagagagtacttcaagtatttcagccagaatagtctgcccctgggaggcagcggcggcggcaggcccagggccgtgaagttcgccgacgtggccgtgtacttcagccccgaggagtgggagtgcctgaggcccgcccagagggccctgtacagggacgtgatgcaggagacctacggccacctgggcgccctgggctgcgccggccccaagcccgccctgatcagctggctggagaggaacaccaacgactgggagctggccgccctggacccccaggagtgccccaggcagatgaccgtgcagggcggcccaagcagcggcgcccctcctcccagcggcggcagcccagccggctccccaacctctaccgaggagggcacctctgagtccgccacccccgagagcggccctggcacctccaccgagcccagcgagggcagcgcacccggcagccctgccggcagccccacctccacagaggagggaaccagcaccgagcccagcgaaggcagcgccccaggcaccagcaccgagcctagtgagcaggagattaaacggatcaacaagatcagaagaagacttgtgaaagacagcaacaccaagaaggccggcaagacaggccccatgaaaaccctgctggttagagtgatgacacccgatctgagagagcggctggaaaacctgagaaagaagcctgaaaatatcccccagcccatcagcaatacatctagagccaacctgaataagctgctgaccgattacaccgaaatgaagaaggcgatcctgcatgtgtactgggaagagttccagaaggaccctgtgggcctgatgagccgggtggcccagcctgccagcaagaagatcgatcagaacaagctgaaacctgagatggacgagaagggcaacctgaccaccgccggctttgcctgctctcagtgtggccagcccctgttcgtgtacaagctggagcaggtgtctgagaagggcaaggcttacaccaactacttcggacggtgcaatgtggccgagcacgaaaagctgatcctgctggcccagctgaagcccgagaaggatagcgacgaagccgtgacatatagcctgggaaagtttgggcagagggccctggatttctacagcattcatgtgaccaaggagtccacccaccccgtgaagcccctggcccagatcgccggaaacagatacgcctccggacctgtgggaaaggccctgagcgacgcatgtatgggcacaatcgcctccttcctgtctaagtaccaggacatcatcatcgaacaccagaaggtggtgaagggcaaccagaagagactggagagcctgcgggagctggccggcaaggaaaacctggaataccctagcgtgaccctgccacctcagcctcacaccaaggagggcgttgatgcctacaacgaagtgatcgcccgggtgcgaatgtgggtgaacctgaacctgtggcagaagctgaagctaagcagagatgatgccaagcctctgctgagactgaagggattcccttcctttcctctggtcgagagacaggccaacgaagtggactggtgggacatggtgtgtaacgtgaagaagctgatcaacgagaaaaaggaggatggcaaggtgttttggcagaatctggctggctacaagagacaggaagccctgagaccatacctgagcagcgaggaagatcggaagaagggaaagaaattcgctcggtaccagctgggcgacctgctgctgcacctggaaaagaagcacggcgaggactggggaaaggtgtacgacgaggcctgggagcggattgacaagaaagtggaaggcctgagcaagcacatcaagctggaagaggaacggagaagcgaggacgcccagagcaaggccgccctgaccgactggctgcgggctaaggccagcttcgtgatcgagggcctgaaggaggccgacaaggacgagttctgcagatgcgagctgaagctgcagaagtggtacggggacctgcggggaaagcccttcgccatcgaagccgagaacagcatcctggacatcagcggcttcagcaagcagtacaactgtgccttcatctggcagaaggacggcgtgaagaagctgaacctgtacctgatcatcaactacttcaagggcggcaagctgcggttcaagaagatcaaacctgaagccttcgaagccaacagattctacaccgtgatcaacaaaaagagcggcgagatcgtgcccatggaggtgaacttcaacttcgacgaccccaacctgatcatcctgcctctggcctttggcaagagacagggcagagaattcatctggaacgacctgctgtccctggaaaccggcagcctgaagctggccaacggaagagtgatcgagaagacactgtacaacagaagaacccggcaggatgagcctgccctgttcgtggccctgaccttcgagcggcgggaggtcctggactcctccaatatcaaaccaatgaacctgatcggcgtggcaagaggcgaaaacatccccgccgtgatcgccctgaccgaccccgagggctgcccactgagccggtttaaggatagcctgggaaacccaacccacatcctgagaatcggcgagagctataaggagaagcagcggaccatccaggccaagaaggaggtggagcagcggagagccggcggctacagccggaagtacgccagcaaagccaagaatctggcagacgatatggtgagaaacaccgctagagatctgctgtactacgccgtgacccaggatgccatgctgatcttcgccaacctgagccggggcttcggccggcagggcaagcggaccttcatggccgagagacagtacacacggatggaggactggctgaccgccaagctggcctacgagggcctgagcaagacctacctgtccaagacactggcccagtacacctccaagacatgcagcaactgtgggtttaccatcaccagcgccgactacgacagggtgctggagaagctgaagaagacagcaacaggctggatgaccacaattaacggcaaggagctgaaggtggagggccagattacctactacaacagatacaagagacagaacgtagtcaaggacctgtccgtcgagctggatagactgagcgaagaatctgtgaacaacgacatctcctcctggacaaagggcagaagcggagaagctctgagcctcctgaagaaaagattctcccatagacccgtgcaggagaagttcgtgtgcctgaactgcggcttcgagacacacgcagccgagcaagccgccctgaacatcgccagatcctggctgttcctgcggagccaggagtacaagaaataccagacaaacaagacaaccggcaacaccgataagagagccttcgtcgagacctggcagtccttttaccggaagaagcttaaggaggtgtggaaacctgccgtgcggtctggcggatctggcggaggctccaccagccccaagaaaaagagaaaagtctaagctgccttctgcggggcttgccttctggccatgcccttcttctctcccttgcacctgtacctcttggtctttgaataaagcctgagtaggaaggctagcaaaaaaaaaaaaaaaaaaaaaaaaaaaaaaaaaaaaaaaaaaaaaaaaaaaaaaaaaaaaaaaaaaaaaaaaaaaaaaaa

SEQ ID NO: 13692 - RNA, 5785 nt, synthetic construct
  source 1..5785: mol_type = other RNA
aggaaataagagagaaaagaagagtaagaagaaatataagagccaccatggcccctaagaagaagcgtaaagtgagccggatggaacgcctcgtctacgaggtgcggcagaagtgcagaaacatcgaggacatctgcatctcctgcggatctctgaacgtgaccctggagcacccactgttcatcggcggcatgtgccagaactgtaaaaactgttttctggagtgtgcctatcaatacgacgatgacggctaccagagctactgcaccatctgttgcggcggaagagaggtgctgatgtgtggaaataacaactgctgccggtgcttctgcgtggaatgcgtggacctgctggtgggccccggcgccgcccaggccgctattaaggaagatccttggaactgctacatgtgcggccacaagggcacatacggcctgctgagacggagagaggactggcctagcagactgcagatgttcttcgccaataaccacgaccaggagttcgacccccctaaggtgtaccctcccgtccccgccgagaagagaaagcccatccgggtcctgagcctgttcgatggcatcgccaccggtctgctggtgctgaaggacctgggcatccaggtggataggtacattgcctccgaggtgtgcgaggactccatcaccgtgggaatggtgcgtcatcagggcaagatcatgtacgtgggcgacgtgcggagcgtgacacagaagcatatccaggagtggggccctttcgacctggtgatcggcggcagcccttgcaatgacctgagcatcgtgaacccagcccggaagggcctgtacgagggaaccggcagactgttcttcgagttttacagactgctgcacgacgcccggcctaaggaaggcgacgaccggcccttcttttggctgttcgagaatgtggtggccatgggagtcagcgacaagcgggatattagccggttcctggagagcaaccccgtgatgatcgatgccaaggaagtgagcgccgcccaccgggccagatacttctggggcaatctgcctggcatgaacagacccctggccagcaccgtgaacgacaagctggagctgcaggagtgcctggagcacggccggatcgccaagttcagcaaggtgagaaccatcaccacccgaagcaacagcatcaaacaaggcaaggaccagcactttcctgtgttcatgaacgagaaggaggacatcctgtggtgtaccgagatggagagagtgttcgggttcccagtccactacacagatgtcagcaacatgtctagactggccagacagagactgctgggaagaagctggtccgtccctgtgatcagacacctgttcgcccctctgaaggagtacttcgcctgcgtgagcagcggcaacagcaacgccaacagccggggccccagcttctctagcggcctggtgccactgtccctgagagggagccacatgggccccatggagatctacaaaaccgtgagcgcctggaagcggcagcctgtgcgcgtgctgagcctgtttcggaatatcgataaagtcctgaaaagcctgggattcctggagagcggctctggctccggcggtggcaccctgaagtacgtggaggatgtgacaaacgtggtcagacgggatgtggagaagtggggccccttcgatctggtgtacggcagcacccaacccctgggcagctcttgtgaccggtgccctggctggtacatgtttcagttccaccggatcctgcagtacgccctgccgagacaggagtcccagcggccattcttttggattttcatggacaacttgctgctgaccgaggatgaccaggaaactaccactcggttcctgcagaccgaagccgtgaccctgcaggacgtgagaggccgggactaccagaacgccatgcgggtgtggtccaacatccctggactgaaaagcaagcacgcacctctgacccctaaagaagaggagtacctgcaggcccaggtgcggagcagaagcaagctggacgcccctaaggtggatctgctggtgaagaattgcctcctgcccctgagagagtacttcaagtatttcagccagaatagtctgcccctgggaggcagcggcggcggcatgcccgtgaccttcgaggacgtggccgtgaccttcacccaggaggagtggggccagctggaccccgcccagaggaccctgtaccaggaggtgatgctggagacctgcggcctgctggtgagcctgggctgccccctgcccaagcccgagctgttctaccccctggaccacagccccgagctgcacaccctgaagaggggcctgagccccaacagctgccccggcgacagcaccaagcccggcggcggcccaagcagcggcgcccctcctcccagcggcggcagcccagccggctccccaacctctaccgaggagggcacctctgagtccgccacccccgagagcggccctggcacctccaccgagcccagcgagggcagcgcacccggcagccctgccggcagccccacctccacagaggagggaaccagcaccgagcccagcgaaggcagcgccccaggcaccagcaccgagcctagtgagcaggagattaaacggatcaacaagatcagaagaagacttgtgaaagacagcaacaccaagaaggccggcaagacaggccccatgaaaaccctgctggttagagtgatgacacccgatctgagagagcggctggaaaacctgagaaagaagcctgaaaatatcccccagcccatcagcaatacatctagagccaacctgaataagctgctgaccgattacaccgaaatgaagaaggcgatcctgcatgtgtactgggaagagttccagaaggaccctgtgggcctgatgagccgggtggcccagcctgccagcaagaagatcgatcagaacaagctgaaacctgagatggacgagaagggcaacctgaccaccgccggctttgcctgctctcagtgtggccagcccctgttcgtgtacaagctggagcaggtgtctgagaagggcaaggcttacaccaactacttcggacggtgcaatgtggccgagcacgaaaagctgatcctgctggcccagctgaagcccgagaaggatagcgacgaagccgtgacatatagcctgggaaagtttgggcagagggccctggatttctacagcattcatgtgaccaaggagtccacccaccccgtgaagcccctggcccagatcgccggaaacagatacgcctccggacctgtgggaaaggccctgagcgacgcatgtatgggcacaatcgcctccttcctgtctaagtaccaggacatcatcatcgaacaccagaaggtggtgaagggcaaccagaagagactggagagcctgcgggagctggccggcaaggaaaacctggaataccctagcgtgaccctgccacctcagcctcacaccaaggagggcgttgatgcctacaacgaagtgatcgcccgggtgcgaatgtgggtgaacctgaacctgtggcagaagctgaagctaagcagagatgatgccaagcctctgctgagactgaagggattcccttcctttcctctggtcgagagacaggccaacgaagtggactggtgggacatggtgtgtaacgtgaagaagctgatcaacgagaaaaaggaggatggcaaggtgttttggcagaatctggctggctacaagagacaggaagccctgagaccatacctgagcagcgaggaagatcggaagaagggaaagaaattcgctcggtaccagctgggcgacctgctgctgcacctggaaaagaagcacggcgaggactggggaaaggtgtacgacgaggcctgggagcggattgacaagaaagtggaaggcctgagcaagcacatcaagctggaagaggaacggagaagcgaggacgcccagagcaaggccgccctgaccgactggctgcgggctaaggccagcttcgtgatcgagggcctgaaggaggccgacaaggacgagttctgcagatgcgagctgaagctgcagaagtggtacggggacctgcggggaaagcccttcgccatcgaagccgagaacagcatcctggacatcagcggcttcagcaagcagtacaactgtgccttcatctggcagaaggacggcgtgaagaagctgaacctgtacctgatcatcaactacttcaagggcggcaagctgcggttcaagaagatcaaacctgaagccttcgaagccaacagattctacaccgtgatcaacaaaaagagcggcgagatcgtgcccatggaggtgaacttcaacttcgacgaccccaacctgatcatcctgcctctggcctttggcaagagacagggcagagaattcatctggaacgacctgctgtccctggaaaccggcagcctgaagctggccaacggaagagtgatcgagaagacactgtacaacagaagaacccggcaggatgagcctgccctgttcgtggccctgaccttcgagcggcgggaggtcctggactcctccaatatcaaaccaatgaacctgatcggcgtggcaagaggcgaaaacatccccgccgtgatcgccctgaccgaccccgagggctgcccactgagccggtttaaggatagcctgggaaacccaacccacatcctgagaatcggcgagagctataaggagaagcagcggaccatccaggccaagaaggaggtggagcagcggagagccggcggctacagccggaagtacgccagcaaagccaagaatctggcagacgatatggtgagaaacaccgctagagatctgctgtactacgccgtgacccaggatgccatgctgatcttcgccaacctgagccggggcttcggccggcagggcaagcggaccttcatggccgagagacagtacacacggatggaggactggctgaccgccaagctggcctacgagggcctgagcaagacctacctgtccaagacactggcccagtacacctccaagacatgcagcaactgtgggtttaccatcaccagcgccgactacgacagggtgctggagaagctgaagaagacagcaacaggctggatgaccacaattaacggcaaggagctgaaggtggagggccagattacctactacaacagatacaagagacagaacgtagtcaaggacctgtccgtcgagctggatagactgagcgaagaatctgtgaacaacgacatctcctcctggacaaagggcagaagcggagaagctctgagcctcctgaagaaaagattctcccatagacccgtgcaggagaagttcgtgtgcctgaactgcggcttcgagacacacgcagccgagcaagccgccctgaacatcgccagatcctggctgttcctgcggagccaggagtacaagaaataccagacaaacaagacaaccggcaacaccgataagagagccttcgtcgagacctggcagtccttttaccggaagaagcttaaggaggtgtggaaacctgccgtgcggtctggcggatctggcggaggctccaccagccccaagaaaaagagaaaagtctaagctgccttctgcggggcttgccttctggccatgcccttcttctctcccttgcacctgtacctcttggtctttgaataaagcctgagtaggaaggctagcaaaaaaaaaaaaaaaaaaaaaaaaaaaaaaaaaaaaaaaaaaaaaaaaaaaaaaaaaaaaaaaaaaaaaaaaaaaaaaaa

SEQ ID NO: 13693 - RNA, 5803 nt, synthetic construct
  source 1..5803: mol_type = other RNA
aggaaataagagagaaaagaagagtaagaagaaatataagagccaccatggcccctaagaagaagcgtaaagtgagccggatggaacgcctcgtctacgaggtgcggcagaagtgcagaaacatcgaggacatctgcatctcctgcggatctctgaacgtgaccctggagcacccactgttcatcggcggcatgtgccagaactgtaaaaactgttttctggagtgtgcctatcaatacgacgatgacggctaccagagctactgcaccatctgttgcggcggaagagaggtgctgatgtgtggaaataacaactgctgccggtgcttctgcgtggaatgcgtggacctgctggtgggccccggcgccgcccaggccgctattaaggaagatccttggaactgctacatgtgcggccacaagggcacatacggcctgctgagacggagagaggactggcctagcagactgcagatgttcttcgccaataaccacgaccaggagttcgacccccctaaggtgtaccctcccgtccccgccgagaagagaaagcccatccgggtcctgagcctgttcgatggcatcgccaccggtctgctggtgctgaaggacctgggcatccaggtggataggtacattgcctccgaggtgtgcgaggactccatcaccgtgggaatggtgcgtcatcagggcaagatcatgtacgtgggcgacgtgcggagcgtgacacagaagcatatccaggagtggggccctttcgacctggtgatcggcggcagcccttgcaatgacctgagcatcgtgaacccagcccggaagggcctgtacgagggaaccggcagactgttcttcgagttttacagactgctgcacgacgcccggcctaaggaaggcgacgaccggcccttcttttggctgttcgagaatgtggtggccatgggagtcagcgacaagcgggatattagccggttcctggagagcaaccccgtgatgatcgatgccaaggaagtgagcgccgcccaccgggccagatacttctggggcaatctgcctggcatgaacagacccctggccagcaccgtgaacgacaagctggagctgcaggagtgcctggagcacggccggatcgccaagttcagcaaggtgagaaccatcaccacccgaagcaacagcatcaaacaaggcaaggaccagcactttcctgtgttcatgaacgagaaggaggacatcctgtggtgtaccgagatggagagagtgttcgggttcccagtccactacacagatgtcagcaacatgtctagactggccagacagagactgctgggaagaagctggtccgtccctgtgatcagacacctgttcgcccctctgaaggagtacttcgcctgcgtgagcagcggcaacagcaacgccaacagccggggccccagcttctctagcggcctggtgccactgtccctgagagggagccacatgggccccatggagatctacaaaaccgtgagcgcctggaagcggcagcctgtgcgcgtgctgagcctgtttcggaatatcgataaagtcctgaaaagcctgggattcctggagagcggctctggctccggcggtggcaccctgaagtacgtggaggatgtgacaaacgtggtcagacgggatgtggagaagtggggccccttcgatctggtgtacggcagcacccaacccctgggcagctcttgtgaccggtgccctggctggtacatgtttcagttccaccggatcctgcagtacgccctgccgagacaggagtcccagcggccattcttttggattttcatggacaacttgctgctgaccgaggatgaccaggaaactaccactcggttcctgcagaccgaagccgtgaccctgcaggacgtgagaggccgggactaccagaacgccatgcgggtgtggtccaacatccctggactgaaaagcaagcacgcacctctgacccctaaagaagaggagtacctgcaggcccaggtgcggagcagaagcaagctggacgcccctaaggtggatctgctggtgaagaattgcctcctgcccctgagagagtacttcaagtatttcagccagaatagtctgcccctgggaggcagcggcggcggcgtggccttcgaggacgtggccgtgaacttcacccaggaggagtgggccctgctgaacagcagccagaagaacctgtacagggaggtgatgcaggagacctgcaggaacctggccagcgtgggcagcaagtggaaggaccagaacatcgaggaccacttcgagaagcccggcaagaacatcaggaagcacatggtgcagaagctgtgcgagagcaaggagggcagccagtacggcgaggtggtgagccagatccccaacctgggcggcccaagcagcggcgcccctcctcccagcggcggcagcccagccggctccccaacctctaccgaggagggcacctctgagtccgccacccccgagagcggccctggcacctccaccgagcccagcgagggcagcgcacccggcagccctgccggcagccccacctccacagaggagggaaccagcaccgagcccagcgaaggcagcgccccaggcaccagcaccgagcctagtgagcaggagattaaacggatcaacaagatcagaagaagacttgtgaaagacagcaacaccaagaaggccggcaagacaggccccatgaaaaccctgctggttagagtgatgacacccgatctgagagagcggctggaaaacctgagaaagaagcctgaaaatatcccccagcccatcagcaatacatctagagccaacctgaataagctgctgaccgattacaccgaaatgaagaaggcgatcctgcatgtgtactgggaagagttccagaaggaccctgtgggcctgatgagccgggtggcccagcctgccagcaagaagatcgatcagaacaagctgaaacctgagatggacgagaagggcaacctgaccaccgccggctttgcctgctctcagtgtggccagcccctgttcgtgtacaagctggagcaggtgtctgagaagggcaaggcttacaccaactacttcggacggtgcaatgtggccgagcacgaaaagctgatcctgctggcccagctgaagcccgagaaggatagcgacgaagccgtgacatatagcctgggaaagtttgggcagagggccctggatttctacagcattcatgtgaccaaggagtccacccaccccgtgaagcccctggcccagatcgccggaaacagatacgcctccggacctgtgggaaaggccctgagcgacgcatgtatgggcacaatcgcctccttcctgtctaagtaccaggacatcatcatcgaacaccagaaggtggtgaagggcaaccagaagagactggagagcctgcgggagctggccggcaaggaaaacctggaataccctagcgtgaccctgccacctcagcctcacaccaaggagggcgttgatgcctacaacgaagtgatcgcccgggtgcgaatgtgggtgaacctgaacctgtggcagaagctgaagctaagcagagatgatgccaagcctctgctgagactgaagggattcccttcctttcctctggtcgagagacaggccaacgaagtggactggtgggacatggtgtgtaacgtgaagaagctgatcaacgagaaaaaggaggatggcaaggtgttttggcagaatctggctggctacaagagacaggaagccctgagaccatacctgagcagcgaggaagatcggaagaagggaaagaaattcgctcggtaccagctgggcgacctgctgctgcacctggaaaagaagcacggcgaggactggggaaaggtgtacgacgaggcctgggagcggattgacaagaaagtggaaggcctgagcaagcacatcaagctggaagaggaacggagaagcgaggacgcccagagcaaggccgccctgaccgactggctgcgggctaaggccagcttcgtgatcgagggcctgaaggaggccgacaaggacgagttctgcagatgcgagctgaagctgcagaagtggtacggggacctgcggggaaagcccttcgccatcgaagccgagaacagcatcctggacatcagcggcttcagcaagcagtacaactgtgccttcatctggcagaaggacggcgtgaagaagctgaacctgtacctgatcatcaactacttcaagggcggcaagctgcggttcaagaagatcaaacctgaagccttcgaagccaacagattctacaccgtgatcaacaaaaagagcggcgagatcgtgcccatggaggtgaacttcaacttcgacgaccccaacctgatcatcctgcctctggcctttggcaagagacagggcagagaattcatctggaacgacctgctgtccctggaaaccggcagcctgaagctggccaacggaagagtgatcgagaagacactgtacaacagaagaacccggcaggatgagcctgccctgttcgtggccctgaccttcgagcggcgggaggtcctggactcctccaatatcaaaccaatgaacctgatcggcgtggcaagaggcgaaaacatccccgccgtgatcgccctgaccgaccccgagggctgcccactgagccggtttaaggatagcctgggaaacccaacccacatcctgagaatcggcgagagctataaggagaagcagcggaccatccaggccaagaaggaggtggagcagcggagagccggcggctacagccggaagtacgccagcaaagccaagaatctggcagacgatatggtgagaaacaccgctagagatctgctgtactacgccgtgacccaggatgccatgctgatcttcgccaacctgagccggggcttcggccggcagggcaagcggaccttcatggccgagagacagtacacacggatggaggactggctgaccgccaagctggcctacgagggcctgagcaagacctacctgtccaagacactggcccagtacacctccaagacatgcagcaactgtgggtttaccatcaccagcgccgactacgacagggtgctggagaagctgaagaagacagcaacaggctggatgaccacaattaacggcaaggagctgaaggtggagggccagattacctactacaacagatacaagagacagaacgtagtcaaggacctgtccgtcgagctggatagactgagcgaagaatctgtgaacaacgacatctcctcctggacaaagggcagaagcggagaagctctgagcctcctgaagaaaagattctcccatagacccgtgcaggagaagttcgtgtgcctgaactgcggcttcgagacacacgcagccgagcaagccgccctgaacatcgccagatcctggctgttcctgcggagccaggagtacaagaaataccagacaaacaagacaaccggcaacaccgataagagagccttcgtcgagacctggcagtccttttaccggaagaagcttaaggaggtgtggaaacctgccgtgcggtctggcggatctggcggaggctccaccagccccaagaaaaagagaaaagtctaagctgccttctgcggggcttgccttctggccatgcccttcttctctcccttgcacctgtacctcttggtctttgaataaagcctgagtaggaaggctagcaaaaaaaaaaaaaaaaaaaaaaaaaaaaaaaaaaaaaaaaaaaaaaaaaaaaaaaaaaaaaaaaaaaaaaaaaaaaaaaa

SEQ ID NO: 13694 - RNA, 5794 nt, synthetic construct
  source 1..5794: mol_type = other RNA
aggaaataagagagaaaagaagagtaagaagaaatataagagccaccatggcccctaagaagaagcgtaaagtgagccggatggaacgcctcgtctacgaggtgcggcagaagtgcagaaacatcgaggacatctgcatctcctgcggatctctgaacgtgaccctggagcacccactgttcatcggcggcatgtgccagaactgtaaaaactgttttctggagtgtgcctatcaatacgacgatgacggctaccagagctactgcaccatctgttgcggcggaagagaggtgctgatgtgtggaaataacaactgctgccggtgcttctgcgtggaatgcgtggacctgctggtgggccccggcgccgcccaggccgctattaaggaagatccttggaactgctacatgtgcggccacaagggcacatacggcctgctgagacggagagaggactggcctagcagactgcagatgttcttcgccaataaccacgaccaggagttcgacccccctaaggtgtaccctcccgtccccgccgagaagagaaagcccatccgggtcctgagcctgttcgatggcatcgccaccggtctgctggtgctgaaggacctgggcatccaggtggataggtacattgcctccgaggtgtgcgaggactccatcaccgtgggaatggtgcgtcatcagggcaagatcatgtacgtgggcgacgtgcggagcgtgacacagaagcatatccaggagtggggccctttcgacctggtgatcggcggcagcccttgcaatgacctgagcatcgtgaacccagcccggaagggcctgtacgagggaaccggcagactgttcttcgagttttacagactgctgcacgacgcccggcctaaggaaggcgacgaccggcccttcttttggctgttcgagaatgtggtggccatgggagtcagcgacaagcgggatattagccggttcctggagagcaaccccgtgatgatcgatgccaaggaagtgagcgccgcccaccgggccagatacttctggggcaatctgcctggcatgaacagacccctggccagcaccgtgaacgacaagctggagctgcaggagtgcctggagcacggccggatcgccaagttcagcaaggtgagaaccatcaccacccgaagcaacagcatcaaacaaggcaaggaccagcactttcctgtgttcatgaacgagaaggaggacatcctgtggtgtaccgagatggagagagtgttcgggttcccagtccactacacagatgtcagcaacatgtctagactggccagacagagactgctgggaagaagctggtccgtccctgtgatcagacacctgttcgcccctctgaaggagtacttcgcctgcgtgagcagcggcaacagcaacgccaacagccggggccccagcttctctagcggcctggtgccactgtccctgagagggagccacatgggccccatggagatctacaaaaccgtgagcgcctggaagcggcagcctgtgcgcgtgctgagcctgtttcggaatatcgataaagtcctgaaaagcctgggattcctggagagcggctctggctccggcggtggcaccctgaagtacgtggaggatgtgacaaacgtggtcagacgggatgtggagaagtggggccccttcgatctggtgtacggcagcacccaacccctgggcagctcttgtgaccggtgccctggctggtacatgtttcagttccaccggatcctgcagtacgccctgccgagacaggagtcccagcggccattcttttggattttcatggacaacttgctgctgaccgaggatgaccaggaaactaccactcggttcctgcagaccgaagccgtgaccctgcaggacgtgagaggccgggactaccagaacgccatgcgggtgtggtccaacatccctggactgaaaagcaagcacgcacctctgacccctaaagaagaggagtacctgcaggcccaggtgcggagcagaagcaagctggacgcccctaaggtggatctgctggtgaagaattgcctcctgcccctgagagagtacttcaagtatttcagccagaatagtctgcccctgggaggcagcggcggcggcctgaccttcgaggacgtggccgtgtacttcagcgaggaggagtggcagctgctggacccccccgagaagaccctgtacaacgacgtgatgcaggacatctacgagaccgtgatcagcctgggcctgaagctgaagaacgacaccggcaacgaccaccccatcagcgtgagcaccagcgagatccagaccagcggctgcaaggtgagcaagaagaccaggatgaagatcgcccagaagaccatgggcagggagggcggcccaagcagcggcgcccctcctcccagcggcggcagcccagccggctccccaacctctaccgaggagggcacctctgagtccgccacccccgagagcggccctggcacctccaccgagcccagcgagggcagcgcacccggcagccctgccggcagccccacctccacagaggagggaaccagcaccgagcccagcgaaggcagcgccccaggcaccagcaccgagcctagtgagcaggagattaaacggatcaacaagatcagaagaagacttgtgaaagacagcaacaccaagaaggccggcaagacaggccccatgaaaaccctgctggttagagtgatgacacccgatctgagagagcggctggaaaacctgagaaagaagcctgaaaatatcccccagcccatcagcaatacatctagagccaacctgaataagctgctgaccgattacaccgaaatgaagaaggcgatcctgcatgtgtactgggaagagttccagaaggaccctgtgggcctgatgagccgggtggcccagcctgccagcaagaagatcgatcagaacaagctgaaacctgagatggacgagaagggcaacctgaccaccgccggctttgcctgctctcagtgtggccagcccctgttcgtgtacaagctggagcaggtgtctgagaagggcaaggcttacaccaactacttcggacggtgcaatgtggccgagcacgaaaagctgatcctgctggcccagctgaagcccgagaaggatagcgacgaagccgtgacatatagcctgggaaagtttgggcagagggccctggatttctacagcattcatgtgaccaaggagtccacccaccccgtgaagcccctggcccagatcgccggaaacagatacgcctccggacctgtgggaaaggccctgagcgacgcatgtatgggcacaatcgcctccttcctgtctaagtaccaggacatcatcatcgaacaccagaaggtggtgaagggcaaccagaagagactggagagcctgcgggagctggccggcaaggaaaacctggaataccctagcgtgaccctgccacctcagcctcacaccaaggagggcgttgatgcctacaacgaagtgatcgcccgggtgcgaatgtgggtgaacctgaacctgtggcagaagctgaagctaagcagagatgatgccaagcctctgctgagactgaagggattcccttcctttcctctggtcgagagacaggccaacgaagtggactggtgggacatggtgtgtaacgtgaagaagctgatcaacgagaaaaaggaggatggcaaggtgttttggcagaatctggctggctacaagagacaggaagccctgagaccatacctgagcagcgaggaagatcggaagaagggaaagaaattcgctcggtaccagctgggcgacctgctgctgcacctggaaaagaagcacggcgaggactggggaaaggtgtacgacgaggcctgggagcggattgacaagaaagtggaaggcctgagcaagcacatcaagctggaagaggaacggagaagcgaggacgcccagagcaaggccgccctgaccgactggctgcgggctaaggccagcttcgtgatcgagggcctgaaggaggccgacaaggacgagttctgcagatgcgagctgaagctgcagaagtggtacggggacctgcggggaaagcccttcgccatcgaagccgagaacagcatcctggacatcagcggcttcagcaagcagtacaactgtgccttcatctggcagaaggacggcgtgaagaagctgaacctgtacctgatcatcaactacttcaagggcggcaagctgcggttcaagaagatcaaacctgaagccttcgaagccaacagattctacaccgtgatcaacaaaaagagcggcgagatcgtgcccatggaggtgaacttcaacttcgacgaccccaacctgatcatcctgcctctggcctttggcaagagacagggcagagaattcatctggaacgacctgctgtccctggaaaccggcagcctgaagctggccaacggaagagtgatcgagaagacactgtacaacagaagaacccggcaggatgagcctgccctgttcgtggccctgaccttcgagcggcgggaggtcctggactcctccaatatcaaaccaatgaacctgatcggcgtggcaagaggcgaaaacatccccgccgtgatcgccctgaccgaccccgagggctgcccactgagccggtttaaggatagcctgggaaacccaacccacatcctgagaatcggcgagagctataaggagaagcagcggaccatccaggccaagaaggaggtggagcagcggagagccggcggctacagccggaagtacgccagcaaagccaagaatctggcagacgatatggtgagaaacaccgctagagatctgctgtactacgccgtgacccaggatgccatgctgatcttcgccaacctgagccggggcttcggccggcagggcaagcggaccttcatggccgagagacagtacacacggatggaggactggctgaccgccaagctggcctacgagggcctgagcaagacctacctgtccaagacactggcccagtacacctccaagacatgcagcaactgtgggtttaccatcaccagcgccgactacgacagggtgctggagaagctgaagaagacagcaacaggctggatgaccacaattaacggcaaggagctgaaggtggagggccagattacctactacaacagatacaagagacagaacgtagtcaaggacctgtccgtcgagctggatagactgagcgaagaatctgtgaacaacgacatctcctcctggacaaagggcagaagcggagaagctctgagcctcctgaagaaaagattctcccatagacccgtgcaggagaagttcgtgtgcctgaactgcggcttcgagacacacgcagccgagcaagccgccctgaacatcgccagatcctggctgttcctgcggagccaggagtacaagaaataccagacaaacaagacaaccggcaacaccgataagagagccttcgtcgagacctggcagtccttttaccggaagaagcttaaggaggtgtggaaacctgccgtgcggtctggcggatctggcggaggctccaccagccccaagaaaaagagaaaagtctaagctgccttctgcggggcttgccttctggccatgcccttcttctctcccttgcacctgtacctcttggtctttgaataaagcctgagtaggaaggctagcaaaaaaaaaaaaaaaaaaaaaaaaaaaaaaaaaaaaaaaaaaaaaaaaaaaaaaaaaaaaaaaaaaaaaaaaaaaaaaaa

SEQ ID NO: 13695 - RNA, 5785 nt, synthetic construct
  source 1..5785: mol_type = other RNA
aggaaataagagagaaaagaagagtaagaagaaatataagagccaccatggcccctaagaagaagcgtaaagtgagccggatggaacgcctcgtctacgaggtgcggcagaagtgcagaaacatcgaggacatctgcatctcctgcggatctctgaacgtgaccctggagcacccactgttcatcggcggcatgtgccagaactgtaaaaactgttttctggagtgtgcctatcaatacgacgatgacggctaccagagctactgcaccatctgttgcggcggaagagaggtgctgatgtgtggaaataacaactgctgccggtgcttctgcgtggaatgcgtggacctgctggtgggccccggcgccgcccaggccgctattaaggaagatccttggaactgctacatgtgcggccacaagggcacatacggcctgctgagacggagagaggactggcctagcagactgcagatgttcttcgccaataaccacgaccaggagttcgacccccctaaggtgtaccctcccgtccccgccgagaagagaaagcccatccgggtcctgagcctgttcgatggcatcgccaccggtctgctggtgctgaaggacctgggcatccaggtggataggtacattgcctccgaggtgtgcgaggactccatcaccgtgggaatggtgcgtcatcagggcaagatcatgtacgtgggcgacgtgcggagcgtgacacagaagcatatccaggagtggggccctttcgacctggtgatcggcggcagcccttgcaatgacctgagcatcgtgaacccagcccggaagggcctgtacgagggaaccggcagactgttcttcgagttttacagactgctgcacgacgcccggcctaaggaaggcgacgaccggcccttcttttggctgttcgagaatgtggtggccatgggagtcagcgacaagcgggatattagccggttcctggagagcaaccccgtgatgatcgatgccaaggaagtgagcgccgcccaccgggccagatacttctggggcaatctgcctggcatgaacagacccctggccagcaccgtgaacgacaagctggagctgcaggagtgcctggagcacggccggatcgccaagttcagcaaggtgagaaccatcaccacccgaagcaacagcatcaaacaaggcaaggaccagcactttcctgtgttcatgaacgagaaggaggacatcctgtggtgtaccgagatggagagagtgttcgggttcccagtccactacacagatgtcagcaacatgtctagactggccagacagagactgctgggaagaagctggtccgtccctgtgatcagacacctgttcgcccctctgaaggagtacttcgcctgcgtgagcagcggcaacagcaacgccaacagccggggccccagcttctctagcggcctggtgccactgtccctgagagggagccacatgggccccatggagatctacaaaaccgtgagcgcctggaagcggcagcctgtgcgcgtgctgagcctgtttcggaatatcgataaagtcctgaaaagcctgggattcctggagagcggctctggctccggcggtggcaccctgaagtacgtggaggatgtgacaaacgtggtcagacgggatgtggagaagtggggccccttcgatctggtgtacggcagcacccaacccctgggcagctcttgtgaccggtgccctggctggtacatgtttcagttccaccggatcctgcagtacgccctgccgagacaggagtcccagcggccattcttttggattttcatggacaacttgctgctgaccgaggatgaccaggaaactaccactcggttcctgcagaccgaagccgtgaccctgcaggacgtgagaggccgggactaccagaacgccatgcgggtgtggtccaacatccctggactgaaaagcaagcacgcacctctgacccctaaagaagaggagtacctgcaggcccaggtgcggagcagaagcaagctggacgcccctaaggtggatctgctggtgaagaattgcctcctgcccctgagagagtacttcaagtatttcagccagaatagtctgcccctgggaggcagcggcggcggcatgagccaggtgaccttcagcgacgtggccatcgacttcagccacgaggagtgggcctgcctggacagcgcccagagggacctgtacaaggacgtgatggtgcagaactacgagaacctggtgagcgtgggcctgagcatcaccaagccctacgtgatcatgctgctggaggacggcaaggagccctggatgatggagaagaagctgagcaaggtgtaccccttccccctgagccacagcgtgggcggcccaagcagcggcgcccctcctcccagcggcggcagcccagccggctccccaacctctaccgaggagggcacctctgagtccgccacccccgagagcggccctggcacctccaccgagcccagcgagggcagcgcacccggcagccctgccggcagccccacctccacagaggagggaaccagcaccgagcccagcgaaggcagcgccccaggcaccagcaccgagcctagtgagcaggagattaaacggatcaacaagatcagaagaagacttgtgaaagacagcaacaccaagaaggccggcaagacaggccccatgaaaaccctgctggttagagtgatgacacccgatctgagagagcggctggaaaacctgagaaagaagcctgaaaatatcccccagcccatcagcaatacatctagagccaacctgaataagctgctgaccgattacaccgaaatgaagaaggcgatcctgcatgtgtactgggaagagttccagaaggaccctgtgggcctgatgagccgggtggcccagcctgccagcaagaagatcgatcagaacaagctgaaacctgagatggacgagaagggcaacctgaccaccgccggctttgcctgctctcagtgtggccagcccctgttcgtgtacaagctggagcaggtgtctgagaagggcaaggcttacaccaactacttcggacggtgcaatgtggccgagcacgaaaagctgatcctgctggcccagctgaagcccgagaaggatagcgacgaagccgtgacatatagcctgggaaagtttgggcagagggccctggatttctacagcattcatgtgaccaaggagtccacccaccccgtgaagcccctggcccagatcgccggaaacagatacgcctccggacctgtgggaaaggccctgagcgacgcatgtatgggcacaatcgcctccttcctgtctaagtaccaggacatcatcatcgaacaccagaaggtggtgaagggcaaccagaagagactggagagcctgcgggagctggccggcaaggaaaacctggaataccctagcgtgaccctgccacctcagcctcacaccaaggagggcgttgatgcctacaacgaagtgatcgcccgggtgcgaatgtgggtgaacctgaacctgtggcagaagctgaagctaagcagagatgatgccaagcctctgctgagactgaagggattcccttcctttcctctggtcgagagacaggccaacgaagtggactggtgggacatggtgtgtaacgtgaagaagctgatcaacgagaaaaaggaggatggcaaggtgttttggcagaatctggctggctacaagagacaggaagccctgagaccatacctgagcagcgaggaagatcggaagaagggaaagaaattcgctcggtaccagctgggcgacctgctgctgcacctggaaaagaagcacggcgaggactggggaaaggtgtacgacgaggcctgggagcggattgacaagaaagtggaaggcctgagcaagcacatcaagctggaagaggaacggagaagcgaggacgcccagagcaaggccgccctgaccgactggctgcgggctaaggccagcttcgtgatcgagggcctgaaggaggccgacaaggacgagttctgcagatgcgagctgaagctgcagaagtggtacggggacctgcggggaaagcccttcgccatcgaagccgagaacagcatcctggacatcagcggcttcagcaagcagtacaactgtgccttcatctggcagaaggacggcgtgaagaagctgaacctgtacctgatcatcaactacttcaagggcggcaagctgcggttcaagaagatcaaacctgaagccttcgaagccaacagattctacaccgtgatcaacaaaaagagcggcgagatcgtgcccatggaggtgaacttcaacttcgacgaccccaacctgatcatcctgcctctggcctttggcaagagacagggcagagaattcatctggaacgacctgctgtccctggaaaccggcagcctgaagctggccaacggaagagtgatcgagaagacactgtacaacagaagaacccggcaggatgagcctgccctgttcgtggccctgaccttcgagcggcgggaggtcctggactcctccaatatcaaaccaatgaacctgatcggcgtggcaagaggcgaaaacatccccgccgtgatcgccctgaccgaccccgagggctgcccactgagccggtttaaggatagcctgggaaacccaacccacatcctgagaatcggcgagagctataaggagaagcagcggaccatccaggccaagaaggaggtggagcagcggagagccggcggctacagccggaagtacgccagcaaagccaagaatctggcagacgatatggtgagaaacaccgctagagatctgctgtactacgccgtgacccaggatgccatgctgatcttcgccaacctgagccggggcttcggccggcagggcaagcggaccttcatggccgagagacagtacacacggatggaggactggctgaccgccaagctggcctacgagggcctgagcaagacctacctgtccaagacactggcccagtacacctccaagacatgcagcaactgtgggtttaccatcaccagcgccgactacgacagggtgctggagaagctgaagaagacagcaacaggctggatgaccacaattaacggcaaggagctgaaggtggagggccagattacctactacaacagatacaagagacagaacgtagtcaaggacctgtccgtcgagctggatagactgagcgaagaatctgtgaacaacgacatctcctcctggacaaagggcagaagcggagaagctctgagcctcctgaagaaaagattctcccatagacccgtgcaggagaagttcgtgtgcctgaactgcggcttcgagacacacgcagccgagcaagccgccctgaacatcgccagatcctggctgttcctgcggagccaggagtacaagaaataccagacaaacaagacaaccggcaacaccgataagagagccttcgtcgagacctggcagtccttttaccggaagaagcttaaggaggtgtggaaacctgccgtgcggtctggcggatctggcggaggctccaccagccccaagaaaaagagaaaagtctaagctgccttctgcggggcttgccttctggccatgcccttcttctctcccttgcacctgtacctcttggtctttgaataaagcctgagtaggaaggctagcaaaaaaaaaaaaaaaaaaaaaaaaaaaaaaaaaaaaaaaaaaaaaaaaaaaaaaaaaaaaaaaaaaaaaaaaaaaaaaaa

SEQ ID NO: 13696 - RNA, 5785 nt, synthetic construct
  source 1..5785: mol_type = other RNA
aggaaataagagagaaaagaagagtaagaagaaatataagagccaccatggcccctaagaagaagcgtaaagtgagccggatggaacgcctcgtctacgaggtgcggcagaagtgcagaaacatcgaggacatctgcatctcctgcggatctctgaacgtgaccctggagcacccactgttcatcggcggcatgtgccagaactgtaaaaactgttttctggagtgtgcctatcaatacgacgatgacggctaccagagctactgcaccatctgttgcggcggaagagaggtgctgatgtgtggaaataacaactgctgccggtgcttctgcgtggaatgcgtggacctgctggtgggccccggcgccgcccaggccgctattaaggaagatccttggaactgctacatgtgcggccacaagggcacatacggcctgctgagacggagagaggactggcctagcagactgcagatgttcttcgccaataaccacgaccaggagttcgacccccctaaggtgtaccctcccgtccccgccgagaagagaaagcccatccgggtcctgagcctgttcgatggcatcgccaccggtctgctggtgctgaaggacctgggcatccaggtggataggtacattgcctccgaggtgtgcgaggactccatcaccgtgggaatggtgcgtcatcagggcaagatcatgtacgtgggcgacgtgcggagcgtgacacagaagcatatccaggagtggggccctttcgacctggtgatcggcggcagcccttgcaatgacctgagcatcgtgaacccagcccggaagggcctgtacgagggaaccggcagactgttcttcgagttttacagactgctgcacgacgcccggcctaaggaaggcgacgaccggcccttcttttggctgttcgagaatgtggtggccatgggagtcagcgacaagcgggatattagccggttcctggagagcaaccccgtgatgatcgatgccaaggaagtgagcgccgcccaccgggccagatacttctggggcaatctgcctggcatgaacagacccctggccagcaccgtgaacgacaagctggagctgcaggagtgcctggagcacggccggatcgccaagttcagcaaggtgagaaccatcaccacccgaagcaacagcatcaaacaaggcaaggaccagcactttcctgtgttcatgaacgagaaggaggacatcctgtggtgtaccgagatggagagagtgttcgggttcccagtccactacacagatgtcagcaacatgtctagactggccagacagagactgctgggaagaagctggtccgtccctgtgatcagacacctgttcgcccctctgaaggagtacttcgcctgcgtgagcagcggcaacagcaacgccaacagccggggccccagcttctctagcggcctggtgccactgtccctgagagggagccacatgggccccatggagatctacaaaaccgtgagcgcctggaagcggcagcctgtgcgcgtgctgagcctgtttcggaatatcgataaagtcctgaaaagcctgggattcctggagagcggctctggctccggcggtggcaccctgaagtacgtggaggatgtgacaaacgtggtcagacgggatgtggagaagtggggccccttcgatctggtgtacggcagcacccaacccctgggcagctcttgtgaccggtgccctggctggtacatgtttcagttccaccggatcctgcagtacgccctgccgagacaggagtcccagcggccattcttttggattttcatggacaacttgctgctgaccgaggatgaccaggaaactaccactcggttcctgcagaccgaagccgtgaccctgcaggacgtgagaggccgggactaccagaacgccatgcgggtgtggtccaacatccctggactgaaaagcaagcacgcacctctgacccctaaagaagaggagtacctgcaggcccaggtgcggagcagaagcaagctggacgcccctaaggtggatctgctggtgaagaattgcctcctgcccctgagagagtacttcaagtatttcagccagaatagtctgcccctgggaggcagcggcggcggcacccagatgcaggtgaagttcgacgacatcgccgtgagcttcagccaggaggagtggaagtacctggacgaggagcagaaggagctgtacagggaggtgatgaaggagaactaccagatcctgatcagcctgggcaccggcagcagcaccacccccaagatcatcagccacatcgagaggggcgaggagccctacatcagggacgagcccgtgctggtggagaggaagaccggcaagagcagcggcggcccaagcagcggcgcccctcctcccagcggcggcagcccagccggctccccaacctctaccgaggagggcacctctgagtccgccacccccgagagcggccctggcacctccaccgagcccagcgagggcagcgcacccggcagccctgccggcagccccacctccacagaggagggaaccagcaccgagcccagcgaaggcagcgccccaggcaccagcaccgagcctagtgagcaggagattaaacggatcaacaagatcagaagaagacttgtgaaagacagcaacaccaagaaggccggcaagacaggccccatgaaaaccctgctggttagagtgatgacacccgatctgagagagcggctggaaaacctgagaaagaagcctgaaaatatcccccagcccatcagcaatacatctagagccaacctgaataagctgctgaccgattacaccgaaatgaagaaggcgatcctgcatgtgtactgggaagagttccagaaggaccctgtgggcctgatgagccgggtggcccagcctgccagcaagaagatcgatcagaacaagctgaaacctgagatggacgagaagggcaacctgaccaccgccggctttgcctgctctcagtgtggccagcccctgttcgtgtacaagctggagcaggtgtctgagaagggcaaggcttacaccaactacttcggacggtgcaatgtggccgagcacgaaaagctgatcctgctggcccagctgaagcccgagaaggatagcgacgaagccgtgacatatagcctgggaaagtttgggcagagggccctggatttctacagcattcatgtgaccaaggagtccacccaccccgtgaagcccctggcccagatcgccggaaacagatacgcctccggacctgtgggaaaggccctgagcgacgcatgtatgggcacaatcgcctccttcctgtctaagtaccaggacatcatcatcgaacaccagaaggtggtgaagggcaaccagaagagactggagagcctgcgggagctggccggcaaggaaaacctggaataccctagcgtgaccctgccacctcagcctcacaccaaggagggcgttgatgcctacaacgaagtgatcgcccgggtgcgaatgtgggtgaacctgaacctgtggcagaagctgaagctaagcagagatgatgccaagcctctgctgagactgaagggattcccttcctttcctctggtcgagagacaggccaacgaagtggactggtgggacatggtgtgtaacgtgaagaagctgatcaacgagaaaaaggaggatggcaaggtgttttggcagaatctggctggctacaagagacaggaagccctgagaccatacctgagcagcgaggaagatcggaagaagggaaagaaattcgctcggtaccagctgggcgacctgctgctgcacctggaaaagaagcacggcgaggactggggaaaggtgtacgacgaggcctgggagcggattgacaagaaagtggaaggcctgagcaagcacatcaagctggaagaggaacggagaagcgaggacgcccagagcaaggccgccctgaccgactggctgcgggctaaggccagcttcgtgatcgagggcctgaaggaggccgacaaggacgagttctgcagatgcgagctgaagctgcagaagtggtacggggacctgcggggaaagcccttcgccatcgaagccgagaacagcatcctggacatcagcggcttcagcaagcagtacaactgtgccttcatctggcagaaggacggcgtgaagaagctgaacctgtacctgatcatcaactacttcaagggcggcaagctgcggttcaagaagatcaaacctgaagccttcgaagccaacagattctacaccgtgatcaacaaaaagagcggcgagatcgtgcccatggaggtgaacttcaacttcgacgaccccaacctgatcatcctgcctctggcctttggcaagagacagggcagagaattcatctggaacgacctgctgtccctggaaaccggcagcctgaagctggccaacggaagagtgatcgagaagacactgtacaacagaagaacccggcaggatgagcctgccctgttcgtggccctgaccttcgagcggcgggaggtcctggactcctccaatatcaaaccaatgaacctgatcggcgtggcaagaggcgaaaacatccccgccgtgatcgccctgaccgaccccgagggctgcccactgagccggtttaaggatagcctgggaaacccaacccacatcctgagaatcggcgagagctataaggagaagcagcggaccatccaggccaagaaggaggtggagcagcggagagccggcggctacagccggaagtacgccagcaaagccaagaatctggcagacgatatggtgagaaacaccgctagagatctgctgtactacgccgtgacccaggatgccatgctgatcttcgccaacctgagccggggcttcggccggcagggcaagcggaccttcatggccgagagacagtacacacggatggaggactggctgaccgccaagctggcctacgagggcctgagcaagacctacctgtccaagacactggcccagtacacctccaagacatgcagcaactgtgggtttaccatcaccagcgccgactacgacagggtgctggagaagctgaagaagacagcaacaggctggatgaccacaattaacggcaaggagctgaaggtggagggccagattacctactacaacagatacaagagacagaacgtagtcaaggacctgtccgtcgagctggatagactgagcgaagaatctgtgaacaacgacatctcctcctggacaaagggcagaagcggagaagctctgagcctcctgaagaaaagattctcccatagacccgtgcaggagaagttcgtgtgcctgaactgcggcttcgagacacacgcagccgagcaagccgccctgaacatcgccagatcctggctgttcctgcggagccaggagtacaagaaataccagacaaacaagacaaccggcaacaccgataagagagccttcgtcgagacctggcagtccttttaccggaagaagcttaaggaggtgtggaaacctgccgtgcggtctggcggatctggcggaggctccaccagccccaagaaaaagagaaaagtctaagctgccttctgcggggcttgccttctggccatgcccttcttctctcccttgcacctgtacctcttggtctttgaataaagcctgagtaggaaggctagcaaaaaaaaaaaaaaaaaaaaaaaaaaaaaaaaaaaaaaaaaaaaaaaaaaaaaaaaaaaaaaaaaaaaaaaaaaaaaaaa

SEQ ID NO: 13697 - RNA, 5785 nt, synthetic construct
  source 1..5785: mol_type = other RNA
aggaaataagagagaaaagaagagtaagaagaaatataagagccaccatggcccctaagaagaagcgtaaagtgagccggatggaacgcctcgtctacgaggtgcggcagaagtgcagaaacatcgaggacatctgcatctcctgcggatctctgaacgtgaccctggagcacccactgttcatcggcggcatgtgccagaactgtaaaaactgttttctggagtgtgcctatcaatacgacgatgacggctaccagagctactgcaccatctgttgcggcggaagagaggtgctgatgtgtggaaataacaactgctgccggtgcttctgcgtggaatgcgtggacctgctggtgggccccggcgccgcccaggccgctattaaggaagatccttggaactgctacatgtgcggccacaagggcacatacggcctgctgagacggagagaggactggcctagcagactgcagatgttcttcgccaataaccacgaccaggagttcgacccccctaaggtgtaccctcccgtccccgccgagaagagaaagcccatccgggtcctgagcctgttcgatggcatcgccaccggtctgctggtgctgaaggacctgggcatccaggtggataggtacattgcctccgaggtgtgcgaggactccatcaccgtgggaatggtgcgtcatcagggcaagatcatgtacgtgggcgacgtgcggagcgtgacacagaagcatatccaggagtggggccctttcgacctggtgatcggcggcagcccttgcaatgacctgagcatcgtgaacccagcccggaagggcctgtacgagggaaccggcagactgttcttcgagttttacagactgctgcacgacgcccggcctaaggaaggcgacgaccggcccttcttttggctgttcgagaatgtggtggccatgggagtcagcgacaagcgggatattagccggttcctggagagcaaccccgtgatgatcgatgccaaggaagtgagcgccgcccaccgggccagatacttctggggcaatctgcctggcatgaacagacccctggccagcaccgtgaacgacaagctggagctgcaggagtgcctggagcacggccggatcgccaagttcagcaaggtgagaaccatcaccacccgaagcaacagcatcaaacaaggcaaggaccagcactttcctgtgttcatgaacgagaaggaggacatcctgtggtgtaccgagatggagagagtgttcgggttcccagtccactacacagatgtcagcaacatgtctagactggccagacagagactgctgggaagaagctggtccgtccctgtgatcagacacctgttcgcccctctgaaggagtacttcgcctgcgtgagcagcggcaacagcaacgccaacagccggggccccagcttctctagcggcctggtgccactgtccctgagagggagccacatgggccccatggagatctacaaaaccgtgagcgcctggaagcggcagcctgtgcgcgtgctgagcctgtttcggaatatcgataaagtcctgaaaagcctgggattcctggagagcggctctggctccggcggtggcaccctgaagtacgtggaggatgtgacaaacgtggtcagacgggatgtggagaagtggggccccttcgatctggtgtacggcagcacccaacccctgggcagctcttgtgaccggtgccctggctggtacatgtttcagttccaccggatcctgcagtacgccctgccgagacaggagtcccagcggccattcttttggattttcatggacaacttgctgctgaccgaggatgaccaggaaactaccactcggttcctgcagaccgaagccgtgaccctgcaggacgtgagaggccgggactaccagaacgccatgcgggtgtggtccaacatccctggactgaaaagcaagcacgcacctctgacccctaaagaagaggagtacctgcaggcccaggtgcggagcagaagcaagctggacgcccctaaggtggatctgctggtgaagaattgcctcctgcccctgagagagtacttcaagtatttcagccagaatagtctgcccctgggaggcagcggcggcggcatgaccctgctgaccttcagggacgtggccatcgagttcagcctggaggagtggaagtgcctggacctggcccagcagaacctgtacagggacgtgatgctggagaactacaggaacctgttcagcatcggcctgaccgtgagcaagcccggcctgatcacctgcctggagcagaggaaggagccctggaacgtgaagaggcaggaggccgtggacggccaccccggctggtgcagcggcgtgggcggcccaagcagcggcgcccctcctcccagcggcggcagcccagccggctccccaacctctaccgaggagggcacctctgagtccgccacccccgagagcggccctggcacctccaccgagcccagcgagggcagcgcacccggcagccctgccggcagccccacctccacagaggagggaaccagcaccgagcccagcgaaggcagcgccccaggcaccagcaccgagcctagtgagcaggagattaaacggatcaacaagatcagaagaagacttgtgaaagacagcaacaccaagaaggccggcaagacaggccccatgaaaaccctgctggttagagtgatgacacccgatctgagagagcggctggaaaacctgagaaagaagcctgaaaatatcccccagcccatcagcaatacatctagagccaacctgaataagctgctgaccgattacaccgaaatgaagaaggcgatcctgcatgtgtactgggaagagttccagaaggaccctgtgggcctgatgagccgggtggcccagcctgccagcaagaagatcgatcagaacaagctgaaacctgagatggacgagaagggcaacctgaccaccgccggctttgcctgctctcagtgtggccagcccctgttcgtgtacaagctggagcaggtgtctgagaagggcaaggcttacaccaactacttcggacggtgcaatgtggccgagcacgaaaagctgatcctgctggcccagctgaagcccgagaaggatagcgacgaagccgtgacatatagcctgggaaagtttgggcagagggccctggatttctacagcattcatgtgaccaaggagtccacccaccccgtgaagcccctggcccagatcgccggaaacagatacgcctccggacctgtgggaaaggccctgagcgacgcatgtatgggcacaatcgcctccttcctgtctaagtaccaggacatcatcatcgaacaccagaaggtggtgaagggcaaccagaagagactggagagcctgcgggagctggccggcaaggaaaacctggaataccctagcgtgaccctgccacctcagcctcacaccaaggagggcgttgatgcctacaacgaagtgatcgcccgggtgcgaatgtgggtgaacctgaacctgtggcagaagctgaagctaagcagagatgatgccaagcctctgctgagactgaagggattcccttcctttcctctggtcgagagacaggccaacgaagtggactggtgggacatggtgtgtaacgtgaagaagctgatcaacgagaaaaaggaggatggcaaggtgttttggcagaatctggctggctacaagagacaggaagccctgagaccatacctgagcagcgaggaagatcggaagaagggaaagaaattcgctcggtaccagctgggcgacctgctgctgcacctggaaaagaagcacggcgaggactggggaaaggtgtacgacgaggcctgggagcggattgacaagaaagtggaaggcctgagcaagcacatcaagctggaagaggaacggagaagcgaggacgcccagagcaaggccgccctgaccgactggctgcgggctaaggccagcttcgtgatcgagggcctgaaggaggccgacaaggacgagttctgcagatgcgagctgaagctgcagaagtggtacggggacctgcggggaaagcccttcgccatcgaagccgagaacagcatcctggacatcagcggcttcagcaagcagtacaactgtgccttcatctggcagaaggacggcgtgaagaagctgaacctgtacctgatcatcaactacttcaagggcggcaagctgcggttcaagaagatcaaacctgaagccttcgaagccaacagattctacaccgtgatcaacaaaaagagcggcgagatcgtgcccatggaggtgaacttcaacttcgacgaccccaacctgatcatcctgcctctggcctttggcaagagacagggcagagaattcatctggaacgacctgctgtccctggaaaccggcagcctgaagctggccaacggaagagtgatcgagaagacactgtacaacagaagaacccggcaggatgagcctgccctgttcgtggccctgaccttcgagcggcgggaggtcctggactcctccaatatcaaaccaatgaacctgatcggcgtggcaagaggcgaaaacatccccgccgtgatcgccctgaccgaccccgagggctgcccactgagccggtttaaggatagcctgggaaacccaacccacatcctgagaatcggcgagagctataaggagaagcagcggaccatccaggccaagaaggaggtggagcagcggagagccggcggctacagccggaagtacgccagcaaagccaagaatctggcagacgatatggtgagaaacaccgctagagatctgctgtactacgccgtgacccaggatgccatgctgatcttcgccaacctgagccggggcttcggccggcagggcaagcggaccttcatggccgagagacagtacacacggatggaggactggctgaccgccaagctggcctacgagggcctgagcaagacctacctgtccaagacactggcccagtacacctccaagacatgcagcaactgtgggtttaccatcaccagcgccgactacgacagggtgctggagaagctgaagaagacagcaacaggctggatgaccacaattaacggcaaggagctgaaggtggagggccagattacctactacaacagatacaagagacagaacgtagtcaaggacctgtccgtcgagctggatagactgagcgaagaatctgtgaacaacgacatctcctcctggacaaagggcagaagcggagaagctctgagcctcctgaagaaaagattctcccatagacccgtgcaggagaagttcgtgtgcctgaactgcggcttcgagacacacgcagccgagcaagccgccctgaacatcgccagatcctggctgttcctgcggagccaggagtacaagaaataccagacaaacaagacaaccggcaacaccgataagagagccttcgtcgagacctggcagtccttttaccggaagaagcttaaggaggtgtggaaacctgccgtgcggtctggcggatctggcggaggctccaccagccccaagaaaaagagaaaagtctaagctgccttctgcggggcttgccttctggccatgcccttcttctctcccttgcacctgtacctcttggtctttgaataaagcctgagtaggaaggctagcaaaaaaaaaaaaaaaaaaaaaaaaaaaaaaaaaaaaaaaaaaaaaaaaaaaaaaaaaaaaaaaaaaaaaaaaaaaaaaaa

SEQ ID NO: 13698 - RNA, 5815 nt, synthetic construct
  source 1..5815: mol_type = other RNA
aggaaataagagagaaaagaagagtaagaagaaatataagagccaccatggcccctaagaagaagcgtaaagtgagccggatggaacgcctcgtctacgaggtgcggcagaagtgcagaaacatcgaggacatctgcatctcctgcggatctctgaacgtgaccctggagcacccactgttcatcggcggcatgtgccagaactgtaaaaactgttttctggagtgtgcctatcaatacgacgatgacggctaccagagctactgcaccatctgttgcggcggaagagaggtgctgatgtgtggaaataacaactgctgccggtgcttctgcgtggaatgcgtggacctgctggtgggccccggcgccgcccaggccgctattaaggaagatccttggaactgctacatgtgcggccacaagggcacatacggcctgctgagacggagagaggactggcctagcagactgcagatgttcttcgccaataaccacgaccaggagttcgacccccctaaggtgtaccctcccgtccccgccgagaagagaaagcccatccgggtcctgagcctgttcgatggcatcgccaccggtctgctggtgctgaaggacctgggcatccaggtggataggtacattgcctccgaggtgtgcgaggactccatcaccgtgggaatggtgcgtcatcagggcaagatcatgtacgtgggcgacgtgcggagcgtgacacagaagcatatccaggagtggggccctttcgacctggtgatcggcggcagcccttgcaatgacctgagcatcgtgaacccagcccggaagggcctgtacgagggaaccggcagactgttcttcgagttttacagactgctgcacgacgcccggcctaaggaaggcgacgaccggcccttcttttggctgttcgagaatgtggtggccatgggagtcagcgacaagcgggatattagccggttcctggagagcaaccccgtgatgatcgatgccaaggaagtgagcgccgcccaccgggccagatacttctggggcaatctgcctggcatgaacagacccctggccagcaccgtgaacgacaagctggagctgcaggagtgcctggagcacggccggatcgccaagttcagcaaggtgagaaccatcaccacccgaagcaacagcatcaaacaaggcaaggaccagcactttcctgtgttcatgaacgagaaggaggacatcctgtggtgtaccgagatggagagagtgttcgggttcccagtccactacacagatgtcagcaacatgtctagactggccagacagagactgctgggaagaagctggtccgtccctgtgatcagacacctgttcgcccctctgaaggagtacttcgcctgcgtgagcagcggcaacagcaacgccaacagccggggccccagcttctctagcggcctggtgccactgtccctgagagggagccacatgggccccatggagatctacaaaaccgtgagcgcctggaagcggcagcctgtgcgcgtgctgagcctgtttcggaatatcgataaagtcctgaaaagcctgggattcctggagagcggctctggctccggcggtggcaccctgaagtacgtggaggatgtgacaaacgtggtcagacgggatgtggagaagtggggccccttcgatctggtgtacggcagcacccaacccctgggcagctcttgtgaccggtgccctggctggtacatgtttcagttccaccggatcctgcagtacgccctgccgagacaggagtcccagcggccattcttttggattttcatggacaacttgctgctgaccgaggatgaccaggaaactaccactcggttcctgcagaccgaagccgtgaccctgcaggacgtgagaggccgggactaccagaacgccatgcgggtgtggtccaacatccctggactgaaaagcaagcacgcacctctgacccctaaagaagaggagtacctgcaggcccaggtgcggagcagaagcaagctggacgcccctaaggtggatctgctggtgaagaattgcctcctgcccctgagagagtacttcaagtatttcagccagaatagtctgcccctgggaggcagcggcggcggcgtgaccttcgaggacgtggccgtgaacttcaccccccaggagtgggccctgctggaccccagccagaagaacctgtacagggacgtgatgcaggagaccctgaggaacctggccagcgtgggcaagaagtggaaggaccagaacatggaggacgagtgcaagacccccaggaggaacctgaggagcgtggtgggcgagaggctgttcaccagcaaggagggcagccagtgcggcgagaccctgaacctggacagccaccacatgctgaagaagggcggcccaagcagcggcgcccctcctcccagcggcggcagcccagccggctccccaacctctaccgaggagggcacctctgagtccgccacccccgagagcggccctggcacctccaccgagcccagcgagggcagcgcacccggcagccctgccggcagccccacctccacagaggagggaaccagcaccgagcccagcgaaggcagcgccccaggcaccagcaccgagcctagtgagcaggagattaaacggatcaacaagatcagaagaagacttgtgaaagacagcaacaccaagaaggccggcaagacaggccccatgaaaaccctgctggttagagtgatgacacccgatctgagagagcggctggaaaacctgagaaagaagcctgaaaatatcccccagcccatcagcaatacatctagagccaacctgaataagctgctgaccgattacaccgaaatgaagaaggcgatcctgcatgtgtactgggaagagttccagaaggaccctgtgggcctgatgagccgggtggcccagcctgccagcaagaagatcgatcagaacaagctgaaacctgagatggacgagaagggcaacctgaccaccgccggctttgcctgctctcagtgtggccagcccctgttcgtgtacaagctggagcaggtgtctgagaagggcaaggcttacaccaactacttcggacggtgcaatgtggccgagcacgaaaagctgatcctgctggcccagctgaagcccgagaaggatagcgacgaagccgtgacatatagcctgggaaagtttgggcagagggccctggatttctacagcattcatgtgaccaaggagtccacccaccccgtgaagcccctggcccagatcgccggaaacagatacgcctccggacctgtgggaaaggccctgagcgacgcatgtatgggcacaatcgcctccttcctgtctaagtaccaggacatcatcatcgaacaccagaaggtggtgaagggcaaccagaagagactggagagcctgcgggagctggccggcaaggaaaacctggaataccctagcgtgaccctgccacctcagcctcacaccaaggagggcgttgatgcctacaacgaagtgatcgcccgggtgcgaatgtgggtgaacctgaacctgtggcagaagctgaagctaagcagagatgatgccaagcctctgctgagactgaagggattcccttcctttcctctggtcgagagacaggccaacgaagtggactggtgggacatggtgtgtaacgtgaagaagctgatcaacgagaaaaaggaggatggcaaggtgttttggcagaatctggctggctacaagagacaggaagccctgagaccatacctgagcagcgaggaagatcggaagaagggaaagaaattcgctcggtaccagctgggcgacctgctgctgcacctggaaaagaagcacggcgaggactggggaaaggtgtacgacgaggcctgggagcggattgacaagaaagtggaaggcctgagcaagcacatcaagctggaagaggaacggagaagcgaggacgcccagagcaaggccgccctgaccgactggctgcgggctaaggccagcttcgtgatcgagggcctgaaggaggccgacaaggacgagttctgcagatgcgagctgaagctgcagaagtggtacggggacctgcggggaaagcccttcgccatcgaagccgagaacagcatcctggacatcagcggcttcagcaagcagtacaactgtgccttcatctggcagaaggacggcgtgaagaagctgaacctgtacctgatcatcaactacttcaagggcggcaagctgcggttcaagaagatcaaacctgaagccttcgaagccaacagattctacaccgtgatcaacaaaaagagcggcgagatcgtgcccatggaggtgaacttcaacttcgacgaccccaacctgatcatcctgcctctggcctttggcaagagacagggcagagaattcatctggaacgacctgctgtccctggaaaccggcagcctgaagctggccaacggaagagtgatcgagaagacactgtacaacagaagaacccggcaggatgagcctgccctgttcgtggccctgaccttcgagcggcgggaggtcctggactcctccaatatcaaaccaatgaacctgatcggcgtggcaagaggcgaaaacatccccgccgtgatcgccctgaccgaccccgagggctgcccactgagccggtttaaggatagcctgggaaacccaacccacatcctgagaatcggcgagagctataaggagaagcagcggaccatccaggccaagaaggaggtggagcagcggagagccggcggctacagccggaagtacgccagcaaagccaagaatctggcagacgatatggtgagaaacaccgctagagatctgctgtactacgccgtgacccaggatgccatgctgatcttcgccaacctgagccggggcttcggccggcagggcaagcggaccttcatggccgagagacagtacacacggatggaggactggctgaccgccaagctggcctacgagggcctgagcaagacctacctgtccaagacactggcccagtacacctccaagacatgcagcaactgtgggtttaccatcaccagcgccgactacgacagggtgctggagaagctgaagaagacagcaacaggctggatgaccacaattaacggcaaggagctgaaggtggagggccagattacctactacaacagatacaagagacagaacgtagtcaaggacctgtccgtcgagctggatagactgagcgaagaatctgtgaacaacgacatctcctcctggacaaagggcagaagcggagaagctctgagcctcctgaagaaaagattctcccatagacccgtgcaggagaagttcgtgtgcctgaactgcggcttcgagacacacgcagccgagcaagccgccctgaacatcgccagatcctggctgttcctgcggagccaggagtacaagaaataccagacaaacaagacaaccggcaacaccgataagagagccttcgtcgagacctggcagtccttttaccggaagaagcttaaggaggtgtggaaacctgccgtgcggtctggcggatctggcggaggctccaccagccccaagaaaaagagaaaagtctaagctgccttctgcggggcttgccttctggccatgcccttcttctctcccttgcacctgtacctcttggtctttgaataaagcctgagtaggaaggctagcaaaaaaaaaaaaaaaaaaaaaaaaaaaaaaaaaaaaaaaaaaaaaaaaaaaaaaaaaaaaaaaaaaaaaaaaaaaaaaaa

SEQ ID NO: 13699 - RNA, 5833 nt, synthetic construct
  source 1..5833: mol_type = other RNA
aggaaataagagagaaaagaagagtaagaagaaatataagagccaccatggcccctaagaagaagcgtaaagtgagccggatggaacgcctcgtctacgaggtgcggcagaagtgcagaaacatcgaggacatctgcatctcctgcggatctctgaacgtgaccctggagcacccactgttcatcggcggcatgtgccagaactgtaaaaactgttttctggagtgtgcctatcaatacgacgatgacggctaccagagctactgcaccatctgttgcggcggaagagaggtgctgatgtgtggaaataacaactgctgccggtgcttctgcgtggaatgcgtggacctgctggtgggccccggcgccgcccaggccgctattaaggaagatccttggaactgctacatgtgcggccacaagggcacatacggcctgctgagacggagagaggactggcctagcagactgcagatgttcttcgccaataaccacgaccaggagttcgacccccctaaggtgtaccctcccgtccccgccgagaagagaaagcccatccgggtcctgagcctgttcgatggcatcgccaccggtctgctggtgctgaaggacctgggcatccaggtggataggtacattgcctccgaggtgtgcgaggactccatcaccgtgggaatggtgcgtcatcagggcaagatcatgtacgtgggcgacgtgcggagcgtgacacagaagcatatccaggagtggggccctttcgacctggtgatcggcggcagcccttgcaatgacctgagcatcgtgaacccagcccggaagggcctgtacgagggaaccggcagactgttcttcgagttttacagactgctgcacgacgcccggcctaaggaaggcgacgaccggcccttcttttggctgttcgagaatgtggtggccatgggagtcagcgacaagcgggatattagccggttcctggagagcaaccccgtgatgatcgatgccaaggaagtgagcgccgcccaccgggccagatacttctggggcaatctgcctggcatgaacagacccctggccagcaccgtgaacgacaagctggagctgcaggagtgcctggagcacggccggatcgccaagttcagcaaggtgagaaccatcaccacccgaagcaacagcatcaaacaaggcaaggaccagcactttcctgtgttcatgaacgagaaggaggacatcctgtggtgtaccgagatggagagagtgttcgggttcccagtccactacacagatgtcagcaacatgtctagactggccagacagagactgctgggaagaagctggtccgtccctgtgatcagacacctgttcgcccctctgaaggagtacttcgcctgcgtgagcagcggcaacagcaacgccaacagccggggccccagcttctctagcggcctggtgccactgtccctgagagggagccacatgggccccatggagatctacaaaaccgtgagcgcctggaagcggcagcctgtgcgcgtgctgagcctgtttcggaatatcgataaagtcctgaaaagcctgggattcctggagagcggctctggctccggcggtggcaccctgaagtacgtggaggatgtgacaaacgtggtcagacgggatgtggagaagtggggccccttcgatctggtgtacggcagcacccaacccctgggcagctcttgtgaccggtgccctggctggtacatgtttcagttccaccggatcctgcagtacgccctgccgagacaggagtcccagcggccattcttttggattttcatggacaacttgctgctgaccgaggatgaccaggaaactaccactcggttcctgcagaccgaagccgtgaccctgcaggacgtgagaggccgggactaccagaacgccatgcgggtgtggtccaacatccctggactgaaaagcaagcacgcacctctgacccctaaagaagaggagtacctgcaggcccaggtgcggagcagaagcaagctggacgcccctaaggtggatctgctggtgaagaattgcctcctgcccctgagagagtacttcaagtatttcagccagaatagtctgcccctgggaggcagcggcggcggcgagaagatcgaggacatggccgtgagcctgatcagggaggagtggctgctggaccccagccagaaggacctgaggagggacaacaggaccgagaactacaggaacatgttcagcctgggcggcgagaccaggagcgagaacagggagctggccagcaagcaggtggccagcgccggcgtgcagccccacggcgagaccgccgccaggtgcaacggcgacgtgaccggcgccctggagcacggcgaggccagggacctgctgggcagcagggtggagaggcagagggccaacggcggcccaagcagcggcgcccctcctcccagcggcggcagcccagccggctccccaacctctaccgaggagggcacctctgagtccgccacccccgagagcggccctggcacctccaccgagcccagcgagggcagcgcacccggcagccctgccggcagccccacctccacagaggagggaaccagcaccgagcccagcgaaggcagcgccccaggcaccagcaccgagcctagtgagcaggagattaaacggatcaacaagatcagaagaagacttgtgaaagacagcaacaccaagaaggccggcaagacaggccccatgaaaaccctgctggttagagtgatgacacccgatctgagagagcggctggaaaacctgagaaagaagcctgaaaatatcccccagcccatcagcaatacatctagagccaacctgaataagctgctgaccgattacaccgaaatgaagaaggcgatcctgcatgtgtactgggaagagttccagaaggaccctgtgggcctgatgagccgggtggcccagcctgccagcaagaagatcgatcagaacaagctgaaacctgagatggacgagaagggcaacctgaccaccgccggctttgcctgctctcagtgtggccagcccctgttcgtgtacaagctggagcaggtgtctgagaagggcaaggcttacaccaactacttcggacggtgcaatgtggccgagcacgaaaagctgatcctgctggcccagctgaagcccgagaaggatagcgacgaagccgtgacatatagcctgggaaagtttgggcagagggccctggatttctacagcattcatgtgaccaaggagtccacccaccccgtgaagcccctggcccagatcgccggaaacagatacgcctccggacctgtgggaaaggccctgagcgacgcatgtatgggcacaatcgcctccttcctgtctaagtaccaggacatcatcatcgaacaccagaaggtggtgaagggcaaccagaagagactggagagcctgcgggagctggccggcaaggaaaacctggaataccctagcgtgaccctgccacctcagcctcacaccaaggagggcgttgatgcctacaacgaagtgatcgcccgggtgcgaatgtgggtgaacctgaacctgtggcagaagctgaagctaagcagagatgatgccaagcctctgctgagactgaagggattcccttcctttcctctggtcgagagacaggccaacgaagtggactggtgggacatggtgtgtaacgtgaagaagctgatcaacgagaaaaaggaggatggcaaggtgttttggcagaatctggctggctacaagagacaggaagccctgagaccatacctgagcagcgaggaagatcggaagaagggaaagaaattcgctcggtaccagctgggcgacctgctgctgcacctggaaaagaagcacggcgaggactggggaaaggtgtacgacgaggcctgggagcggattgacaagaaagtggaaggcctgagcaagcacatcaagctggaagaggaacggagaagcgaggacgcccagagcaaggccgccctgaccgactggctgcgggctaaggccagcttcgtgatcgagggcctgaaggaggccgacaaggacgagttctgcagatgcgagctgaagctgcagaagtggtacggggacctgcggggaaagcccttcgccatcgaagccgagaacagcatcctggacatcagcggcttcagcaagcagtacaactgtgccttcatctggcagaaggacggcgtgaagaagctgaacctgtacctgatcatcaactacttcaagggcggcaagctgcggttcaagaagatcaaacctgaagccttcgaagccaacagattctacaccgtgatcaacaaaaagagcggcgagatcgtgcccatggaggtgaacttcaacttcgacgaccccaacctgatcatcctgcctctggcctttggcaagagacagggcagagaattcatctggaacgacctgctgtccctggaaaccggcagcctgaagctggccaacggaagagtgatcgagaagacactgtacaacagaagaacccggcaggatgagcctgccctgttcgtggccctgaccttcgagcggcgggaggtcctggactcctccaatatcaaaccaatgaacctgatcggcgtggcaagaggcgaaaacatccccgccgtgatcgccctgaccgaccccgagggctgcccactgagccggtttaaggatagcctgggaaacccaacccacatcctgagaatcggcgagagctataaggagaagcagcggaccatccaggccaagaaggaggtggagcagcggagagccggcggctacagccggaagtacgccagcaaagccaagaatctggcagacgatatggtgagaaacaccgctagagatctgctgtactacgccgtgacccaggatgccatgctgatcttcgccaacctgagccggggcttcggccggcagggcaagcggaccttcatggccgagagacagtacacacggatggaggactggctgaccgccaagctggcctacgagggcctgagcaagacctacctgtccaagacactggcccagtacacctccaagacatgcagcaactgtgggtttaccatcaccagcgccgactacgacagggtgctggagaagctgaagaagacagcaacaggctggatgaccacaattaacggcaaggagctgaaggtggagggccagattacctactacaacagatacaagagacagaacgtagtcaaggacctgtccgtcgagctggatagactgagcgaagaatctgtgaacaacgacatctcctcctggacaaagggcagaagcggagaagctctgagcctcctgaagaaaagattctcccatagacccgtgcaggagaagttcgtgtgcctgaactgcggcttcgagacacacgcagccgagcaagccgccctgaacatcgccagatcctggctgttcctgcggagccaggagtacaagaaataccagacaaacaagacaaccggcaacaccgataagagagccttcgtcgagacctggcagtccttttaccggaagaagcttaaggaggtgtggaaacctgccgtgcggtctggcggatctggcggaggctccaccagccccaagaaaaagagaaaagtctaagctgccttctgcggggcttgccttctggccatgcccttcttctctcccttgcacctgtacctcttggtctttgaataaagcctgagtaggaaggctagcaaaaaaaaaaaaaaaaaaaaaaaaaaaaaaaaaaaaaaaaaaaaaaaaaaaaaaaaaaaaaaaaaaaaaaaaaaaaaaaa

SEQ ID NO: 13700 - RNA, 5785 nt, synthetic construct; identical to SEQ ID NO: 12103
  modified_base 1..5785: mod_base = OTHER; note = Each t is m1f
  source 1..5785: mol_type = other RNA

SEQ ID NO: 13701 - RNA, 5785 nt, synthetic construct; identical to SEQ ID NO: 12104
  modified_base 1..5785: mod_base = OTHER; note = Each t is m1f
  source 1..5785: mol_type = other RNA

SEQ ID NO: 13702 - RNA, 5785 nt, synthetic construct; identical to SEQ ID NO: 12105
  modified_base 1..5785: mod_base = OTHER; note = Each t is m1f
  source 1..5785: mol_type = other RNA

SEQ ID NO: 13703 - RNA, 5785 nt, synthetic construct; identical to SEQ ID NO: 12106
  modified_base 1..5785: mod_base = OTHER; note = Each t is m1f
  source 1..5785: mol_type = other RNA

SEQ ID NO: 13704 - RNA, 5785 nt, synthetic construct; identical to SEQ ID NO: 12107
  modified_base 1..5785: mod_base = OTHER; note = Each t is m1f
  source 1..5785: mol_type = other RNA

SEQ ID NO: 13705 - RNA, 5785 nt, synthetic construct; identical to SEQ ID NO: 12108
  modified_base 1..5785: mod_base = OTHER; note = Each t is m1f
  source 1..5785: mol_type = other RNA

SEQ ID NO: 13706 - RNA, 5785 nt, synthetic construct; identical to SEQ ID NO: 12109
  modified_base 1..5785: mod_base = OTHER; note = Each t is m1f
  source 1..5785: mol_type = other RNA

SEQ ID NO: 13707 - RNA, 5785 nt, synthetic construct; identical to SEQ ID NO: 12110
  modified_base 1..5785: mod_base = OTHER; note = Each t is m1f
  source 1..5785: mol_type = other RNA

SEQ ID NO: 13708 - RNA, 5785 nt, synthetic construct; identical to SEQ ID NO: 12111
  modified_base 1..5785: mod_base = OTHER; note = Each t is m1f
  source 1..5785: mol_type = other RNA

SEQ ID NO: 13709 - RNA, 5785 nt, synthetic construct; identical to SEQ ID NO: 12112
  modified_base 1..5785: mod_base = OTHER; note = Each t is m1f
  source 1..5785: mol_type = other RNA

SEQ ID NO: 13710 - RNA, 5785 nt, synthetic construct; identical to SEQ ID NO: 12113
  modified_base 1..5785: mod_base = OTHER; note = Each t is m1f
  source 1..5785: mol_type = other RNA

SEQ ID NO: 13711 - RNA, 5785 nt, synthetic construct; identical to SEQ ID NO: 12114
  modified_base 1..5785: mod_base = OTHER; note = Each t is m1f
  source 1..5785: mol_type = other RNA

SEQ ID NO: 13712 - RNA, 5785 nt, synthetic construct; identical to SEQ ID NO: 12115
  modified_base 1..5785: mod_base = OTHER; note = Each t is m1f
  source 1..5785: mol_type = other RNA

SEQ ID NO: 13713 - RNA, 5785 nt, synthetic construct; identical to SEQ ID NO: 12116
  modified_base 1..5785: mod_base = OTHER; note = Each t is m1f
  source 1..5785: mol_type = other RNA

SEQ ID NO: 13714 - RNA, 5785 nt, synthetic construct; identical to SEQ ID NO: 12117
  modified_base 1..5785: mod_base = OTHER; note = Each t is m1f
  source 1..5785: mol_type = other RNA

SEQ ID NO: 13715 - RNA, 5785 nt, synthetic construct; identical to SEQ ID NO: 12118
  modified_base 1..5785: mod_base = OTHER; note = Each t is m1f
  source 1..5785: mol_type = other RNA

SEQ ID NO: 13716 - RNA, 5785 nt, synthetic construct; identical to SEQ ID NO: 12119
  modified_base 1..5785: mod_base = OTHER; note = Each t is m1f
  source 1..5785: mol_type = other RNA

SEQ ID NO: 13717 - RNA, 5785 nt, synthetic construct; identical to SEQ ID NO: 12120
  modified_base 1..5785: mod_base = OTHER; note = Each t is m1f
  source 1..5785: mol_type = other RNA

SEQ ID NO: 13718 - RNA, 5785 nt, synthetic construct; identical to SEQ ID NO: 12121
  modified_base 1..5785: mod_base = OTHER; note = Each t is m1f
  source 1..5785: mol_type = other RNA

SEQ ID NO: 13719 - RNA, 5785 nt, synthetic construct; identical to SEQ ID NO: 12122
  modified_base 1..5785: mod_base = OTHER; note = Each t is m1f
  source 1..5785: mol_type = other RNA

SEQ ID NO: 13720 - RNA, 5785 nt, synthetic construct; identical to SEQ ID NO: 12123
  modified_base 1..5785: mod_base = OTHER; note = Each t is m1f
  source 1..5785: mol_type = other RNA

SEQ ID NO: 13721 - RNA, 5785 nt, synthetic construct; identical to SEQ ID NO: 12124
  modified_base 1..5785: mod_base = OTHER; note = Each t is m1f
  source 1..5785: mol_type = other RNA

SEQ ID NO: 13722 - RNA, 5785 nt, synthetic construct; identical to SEQ ID NO: 12125
  modified_base 1..5785: mod_base = OTHER; note = Each t is m1f
  source 1..5785: mol_type = other RNA

SEQ ID NO: 13723 - RNA, 5785 nt, synthetic construct; identical to SEQ ID NO: 12126
  modified_base 1..5785: mod_base = OTHER; note = Each t is m1f
  source 1..5785: mol_type = other RNA

SEQ ID NO: 13724 - RNA, 5785 nt, synthetic construct; identical to SEQ ID NO: 12127
  modified_base 1..5785: mod_base = OTHER; note = Each t is m1f
  source 1..5785: mol_type = other RNA

SEQ ID NO: 13725 - RNA, 5785 nt, synthetic construct; identical to SEQ ID NO: 12128
  modified_base 1..5785: mod_base = OTHER; note = Each t is m1f
  source 1..5785: mol_type = other RNA

SEQ ID NO: 13726 - RNA, 5785 nt, synthetic construct; identical to SEQ ID NO: 12129
  modified_base 1..5785: mod_base = OTHER; note = Each t is m1f
  source 1..5785: mol_type = other RNA

SEQ ID NO: 13727 - RNA, 5785 nt, synthetic construct; identical to SEQ ID NO: 12130
  modified_base 1..5785: mod_base = OTHER; note = Each t is m1f
  source 1..5785: mol_type = other RNA

SEQ ID NO: 13728 - RNA, 5785 nt, synthetic construct; identical to SEQ ID NO: 12131
  modified_base 1..5785: mod_base = OTHER; note = Each t is m1f
  source 1..5785: mol_type = other RNA

SEQ ID NO: 13729 - RNA, 5785 nt, synthetic construct; identical to SEQ ID NO: 12132
  modified_base 1..5785: mod_base = OTHER; note = Each t is m1f
  source 1..5785: mol_type = other RNA

SEQ ID NO: 13730 - RNA, 5785 nt, synthetic construct; identical to SEQ ID NO: 12133
  modified_base 1..5785: mod_base = OTHER; note = Each t is m1f
  source 1..5785: mol_type = other RNA

SEQ ID NO: 13731 - RNA, 5785 nt, synthetic construct; identical to SEQ ID NO: 12134
  modified_base 1..5785: mod_base = OTHER; note = Each t is m1f
  source 1..5785: mol_type = other RNA

SEQ ID NO: 13732 - RNA, 5785 nt, synthetic construct; identical to SEQ ID NO: 12135
  modified_base 1..5785: mod_base = OTHER; note = Each t is m1f
  source 1..5785: mol_type = other RNA

SEQ ID NO: 13733 - RNA, 5785 nt, synthetic construct; identical to SEQ ID NO: 12136
  modified_base 1..5785: mod_base = OTHER; note = Each t is m1f
  source 1..5785: mol_type = other RNA

SEQ ID NO: 13734 - RNA, 5785 nt, synthetic construct; identical to SEQ ID NO: 12137
  modified_base 1..5785: mod_base = OTHER; note = Each t is m1f
  source 1..5785: mol_type = other RNA

SEQ ID NO: 13735 - RNA, 5785 nt, synthetic construct; identical to SEQ ID NO: 12138
  modified_base 1..5785: mod_base = OTHER; note = Each t is m1f
  source 1..5785: mol_type = other RNA

SEQ ID NO: 13736 - RNA, 5785 nt, synthetic construct; identical to SEQ ID NO: 12139
  modified_base 1..5785: mod_base = OTHER; note = Each t is m1f
  source 1..5785: mol_type = other RNA

SEQ ID NO: 13737 - RNA, 5785 nt, synthetic construct; identical to SEQ ID NO: 12140
  modified_base 1..5785: mod_base = OTHER; note = Each t is m1f
  source 1..5785: mol_type = other RNA

SEQ ID NO: 13738 - RNA, 5785 nt, synthetic construct; identical to SEQ ID NO: 12141
  modified_base 1..5785: mod_base = OTHER; note = Each t is m1f
  source 1..5785: mol_type = other RNA

SEQ ID NO: 13739 - RNA, 5785 nt, synthetic construct; identical to SEQ ID NO: 12142
  modified_base 1..5785: mod_base = OTHER; note = Each t is m1f
  source 1..5785: mol_type = other RNA

SEQ ID NO: 13740 - RNA, 5785 nt, synthetic construct; identical to SEQ ID NO: 12143
  modified_base 1..5785: mod_base = OTHER; note = Each t is m1f
  source 1..5785: mol_type = other RNA

SEQ ID NO: 13741 - RNA, 5785 nt, synthetic construct; identical to SEQ ID NO: 12144
  modified_base 1..5785: mod_base = OTHER; note = Each t is m1f
  source 1..5785: mol_type = other RNA

SEQ ID NO: 13742 - RNA, 5785 nt, synthetic construct; identical to SEQ ID NO: 12145
  modified_base 1..5785: mod_base = OTHER; note = Each t is m1f
  source 1..5785: mol_type = other RNA

SEQ ID NO: 13743 - RNA, 5785 nt, synthetic construct; identical to SEQ ID NO: 12146
  modified_base 1..5785: mod_base = OTHER; note = Each t is m1f
  source 1..5785: mol_type = other RNA

SEQ ID NO: 13744 - RNA, 5785 nt, synthetic construct; identical to SEQ ID NO: 12147
  modified_base 1..5785: mod_base = OTHER; note = Each t is m1f
  source 1..5785: mol_type = other RNA

SEQ ID NO: 13745 - RNA, 5785 nt, synthetic construct; identical to SEQ ID NO: 12148
  modified_base 1..5785: mod_base = OTHER; note = Each t is m1f
  source 1..5785: mol_type = other RNA

SEQ ID NO: 13746 - RNA, 5785 nt, synthetic construct; identical to SEQ ID NO: 12149
  modified_base 1..5785: mod_base = OTHER; note = Each t is m1f
  source 1..5785: mol_type = other RNA

SEQ ID NO: 13747 - RNA, 5785 nt, synthetic construct; identical to SEQ ID NO: 12150
  modified_base 1..5785: mod_base = OTHER; note = Each t is m1f
  source 1..5785: mol_type = other RNA

SEQ ID NO: 13748 - RNA, 5785 nt, synthetic construct; identical to SEQ ID NO: 12151
  modified_base 1..5785: mod_base = OTHER; note = Each t is m1f
  source 1..5785: mol_type = other RNA

SEQ ID NO: 13749 - RNA, 5785 nt, synthetic construct; identical to SEQ ID NO: 12152
  modified_base 1..5785: mod_base = OTHER; note = Each t is m1f
  source 1..5785: mol_type = other RNA

SEQ ID NO: 13750 - RNA, 5785 nt, synthetic construct; identical to SEQ ID NO: 12153
  modified_base 1..5785: mod_base = OTHER; note = Each t is m1f
  source 1..5785: mol_type = other RNA

SEQ ID NO: 13751 - RNA, 5785 nt, synthetic construct; identical to SEQ ID NO: 12154
  modified_base 1..5785: mod_base = OTHER; note = Each t is m1f
  source 1..5785: mol_type = other RNA

SEQ ID NO: 13752 - RNA, 5785 nt, synthetic construct; identical to SEQ ID NO: 12155
  modified_base 1..5785: mod_base = OTHER; note = Each t is m1f
  source 1..5785: mol_type = other RNA

SEQ ID NO: 13753 - RNA, 5785 nt, synthetic construct; identical to SEQ ID NO: 12156
  modified_base 1..5785: mod_base = OTHER; note = Each t is m1f
  source 1..5785: mol_type = other RNA

SEQ ID NO: 13754 - RNA, 5785 nt, synthetic construct; identical to SEQ ID NO: 12157
  modified_base 1..5785: mod_base = OTHER; note = Each t is m1f
  source 1..5785: mol_type = other RNA

SEQ ID NO: 13755 - RNA, 5794 nt, synthetic construct; identical to SEQ ID NO: 12158
  modified_base 1..5794: mod_base = OTHER; note = Each t is m1f
  source 1..5794: mol_type = other RNA

SEQ ID NO: 13756 - RNA, 5785 nt, synthetic construct; identical to SEQ ID NO: 12159
  modified_base 1..5785: mod_base = OTHER; note = Each t is m1f
  source 1..5785: mol_type = other RNA

SEQ ID NO: 13757 - RNA, 5785 nt, synthetic construct; identical to SEQ ID NO: 12160
  modified_base 1..5785: mod_base = OTHER; note = Each t is m1f
  source 1..5785: mol_type = other RNA

SEQ ID NO: 13758 - RNA, 5785 nt, synthetic construct; identical to SEQ ID NO: 12161
  modified_base 1..5785: mod_base = OTHER; note = Each t is m1f
  source 1..5785: mol_type = other RNA

SEQ ID NO: 13759 - RNA, 5782 nt, synthetic construct; identical to SEQ ID NO: 12162
  modified_base 1..5782: mod_base = OTHER; note = Each t is m1f
  source 1..5782: mol_type = other RNA

SEQ ID NO: 13760 - RNA, 5785 nt, synthetic construct; identical to SEQ ID NO: 12163
  modified_base 1..5785: mod_base = OTHER; note = Each t is m1f
  source 1..5785: mol_type = other RNA

SEQ ID NO: 13761 - RNA, 5785 nt, synthetic construct; identical to SEQ ID NO: 12164
  modified_base 1..5785: mod_base = OTHER; note = Each t is m1f
  source 1..5785: mol_type = other RNA

SEQ ID NO: 13762 - RNA, 5785 nt, synthetic construct; identical to SEQ ID NO: 12165
  modified_base 1..5785: mod_base = OTHER; note = Each t is m1f
  source 1..5785: mol_type = other RNA

SEQ ID NO: 13763 - RNA, 5785 nt, synthetic construct; identical to SEQ ID NO: 12166
  modified_base 1..5785: mod_base = OTHER; note = Each t is m1f
  source 1..5785: mol_type = other RNA

SEQ ID NO: 13764 - RNA, 5785 nt, synthetic construct; identical to SEQ ID NO: 12167
  modified_base 1..5785: mod_base = OTHER; note = Each t is m1f
  source 1..5785: mol_type = other RNA

SEQ ID NO: 13765 - RNA, 5785 nt, synthetic construct; identical to SEQ ID NO: 12168
  modified_base 1..5785: mod_base = OTHER; note = Each t is m1f
  source 1..5785: mol_type = other RNA

SEQ ID NO: 13766 - RNA, 5785 nt, synthetic construct; identical to SEQ ID NO: 12169
  modified_base 1..5785: mod_base = OTHER; note = Each t is m1f
  source 1..5785: mol_type = other RNA

SEQ ID NO: 13767 - RNA, 5785 nt, synthetic construct; identical to SEQ ID NO: 12170
  modified_base 1..5785: mod_base = OTHER; note = Each t is m1f
  source 1..5785: mol_type = other RNA

SEQ ID NO: 13768 - RNA, 5785 nt, synthetic construct; identical to SEQ ID NO: 12171
  modified_base 1..5785: mod_base = OTHER; note = Each t is m1f
  source 1..5785: mol_type = other RNA

SEQ ID NO: 13769 - RNA, 5785 nt, synthetic construct; identical to SEQ ID NO: 12172
  modified_base 1..5785: mod_base = OTHER; note = Each t is m1f
  source 1..5785: mol_type = other RNA

SEQ ID NO: 13770 - RNA, 5785 nt, synthetic construct; identical to SEQ ID NO: 12173
  modified_base 1..5785: mod_base = OTHER; note = Each t is m1f
  source 1..5785: mol_type = other RNA

SEQ ID NO: 13771 - RNA, 5785 nt, synthetic construct; identical to SEQ ID NO: 12174
  modified_base 1..5785: mod_base = OTHER; note = Each t is m1f
  source 1..5785: mol_type = other RNA

SEQ ID NO: 13772 - RNA, 5785 nt, synthetic construct; identical to SEQ ID NO: 12175
  modified_base 1..5785: mod_base = OTHER; note = Each t is m1f
  source 1..5785: mol_type = other RNA

SEQ ID NO: 13773 - RNA, 5785 nt, synthetic construct; identical to SEQ ID NO: 12176
  modified_base 1..5785: mod_base = OTHER; note = Each t is m1f
  source 1..5785: mol_type = other RNA

SEQ ID NO: 13774 - RNA, 5785 nt, synthetic construct; identical to SEQ ID NO: 12177
  modified_base 1..5785: mod_base = OTHER; note = Each t is m1f
  source 1..5785: mol_type = other RNA

SEQ ID NO: 13775 - RNA, 5785 nt, synthetic construct; identical to SEQ ID NO: 12178
  modified_base 1..5785: mod_base = OTHER; note = Each t is m1f
  source 1..5785: mol_type = other RNA

SEQ ID NO: 13776 - RNA, 5785 nt, synthetic construct; identical to SEQ ID NO: 12179
  modified_base 1..5785: mod_base = OTHER; note = Each t is m1f
  source 1..5785: mol_type = other RNA

SEQ ID NO: 13777 - RNA, 5785 nt, synthetic construct; identical to SEQ ID NO: 12180
  modified_base 1..5785: mod_base = OTHER; note = Each t is m1f
  source 1..5785: mol_type = other RNA

SEQ ID NO: 13778 - RNA, 5785 nt, synthetic construct; identical to SEQ ID NO: 12181
  modified_base 1..5785: mod_base = OTHER; note = Each t is m1f
  source 1..5785: mol_type = other RNA

SEQ ID NO: 13779 - RNA, 5785 nt, synthetic construct; identical to SEQ ID NO: 12182
  modified_base 1..5785: mod_base = OTHER; note = Each t is m1f
  source 1..5785: mol_type = other RNA

SEQ ID NO: 13780 - RNA, 5785 nt, synthetic construct; identical to SEQ ID NO: 12183
  modified_base 1..5785: mod_base = OTHER; note = Each t is m1f
  source 1..5785: mol_type = other RNA

SEQ ID NO: 13781 - RNA, 5785 nt, synthetic construct; identical to SEQ ID NO: 12184
  modified_base 1..5785: mod_base = OTHER; note = Each t is m1f
  source 1..5785: mol_type = other RNA

SEQ ID NO: 13782 - RNA, 5785 nt, synthetic construct; identical to SEQ ID NO: 12185
  modified_base 1..5785: mod_base = OTHER; note = Each t is m1f
  source 1..5785: mol_type = other RNA

SEQ ID NO: 13783 - RNA, 5785 nt, synthetic construct; identical to SEQ ID NO: 12186
  modified_base 1..5785: mod_base = OTHER; note = Each t is m1f
  source 1..5785: mol_type = other RNA

SEQ ID NO: 13784 - RNA, 5785 nt, synthetic construct; identical to SEQ ID NO: 12187
  modified_base 1..5785: mod_base = OTHER; note = Each t is m1f
  source 1..5785: mol_type = other RNA

SEQ ID NO: 13785 - RNA, 5785 nt, synthetic construct; identical to SEQ ID NO: 12188
  modified_base 1..5785: mod_base = OTHER; note = Each t is m1f
  source 1..5785: mol_type = other RNA

SEQ ID NO: 13786 - RNA, 5785 nt, synthetic construct; identical to SEQ ID NO: 12189
  modified_base 1..5785: mod_base = OTHER; note = Each t is m1f
  source 1..5785: mol_type = other RNA

SEQ ID NO: 13787 - RNA, 5785 nt, synthetic construct; identical to SEQ ID NO: 12190
  modified_base 1..5785: mod_base = OTHER; note = Each t is m1f
  source 1..5785: mol_type = other RNA

SEQ ID NO: 13788 - RNA, 5785 nt, synthetic construct; identical to SEQ ID NO: 12191
  modified_base 1..5785: mod_base = OTHER; note = Each t is m1f
  source 1..5785: mol_type = other RNA

SEQ ID NO: 13789 - RNA, 5785 nt, synthetic construct; identical to SEQ ID NO: 12192
  modified_base 1..5785: mod_base = OTHER; note = Each t is m1f
  source 1..5785: mol_type = other RNA

SEQ ID NO: 13790 - RNA, 5785 nt, synthetic construct; identical to SEQ ID NO: 12193
  modified_base 1..5785: mod_base = OTHER; note = Each t is m1f
  source 1..5785: mol_type = other RNA

SEQ ID NO: 13791 - RNA, 5785 nt, synthetic construct; identical to SEQ ID NO: 12194
  modified_base 1..5785: mod_base = OTHER; note = Each t is m1f
  source 1..5785: mol_type = other RNA

SEQ ID NO: 13792 - RNA, 5785 nt, synthetic construct; identical to SEQ ID NO: 12195
  modified_base 1..5785: mod_base = OTHER; note = Each t is m1f
  source 1..5785: mol_type = other RNA

SEQ ID NO: 13793 - RNA, 5785 nt, synthetic construct; identical to SEQ ID NO: 12196
  modified_base 1..5785: mod_base = OTHER; note = Each t is m1f
  source 1..5785: mol_type = other RNA

SEQ ID NO: 13794 - RNA, 5785 nt, synthetic construct; identical to SEQ ID NO: 12197
  modified_base 1..5785: mod_base = OTHER; note = Each t is m1f
  source 1..5785: mol_type = other RNA

SEQ ID NO: 13795 - RNA, 5785 nt, synthetic construct; identical to SEQ ID NO: 12198
  modified_base 1..5785: mod_base = OTHER; note = Each t is m1f
  source 1..5785: mol_type = other RNA

SEQ ID NO: 13796 - RNA, 5785 nt, synthetic construct; identical to SEQ ID NO: 12199
  modified_base 1..5785: mod_base = OTHER; note = Each t is m1f
  source 1..5785: mol_type = other RNA

SEQ ID NO: 13797 - RNA, 5785 nt, synthetic construct; identical to SEQ ID NO: 12200
  modified_base 1..5785: mod_base = OTHER; note = Each t is m1f
  source 1..5785: mol_type = other RNA

SEQ ID NO: 13798 - RNA, 5785 nt, synthetic construct; identical to SEQ ID NO: 12201
  modified_base 1..5785: mod_base = OTHER; note = Each t is m1f
  source 1..5785: mol_type = other RNA

SEQ ID NO: 13799 - RNA, 5785 nt, synthetic construct; identical to SEQ ID NO: 12202
  modified_base 1..5785: mod_base = OTHER; note = Each t is m1f
  source 1..5785: mol_type = other RNA

SEQ ID NO: 13800 - RNA, 5785 nt, synthetic construct; identical to SEQ ID NO: 12203
  modified_base 1..5785: mod_base = OTHER; note = Each t is m1f
  source 1..5785: mol_type = other RNA

SEQ ID NO: 13801 - RNA, 5785 nt, synthetic construct; identical to SEQ ID NO: 12204
  modified_base 1..5785: mod_base = OTHER; note = Each t is m1f
  source 1..5785: mol_type = other RNA

SEQ ID NO: 13802 - RNA, 5785 nt, synthetic construct; identical to SEQ ID NO: 12205
  modified_base 1..5785: mod_base = OTHER; note = Each t is m1f
  source 1..5785: mol_type = other RNA

SEQ ID NO: 13803 - RNA, 5785 nt, synthetic construct; identical to SEQ ID NO: 12206
  modified_base 1..5785: mod_base = OTHER; note = Each t is m1f
  source 1..5785: mol_type = other RNA

SEQ ID NO: 13804 - RNA, 5785 nt, synthetic construct; identical to SEQ ID NO: 12207
  modified_base 1..5785: mod_base = OTHER; note = Each t is m1f
  source 1..5785: mol_type = other RNA

SEQ ID NO: 13805 - RNA, 5785 nt, synthetic construct; identical to SEQ ID NO: 12208
  modified_base 1..5785: mod_base = OTHER; note = Each t is m1f
  source 1..5785: mol_type = other RNA

SEQ ID NO: 13806 - RNA, 5785 nt, synthetic construct; identical to SEQ ID NO: 12209
  modified_base 1..5785: mod_base = OTHER; note = Each t is m1f
  source 1..5785: mol_type = other RNA

SEQ ID NO: 13807 - RNA, 5785 nt, synthetic construct; identical to SEQ ID NO: 12210
  modified_base 1..5785: mod_base = OTHER; note = Each t is m1f
  source 1..5785: mol_type = other RNA

SEQ ID NO: 13808 - RNA, 5785 nt, synthetic construct; identical to SEQ ID NO: 12211
  modified_base 1..5785: mod_base = OTHER; note = Each t is m1f
  source 1..5785: mol_type = other RNA

SEQ ID NO: 13809 - RNA, 5785 nt, synthetic construct; identical to SEQ ID NO: 12212
  modified_base 1..5785: mod_base = OTHER; note = Each t is m1f
  source 1..5785: mol_type = other RNA

SEQ ID NO: 13810 - RNA, 5785 nt, synthetic construct; identical to SEQ ID NO: 12213
  modified_base 1..5785: mod_base = OTHER; note = Each t is m1f
  source 1..5785: mol_type = other RNA

SEQ ID NO: 13811 - RNA, 5785 nt, synthetic construct; identical to SEQ ID NO: 12214
  modified_base 1..5785: mod_base = OTHER; note = Each t is m1f
  source 1..5785: mol_type = other RNA

SEQ ID NO: 13812 - RNA, 5785 nt, synthetic construct; identical to SEQ ID NO: 12215
  modified_base 1..5785: mod_base = OTHER; note = Each t is m1f
  source 1..5785: mol_type = other RNA

SEQ ID NO: 13813 - RNA, 5785 nt, synthetic construct; identical to SEQ ID NO: 12216
  modified_base 1..5785: mod_base = OTHER; note = Each t is m1f
  source 1..5785: mol_type = other RNA

SEQ ID NO: 13814 - RNA, 5785 nt, synthetic construct; identical to SEQ ID NO: 12217
  modified_base 1..5785: mod_base = OTHER; note = Each t is m1f
  source 1..5785: mol_type = other RNA

SEQ ID NO: 13815 - RNA, 5785 nt, synthetic construct; identical to SEQ ID NO: 12218
  modified_base 1..5785: mod_base = OTHER; note = Each t is m1f
  source 1..5785: mol_type = other RNA

SEQ ID NO: 13816 - RNA, 5785 nt, synthetic construct; identical to SEQ ID NO: 12219
  modified_base 1..5785: mod_base = OTHER; note = Each t is m1f
  source 1..5785: mol_type = other RNA

SEQ ID NO: 13817 - RNA, 5785 nt, synthetic construct; identical to SEQ ID NO: 12220
  modified_base 1..5785: mod_base = OTHER; note = Each t is m1f
  source 1..5785: mol_type = other RNA

SEQ ID NO: 13818 - RNA, 5785 nt, synthetic construct; identical to SEQ ID NO: 12221
  modified_base 1..5785: mod_base = OTHER; note = Each t is m1f
  source 1..5785: mol_type = other RNA

SEQ ID NO: 13819 - RNA, 5785 nt, synthetic construct; identical to SEQ ID NO: 12222
  modified_base 1..5785: mod_base = OTHER; note = Each t is m1f
  source 1..5785: mol_type = other RNA

SEQ ID NO: 13820 - RNA, 5785 nt, synthetic construct; identical to SEQ ID NO: 12223
  modified_base 1..5785: mod_base = OTHER; note = Each t is m1f
  source 1..5785: mol_type = other RNA

SEQ ID NO: 13821 - RNA, 5785 nt, synthetic construct; identical to SEQ ID NO: 12224
  modified_base 1..5785: mod_base = OTHER; note = Each t is m1f
  source 1..5785: mol_type = other RNA

SEQ ID NO: 13822 - RNA, 5785 nt, synthetic construct; identical to SEQ ID NO: 12225
  modified_base 1..5785: mod_base = OTHER; note = Each t is m1f
  source 1..5785: mol_type = other RNA

SEQ ID NO: 13823 - RNA, 5785 nt, synthetic construct; identical to SEQ ID NO: 12226
  modified_base 1..5785: mod_base = OTHER; note = Each t is m1f
  source 1..5785: mol_type = other RNA

SEQ ID NO: 13824 - RNA, 5785 nt, synthetic construct; identical to SEQ ID NO: 12227
  modified_base 1..5785: mod_base = OTHER; note = Each t is m1f
  source 1..5785: mol_type = other RNA

SEQ ID NO: 13825 - RNA, 5785 nt, synthetic construct; identical to SEQ ID NO: 12228
  modified_base 1..5785: mod_base = OTHER; note = Each t is m1f
  source 1..5785: mol_type = other RNA

SEQ ID NO: 13826 - RNA, 5785 nt, synthetic construct; identical to SEQ ID NO: 12229
  modified_base 1..5785: mod_base = OTHER; note = Each t is m1f
  source 1..5785: mol_type = other RNA

SEQ ID NO: 13827 - RNA, 5785 nt, synthetic construct; identical to SEQ ID NO: 12230
  modified_base 1..5785: mod_base = OTHER; note = Each t is m1f
  source 1..5785: mol_type = other RNA

SEQ ID NO: 13828 - RNA, 5785 nt, synthetic construct; identical to SEQ ID NO: 12231
  modified_base 1..5785: mod_base = OTHER; note = Each t is m1f
  source 1..5785: mol_type = other RNA

SEQ ID NO: 13829 - RNA, 5785 nt, synthetic construct; identical to SEQ ID NO: 12232
  modified_base 1..5785: mod_base = OTHER; note = Each t is m1f
  source 1..5785: mol_type = other RNA

SEQ ID NO: 13830 - RNA, 5785 nt, synthetic construct; identical to SEQ ID NO: 12233
  modified_base 1..5785: mod_base = OTHER; note = Each t is m1f
  source 1..5785: mol_type = other RNA

SEQ ID NO: 13831 - RNA, 5785 nt, synthetic construct; identical to SEQ ID NO: 12234
  modified_base 1..5785: mod_base = OTHER; note = Each t is m1f
  source 1..5785: mol_type = other RNA

SEQ ID NO: 13832 - RNA, 5785 nt, synthetic construct; identical to SEQ ID NO: 12235
  modified_base 1..5785: mod_base = OTHER; note = Each t is m1f
  source 1..5785: mol_type = other RNA

SEQ ID NO: 13833 - RNA, 5785 nt, synthetic construct; identical to SEQ ID NO: 12236
  modified_base 1..5785: mod_base = OTHER; note = Each t is m1f
  source 1..5785: mol_type = other RNA

SEQ ID NO: 13834 - RNA, 5785 nt, synthetic construct; identical to SEQ ID NO: 12237
  modified_base 1..5785: mod_base = OTHER; note = Each t is m1f
  source 1..5785: mol_type = other RNA

SEQ ID NO: 13835 - RNA, 5785 nt, synthetic construct; identical to SEQ ID NO: 12238
  modified_base 1..5785: mod_base = OTHER; note = Each t is m1f
  source 1..5785: mol_type = other RNA

SEQ ID NO: 13836 - RNA, 5785 nt, synthetic construct; identical to SEQ ID NO: 12239
  modified_base 1..5785: mod_base = OTHER; note = Each t is m1f
  source 1..5785: mol_type = other RNA

SEQ ID NO: 13837 - RNA, 5785 nt, synthetic construct; identical to SEQ ID NO: 12240
  modified_base 1..5785: mod_base = OTHER; note = Each t is m1f
  source 1..5785: mol_type = other RNA

SEQ ID NO: 13838 - RNA, 5785 nt, synthetic construct; identical to SEQ ID NO: 12241
  modified_base 1..5785: mod_base = OTHER; note = Each t is m1f
  source 1..5785: mol_type = other RNA

SEQ ID NO: 13839 - RNA, 5785 nt, synthetic construct; identical to SEQ ID NO: 12242
  modified_base 1..5785: mod_base = OTHER; note = Each t is m1f
  source 1..5785: mol_type = other RNA

SEQ ID NO: 13840 - RNA, 5785 nt, synthetic construct; identical to SEQ ID NO: 12243
  modified_base 1..5785: mod_base = OTHER; note = Each t is m1f
  source 1..5785: mol_type = other RNA

SEQ ID NO: 13841 - RNA, 5785 nt, synthetic construct; identical to SEQ ID NO: 12244
  modified_base 1..5785: mod_base = OTHER; note = Each t is m1f
  source 1..5785: mol_type = other RNA

SEQ ID NO: 13842 - RNA, 5785 nt, synthetic construct; identical to SEQ ID NO: 12245
  modified_base 1..5785: mod_base = OTHER; note = Each t is m1f
  source 1..5785: mol_type = other RNA

SEQ ID NO: 13843 - RNA, 5785 nt, synthetic construct; identical to SEQ ID NO: 12246
  modified_base 1..5785: mod_base = OTHER; note = Each t is m1f
  source 1..5785: mol_type = other RNA

SEQ ID NO: 13844 - RNA, 5785 nt, synthetic construct; identical to SEQ ID NO: 12247
  modified_base 1..5785: mod_base = OTHER; note = Each t is m1f
  source 1..5785: mol_type = other RNA

SEQ ID NO: 13845 - RNA, 5785 nt, synthetic construct; identical to SEQ ID NO: 12248
  modified_base 1..5785: mod_base = OTHER; note = Each t is m1f
  source 1..5785: mol_type = other RNA

SEQ ID NO: 13846 - RNA, 5785 nt, synthetic construct; identical to SEQ ID NO: 12249
  modified_base 1..5785: mod_base = OTHER; note = Each t is m1f
  source 1..5785: mol_type = other RNA

SEQ ID NO: 13847 - RNA, 5785 nt, synthetic construct; identical to SEQ ID NO: 12250
  modified_base 1..5785: mod_base = OTHER; note = Each t is m1f
  source 1..5785: mol_type = other RNA

SEQ ID NO: 13848 - RNA, 5785 nt, synthetic construct; identical to SEQ ID NO: 12251
  modified_base 1..5785: mod_base = OTHER; note = Each t is m1f
  source 1..5785: mol_type = other RNA

SEQ ID NO: 13849 - RNA, 5785 nt, synthetic construct; identical to SEQ ID NO: 12252
  modified_base 1..5785: mod_base = OTHER; note = Each t is m1f
  source 1..5785: mol_type = other RNA

SEQ ID NO: 13850 - RNA, 5785 nt, synthetic construct; identical to SEQ ID NO: 12253
  modified_base 1..5785: mod_base = OTHER; note = Each t is m1f
  source 1..5785: mol_type = other RNA

SEQ ID NO: 13851 - RNA, 5785 nt, synthetic construct; identical to SEQ ID NO: 12254
  modified_base 1..5785: mod_base = OTHER; note = Each t is m1f
  source 1..5785: mol_type = other RNA

SEQ ID NO: 13852 - RNA, 5785 nt, synthetic construct; identical to SEQ ID NO: 12255
  modified_base 1..5785: mod_base = OTHER; note = Each t is m1f
  source 1..5785: mol_type = other RNA

SEQ ID NO: 13853 - RNA, 5785 nt, synthetic construct; identical to SEQ ID NO: 12256
  modified_base 1..5785: mod_base = OTHER; note = Each t is m1f
  source 1..5785: mol_type = other RNA

SEQ ID NO: 13854 - RNA, 5785 nt, synthetic construct; identical to SEQ ID NO: 12257
  modified_base 1..5785: mod_base = OTHER; note = Each t is m1f
  source 1..5785: mol_type = other RNA

SEQ ID NO: 13855 - RNA, 5785 nt, synthetic construct; identical to SEQ ID NO: 12258
  modified_base 1..5785: mod_base = OTHER; note = Each t is m1f
  source 1..5785: mol_type = other RNA

SEQ ID NO: 13856 - RNA, 5785 nt, synthetic construct; identical to SEQ ID NO: 12259
  modified_base 1..5785: mod_base = OTHER; note = Each t is m1f
  source 1..5785: mol_type = other RNA

SEQ ID NO: 13857 - RNA, 5785 nt, synthetic construct; identical to SEQ ID NO: 12260
  modified_base 1..5785: mod_base = OTHER; note = Each t is m1f
  source 1..5785: mol_type = other RNA

SEQ ID NO: 13858 - RNA, 5785 nt, synthetic construct; identical to SEQ ID NO: 12261
  modified_base 1..5785: mod_base = OTHER; note = Each t is m1f
  source 1..5785: mol_type = other RNA

SEQ ID NO: 13859 - RNA, 5785 nt, synthetic construct; identical to SEQ ID NO: 12262
  modified_base 1..5785: mod_base = OTHER; note = Each t is m1f
  source 1..5785: mol_type = other RNA

SEQ ID NO: 13860 - RNA, 5785 nt, synthetic construct; identical to SEQ ID NO: 12263
  modified_base 1..5785: mod_base = OTHER; note = Each t is m1f
  source 1..5785: mol_type = other RNA

SEQ ID NO: 13861 - RNA, 5785 nt, synthetic construct; identical to SEQ ID NO: 12264
  modified_base 1..5785: mod_base = OTHER; note = Each t is m1f
  source 1..5785: mol_type = other RNA

SEQ ID NO: 13862 - RNA, 5785 nt, synthetic construct; identical to SEQ ID NO: 12265
  modified_base 1..5785: mod_base = OTHER; note = Each t is m1f
  source 1..5785: mol_type = other RNA

SEQ ID NO: 13863 - RNA, 5782 nt, synthetic construct; identical to SEQ ID NO: 12266
  modified_base 1..5782: mod_base = OTHER; note = Each t is m1f
  source 1..5782: mol_type = other RNA

SEQ ID NO: 13864 - RNA, 5785 nt, synthetic construct; identical to SEQ ID NO: 12267
  modified_base 1..5785: mod_base = OTHER; note = Each t is m1f
  source 1..5785: mol_type = other RNA

SEQ ID NO: 13865 - RNA, 5785 nt, synthetic construct; identical to SEQ ID NO: 12268
  modified_base 1..5785: mod_base = OTHER; note = Each t is m1f
  source 1..5785: mol_type = other RNA

SEQ ID NO: 13866 - RNA, 5785 nt, synthetic construct; identical to SEQ ID NO: 12269
  modified_base 1..5785: mod_base = OTHER; note = Each t is m1f
  source 1..5785: mol_type = other RNA

SEQ ID NO: 13867 - RNA, 5785 nt, synthetic construct; identical to SEQ ID NO: 12270
  modified_base 1..5785: mod_base = OTHER; note = Each t is m1f
  source 1..5785: mol_type = other RNA

SEQ ID NO: 13868 - RNA, 5785 nt, synthetic construct; identical to SEQ ID NO: 12271
  modified_base 1..5785: mod_base = OTHER; note = Each t is m1f
  source 1..5785: mol_type = other RNA

SEQ ID NO: 13869 - RNA, 5785 nt, synthetic construct; identical to SEQ ID NO: 12272
  modified_base 1..5785: mod_base = OTHER; note = Each t is m1f
  source 1..5785: mol_type = other RNA

SEQ ID NO: 13870 - RNA, 5785 nt, synthetic construct; identical to SEQ ID NO: 12273
  modified_base 1..5785: mod_base = OTHER; note = Each t is m1f
  source 1..5785: mol_type = other RNA

SEQ ID NO: 13871 - RNA, 5785 nt, synthetic construct; identical to SEQ ID NO: 12274
  modified_base 1..5785: mod_base = OTHER; note = Each t is m1f
  source 1..5785: mol_type = other RNA

SEQ ID NO: 13872 - RNA, 5785 nt, synthetic construct; identical to SEQ ID NO: 12275
  modified_base 1..5785: mod_base = OTHER; note = Each t is m1f
  source 1..5785: mol_type = other RNA

SEQ ID NO: 13873 - RNA, 5785 nt, synthetic construct; identical to SEQ ID NO: 12276
  modified_base 1..5785: mod_base = OTHER; note = Each t is m1f
  source 1..5785: mol_type = other RNA

SEQ ID NO: 13874 - RNA, 5782 nt, synthetic construct; identical to SEQ ID NO: 12277
  modified_base 1..5782: mod_base = OTHER; note = Each t is m1f
  source 1..5782: mol_type = other RNA

SEQ ID NO: 13875 - RNA, 5785 nt, synthetic construct; identical to SEQ ID NO: 12278
  modified_base 1..5785: mod_base = OTHER; note = Each t is m1f
  source 1..5785: mol_type = other RNA

SEQ ID NO: 13876 - RNA, 5785 nt, synthetic construct; identical to SEQ ID NO: 12279
  modified_base 1..5785: mod_base = OTHER; note = Each t is m1f
  source 1..5785: mol_type = other RNA

SEQ ID NO: 13877 - RNA, 5785 nt, synthetic construct; identical to SEQ ID NO: 12280
  modified_base 1..5785: mod_base = OTHER; note = Each t is m1f
  source 1..5785: mol_type = other RNA

SEQ ID NO: 13878 - RNA, 5785 nt, synthetic construct; identical to SEQ ID NO: 12281
  modified_base 1..5785: mod_base = OTHER; note = Each t is m1f
  source 1..5785: mol_type = other RNA

SEQ ID NO: 13879 - RNA, 5785 nt, synthetic construct; identical to SEQ ID NO: 12282
  modified_base 1..5785: mod_base = OTHER; note = Each t is m1f
  source 1..5785: mol_type = other RNA

SEQ ID NO: 13880 - RNA, 5785 nt, synthetic construct; identical to SEQ ID NO: 12283
  modified_base 1..5785: mod_base = OTHER; note = Each t is m1f
  source 1..5785: mol_type = other RNA

SEQ ID NO: 13881 - RNA, 5785 nt, synthetic construct; identical to SEQ ID NO: 12284
  modified_base 1..5785: mod_base = OTHER; note = Each t is m1f
  source 1..5785: mol_type = other RNA

SEQ ID NO: 13882 - RNA, 5785 nt, synthetic construct; identical to SEQ ID NO: 12285
  modified_base 1..5785: mod_base = OTHER; note = Each t is m1f
  source 1..5785: mol_type = other RNA

SEQ ID NO: 13883 - RNA, 5785 nt, synthetic construct; identical to SEQ ID NO: 12286
  modified_base 1..5785: mod_base = OTHER; note = Each t is m1f
  source 1..5785: mol_type = other RNA

SEQ ID NO: 13884 - RNA, 5785 nt, synthetic construct; identical to SEQ ID NO: 12287
  modified_base 1..5785: mod_base = OTHER; note = Each t is m1f
  source 1..5785: mol_type = other RNA

SEQ ID NO: 13885 - RNA, 5785 nt, synthetic construct; identical to SEQ ID NO: 12288
  modified_base 1..5785: mod_base = OTHER; note = Each t is m1f
  source 1..5785: mol_type = other RNA

SEQ ID NO: 13886 - RNA, 5785 nt, synthetic construct; identical to SEQ ID NO: 12289
  modified_base 1..5785: mod_base = OTHER; note = Each t is m1f
  source 1..5785: mol_type = other RNA

SEQ ID NO: 13887 - RNA, 5785 nt, synthetic construct; identical to SEQ ID NO: 12290
  modified_base 1..5785: mod_base = OTHER; note = Each t is m1f
  source 1..5785: mol_type = other RNA

SEQ ID NO: 13888 - RNA, 5785 nt, synthetic construct; identical to SEQ ID NO: 12291
  modified_base 1..5785: mod_base = OTHER; note = Each t is m1f
  source 1..5785: mol_type = other RNA

SEQ ID NO: 13889 - RNA, 5785 nt, synthetic construct; identical to SEQ ID NO: 12292
  modified_base 1..5785: mod_base = OTHER; note = Each t is m1f
  source 1..5785: mol_type = other RNA

SEQ ID NO: 13890 - RNA, 5785 nt, synthetic construct; identical to SEQ ID NO: 12293
  modified_base 1..5785: mod_base = OTHER; note = Each t is m1f
  source 1..5785: mol_type = other RNA

SEQ ID NO: 13891 - RNA, 5785 nt, synthetic construct; identical to SEQ ID NO: 12294
  modified_base 1..5785: mod_base = OTHER; note = Each t is m1f
  source 1..5785: mol_type = other RNA

SEQ ID NO: 13892 - RNA, 5785 nt, synthetic construct; identical to SEQ ID NO: 12295
  modified_base 1..5785: mod_base = OTHER; note = Each t is m1f
  source 1..5785: mol_type = other RNA

SEQ ID NO: 13893 - RNA, 5785 nt, synthetic construct; identical to SEQ ID NO: 12296
  modified_base 1..5785: mod_base = OTHER; note = Each t is m1f
  source 1..5785: mol_type = other RNA

SEQ ID NO: 13894 - RNA, 5785 nt, synthetic construct; identical to SEQ ID NO: 12297
  modified_base 1..5785: mod_base = OTHER; note = Each t is m1f
  source 1..5785: mol_type = other RNA

SEQ ID NO: 13895 - RNA, 5785 nt, synthetic construct; identical to SEQ ID NO: 12298
  modified_base 1..5785: mod_base = OTHER; note = Each t is m1f
  source 1..5785: mol_type = other RNA

SEQ ID NO: 13896 - RNA, 5785 nt, synthetic construct; identical to SEQ ID NO: 12299
  modified_base 1..5785: mod_base = OTHER; note = Each t is m1f
  source 1..5785: mol_type = other RNA

SEQ ID NO: 13897 - RNA, 5785 nt, synthetic construct; identical to SEQ ID NO: 12300
  modified_base 1..5785: mod_base = OTHER; note = Each t is m1f
  source 1..5785: mol_type = other RNA

SEQ ID NO: 13898 - RNA, 5785 nt, synthetic construct; identical to SEQ ID NO: 12301
  modified_base 1..5785: mod_base = OTHER; note = Each t is m1f
  source 1..5785: mol_type = other RNA

SEQ ID NO: 13899 - RNA, 5785 nt, synthetic construct; identical to SEQ ID NO: 12302
  modified_base 1..5785: mod_base = OTHER; note = Each t is m1f
  source 1..5785: mol_type = other RNA

SEQ ID NO: 13900 - RNA, 5785 nt, synthetic construct; identical to SEQ ID NO: 12303
  modified_base 1..5785: mod_base = OTHER; note = Each t is m1f
  source 1..5785: mol_type = other RNA

SEQ ID NO: 13901 - RNA, 5785 nt, synthetic construct; identical to SEQ ID NO: 12304
  modified_base 1..5785: mod_base = OTHER; note = Each t is m1f
  source 1..5785: mol_type = other RNA

SEQ ID NO: 13902 - RNA, 5782 nt, synthetic construct; identical to SEQ ID NO: 12305
  modified_base 1..5782: mod_base = OTHER; note = Each t is m1f
  source 1..5782: mol_type = other RNA

SEQ ID NO: 13903 - RNA, 5785 nt, synthetic construct; identical to SEQ ID NO: 12306
  modified_base 1..5785: mod_base = OTHER; note = Each t is m1f
  source 1..5785: mol_type = other RNA

SEQ ID NO: 13904 - RNA, 5785 nt, synthetic construct; identical to SEQ ID NO: 12307
  modified_base 1..5785: mod_base = OTHER; note = Each t is m1f
  source 1..5785: mol_type = other RNA

SEQ ID NO: 13905 - RNA, 5785 nt, synthetic construct; identical to SEQ ID NO: 12308
  modified_base 1..5785: mod_base = OTHER; note = Each t is m1f
  source 1..5785: mol_type = other RNA

SEQ ID NO: 13906 - RNA, 5785 nt, synthetic construct; identical to SEQ ID NO: 12309
  modified_base 1..5785: mod_base = OTHER; note = Each t is m1f
  source 1..5785: mol_type = other RNA

SEQ ID NO: 13907 - RNA, 5785 nt, synthetic construct; identical to SEQ ID NO: 12310
  modified_base 1..5785: mod_base = OTHER; note = Each t is m1f
  source 1..5785: mol_type = other RNA

SEQ ID NO: 13908 - RNA, 5785 nt, synthetic construct; identical to SEQ ID NO: 12311
  modified_base 1..5785: mod_base = OTHER; note = Each t is m1f
  source 1..5785: mol_type = other RNA

SEQ ID NO: 13909 - RNA, 5785 nt, synthetic construct; identical to SEQ ID NO: 12312
  modified_base 1..5785: mod_base = OTHER; note = Each t is m1f
  source 1..5785: mol_type = other RNA

SEQ ID NO: 13910 - RNA, 5785 nt, synthetic construct; identical to SEQ ID NO: 12313
  modified_base 1..5785: mod_base = OTHER; note = Each t is m1f
  source 1..5785: mol_type = other RNA

SEQ ID NO: 13911 - RNA, 5785 nt, synthetic construct; identical to SEQ ID NO: 12314
  modified_base 1..5785: mod_base = OTHER; note = Each t is m1f
  source 1..5785: mol_type = other RNA

SEQ ID NO: 13912 - RNA, 5785 nt, synthetic construct; identical to SEQ ID NO: 12315
  modified_base 1..5785: mod_base = OTHER; note = Each t is m1f
  source 1..5785: mol_type = other RNA

SEQ ID NO: 13913 - RNA, 5785 nt, synthetic construct; identical to SEQ ID NO: 12316
  modified_base 1..5785: mod_base = OTHER; note = Each t is m1f
  source 1..5785: mol_type = other RNA

SEQ ID NO: 13914 - RNA, 5785 nt, synthetic construct; identical to SEQ ID NO: 12317
  modified_base 1..5785: mod_base = OTHER; note = Each t is m1f
  source 1..5785: mol_type = other RNA

SEQ ID NO: 13915 - RNA, 5785 nt, synthetic construct; identical to SEQ ID NO: 12318
  modified_base 1..5785: mod_base = OTHER; note = Each t is m1f
  source 1..5785: mol_type = other RNA

SEQ ID NO: 13916 - RNA, 5785 nt, synthetic construct; identical to SEQ ID NO: 12319
  modified_base 1..5785: mod_base = OTHER; note = Each t is m1f
  source 1..5785: mol_type = other RNA

SEQ ID NO: 13917 - RNA, 5785 nt, synthetic construct; identical to SEQ ID NO: 12320
  modified_base 1..5785: mod_base = OTHER; note = Each t is m1f
  source 1..5785: mol_type = other RNA

SEQ ID NO: 13918 - RNA, 5785 nt, synthetic construct; identical to SEQ ID NO: 12321
  modified_base 1..5785: mod_base = OTHER; note = Each t is m1f
  source 1..5785: mol_type = other RNA

SEQ ID NO: 13919 - RNA, 5785 nt, synthetic construct; identical to SEQ ID NO: 12322
  modified_base 1..5785: mod_base = OTHER; note = Each t is m1f
  source 1..5785: mol_type = other RNA

SEQ ID NO: 13920 - RNA, 5785 nt, synthetic construct; identical to SEQ ID NO: 12323
  modified_base 1..5785: mod_base = OTHER; note = Each t is m1f
  source 1..5785: mol_type = other RNA

SEQ ID NO: 13921 - RNA, 5785 nt, synthetic construct; identical to SEQ ID NO: 12324
  modified_base 1..5785: mod_base = OTHER; note = Each t is m1f
  source 1..5785: mol_type = other RNA

SEQ ID NO: 13922 - RNA, 5785 nt, synthetic construct; identical to SEQ ID NO: 12325
  modified_base 1..5785: mod_base = OTHER; note = Each t is m1f
  source 1..5785: mol_type = other RNA

SEQ ID NO: 13923 - RNA, 5785 nt, synthetic construct; identical to SEQ ID NO: 12326
  modified_base 1..5785: mod_base = OTHER; note = Each t is m1f
  source 1..5785: mol_type = other RNA

SEQ ID NO: 13924 - RNA, 5785 nt, synthetic construct; identical to SEQ ID NO: 12327
  modified_base 1..5785: mod_base = OTHER; note = Each t is m1f
  source 1..5785: mol_type = other RNA

SEQ ID NO: 13925 - RNA, 5785 nt, synthetic construct; identical to SEQ ID NO: 12328
  modified_base 1..5785: mod_base = OTHER; note = Each t is m1f
  source 1..5785: mol_type = other RNA

SEQ ID NO: 13926 - RNA, 5785 nt, synthetic construct; identical to SEQ ID NO: 12329
  modified_base 1..5785: mod_base = OTHER; note = Each t is m1f
  source 1..5785: mol_type = other RNA

SEQ ID NO: 13927 - RNA, 5785 nt, synthetic construct; identical to SEQ ID NO: 12330
  modified_base 1..5785: mod_base = OTHER; note = Each t is m1f
  source 1..5785: mol_type = other RNA

SEQ ID NO: 13928 - RNA, 5785 nt, synthetic construct; identical to SEQ ID NO: 12331
  modified_base 1..5785: mod_base = OTHER; note = Each t is m1f
  source 1..5785: mol_type = other RNA

SEQ ID NO: 13929 - RNA, 5785 nt, synthetic construct; identical to SEQ ID NO: 12332
  modified_base 1..5785: mod_base = OTHER; note = Each t is m1f
  source 1..5785: mol_type = other RNA

SEQ ID NO: 13930 - RNA, 5785 nt, synthetic construct; identical to SEQ ID NO: 12333
  modified_base 1..5785: mod_base = OTHER; note = Each t is m1f
  source 1..5785: mol_type = other RNA

SEQ ID NO: 13931 - RNA, 5785 nt, synthetic construct; identical to SEQ ID NO: 12334
  modified_base 1..5785: mod_base = OTHER; note = Each t is m1f
  source 1..5785: mol_type = other RNA

SEQ ID NO: 13932 - RNA, 5785 nt, synthetic construct; identical to SEQ ID NO: 12335
  modified_base 1..5785: mod_base = OTHER; note = Each t is m1f
  source 1..5785: mol_type = other RNA

SEQ ID NO: 13933 - RNA, 5785 nt, synthetic construct; identical to SEQ ID NO: 12336
  modified_base 1..5785: mod_base = OTHER; note = Each t is m1f
  source 1..5785: mol_type = other RNA

SEQ ID NO: 13934 - RNA, 5785 nt, synthetic construct; identical to SEQ ID NO: 12337
  modified_base 1..5785: mod_base = OTHER; note = Each t is m1f
  source 1..5785: mol_type = other RNA

SEQ ID NO: 13935 - RNA, 5785 nt, synthetic construct; identical to SEQ ID NO: 12338
  modified_base 1..5785: mod_base = OTHER; note = Each t is m1f
  source 1..5785: mol_type = other RNA

SEQ ID NO: 13936 - RNA, 5785 nt, synthetic construct; identical to SEQ ID NO: 12339
  modified_base 1..5785: mod_base = OTHER; note = Each t is m1f
  source 1..5785: mol_type = other RNA

SEQ ID NO: 13937 - RNA, 5785 nt, synthetic construct; identical to SEQ ID NO: 12340
  modified_base 1..5785: mod_base = OTHER; note = Each t is m1f
  source 1..5785: mol_type = other RNA

SEQ ID NO: 13938 - RNA, 5785 nt, synthetic construct; identical to SEQ ID NO: 12341
  modified_base 1..5785: mod_base = OTHER; note = Each t is m1f
  source 1..5785: mol_type = other RNA

SEQ ID NO: 13939 - RNA, 5785 nt, synthetic construct; identical to SEQ ID NO: 12342
  modified_base 1..5785: mod_base = OTHER; note = Each t is m1f
  source 1..5785: mol_type = other RNA

SEQ ID NO: 13940 - RNA, 5785 nt, synthetic construct; identical to SEQ ID NO: 12343
  modified_base 1..5785: mod_base = OTHER; note = Each t is m1f
  source 1..5785: mol_type = other RNA

SEQ ID NO: 13941 - RNA, 5785 nt, synthetic construct; identical to SEQ ID NO: 12344
  modified_base 1..5785: mod_base = OTHER; note = Each t is m1f
  source 1..5785: mol_type = other RNA

SEQ ID NO: 13942 - RNA, 5785 nt, synthetic construct; identical to SEQ ID NO: 12345
  modified_base 1..5785: mod_base = OTHER; note = Each t is m1f
  source 1..5785: mol_type = other RNA

SEQ ID NO: 13943 - RNA, 5785 nt, synthetic construct; identical to SEQ ID NO: 12346
  modified_base 1..5785: mod_base = OTHER; note = Each t is m1f
  source 1..5785: mol_type = other RNA

SEQ ID NO: 13944 - RNA, 5785 nt, synthetic construct; identical to SEQ ID NO: 12347
  modified_base 1..5785: mod_base = OTHER; note = Each t is m1f
  source 1..5785: mol_type = other RNA

SEQ ID NO: 13945 - RNA, 5785 nt, synthetic construct; identical to SEQ ID NO: 12348
  modified_base 1..5785: mod_base = OTHER; note = Each t is m1f
  source 1..5785: mol_type = other RNA

SEQ ID NO: 13946 - RNA, 5785 nt, synthetic construct; identical to SEQ ID NO: 12349
  modified_base 1..5785: mod_base = OTHER; note = Each t is m1f
  source 1..5785: mol_type = other RNA

SEQ ID NO: 13947 - RNA, 5785 nt, synthetic construct; identical to SEQ ID NO: 12350
  modified_base 1..5785: mod_base = OTHER; note = Each t is m1f
  source 1..5785: mol_type = other RNA

SEQ ID NO: 13948 - RNA, 5785 nt, synthetic construct; identical to SEQ ID NO: 12351
  modified_base 1..5785: mod_base = OTHER; note = Each t is m1f
  source 1..5785: mol_type = other RNA

SEQ ID NO: 13949 - RNA, 5785 nt, synthetic construct; identical to SEQ ID NO: 12352
  modified_base 1..5785: mod_base = OTHER; note = Each t is m1f
  source 1..5785: mol_type = other RNA

SEQ ID NO: 13950 - RNA, 5785 nt, synthetic construct; identical to SEQ ID NO: 12353
  modified_base 1..5785: mod_base = OTHER; note = Each t is m1f
  source 1..5785: mol_type = other RNA

SEQ ID NO: 13951 - RNA, 5785 nt, synthetic construct; identical to SEQ ID NO: 12354
  modified_base 1..5785: mod_base = OTHER; note = Each t is m1f
  source 1..5785: mol_type = other RNA

SEQ ID NO: 13952 - RNA, 5785 nt, synthetic construct; identical to SEQ ID NO: 12355
  modified_base 1..5785: mod_base = OTHER; note = Each t is m1f
  source 1..5785: mol_type = other RNA

SEQ ID NO: 13953 - RNA, 5785 nt, synthetic construct; identical to SEQ ID NO: 12356
  modified_base 1..5785: mod_base = OTHER; note = Each t is m1f
  source 1..5785: mol_type = other RNA

SEQ ID NO: 13954 - RNA, 5785 nt, synthetic construct; identical to SEQ ID NO: 12357
  modified_base 1..5785: mod_base = OTHER; note = Each t is m1f
  source 1..5785: mol_type = other RNA

SEQ ID NO: 13955 - RNA, 5794 nt, synthetic construct; identical to SEQ ID NO: 12358
  modified_base 1..5794: mod_base = OTHER; note = Each t is m1f
  source 1..5794: mol_type = other RNA

SEQ ID NO: 13956 - RNA, 5785 nt, synthetic construct; identical to SEQ ID NO: 12359
  modified_base 1..5785: mod_base = OTHER; note = Each t is m1f
  source 1..5785: mol_type = other RNA

SEQ ID NO: 13957 - RNA, 5785 nt, synthetic construct; identical to SEQ ID NO: 12360
  modified_base 1..5785: mod_base = OTHER; note = Each t is m1f
  source 1..5785: mol_type = other RNA

SEQ ID NO: 13958 - RNA, 5785 nt, synthetic construct; identical to SEQ ID NO: 12361
  modified_base 1..5785: mod_base = OTHER; note = Each t is m1f
  source 1..5785: mol_type = other RNA

SEQ ID NO: 13959 - RNA, 5785 nt, synthetic construct; identical to SEQ ID NO: 12362
  modified_base 1..5785: mod_base = OTHER; note = Each t is m1f
  source 1..5785: mol_type = other RNA

SEQ ID NO: 13960 - RNA, 5785 nt, synthetic construct; identical to SEQ ID NO: 12363
  modified_base 1..5785: mod_base = OTHER; note = Each t is m1f
  source 1..5785: mol_type = other RNA

SEQ ID NO: 13961 - RNA, 5782 nt, synthetic construct; identical to SEQ ID NO: 12364
  modified_base 1..5782: mod_base = OTHER; note = Each t is m1f
  source 1..5782: mol_type = other RNA

SEQ ID NO: 13962 - RNA, 5785 nt, synthetic construct; identical to SEQ ID NO: 12365
  modified_base 1..5785: mod_base = OTHER; note = Each t is m1f
  source 1..5785: mol_type = other RNA

SEQ ID NO: 13963 - RNA, 5785 nt, synthetic construct; identical to SEQ ID NO: 12366
  modified_base 1..5785: mod_base = OTHER; note = Each t is m1f
  source 1..5785: mol_type = other RNA

SEQ ID NO: 13964 - RNA, 5785 nt, synthetic construct; identical to SEQ ID NO: 12367
  modified_base 1..5785: mod_base = OTHER; note = Each t is m1f
  source 1..5785: mol_type = other RNA

SEQ ID NO: 13965 - RNA, 5785 nt, synthetic construct; identical to SEQ ID NO: 12368
  modified_base 1..5785: mod_base = OTHER; note = Each t is m1f
  source 1..5785: mol_type = other RNA

SEQ ID NO: 13966 - RNA, 5785 nt, synthetic construct; identical to SEQ ID NO: 12369
  modified_base 1..5785: mod_base = OTHER; note = Each t is m1f
  source 1..5785: mol_type = other RNA

SEQ ID NO: 13967 - RNA, 5785 nt, synthetic construct; identical to SEQ ID NO: 12370
  modified_base 1..5785: mod_base = OTHER; note = Each t is m1f
  source 1..5785: mol_type = other RNA

SEQ ID NO: 13968 - RNA, 5803 nt, synthetic construct; identical to SEQ ID NO: 12371
  modified_base 1..5803: mod_base = OTHER; note = Each t is m1f
  source 1..5803: mol_type = other RNA

SEQ ID NO: 13969 - RNA, 5785 nt, synthetic construct; identical to SEQ ID NO: 12372
  modified_base 1..5785: mod_base = OTHER; note = Each t is m1f
  source 1..5785: mol_type = other RNA

SEQ ID NO: 13970 - RNA, 5785 nt, synthetic construct; identical to SEQ ID NO: 12373
  modified_base 1..5785: mod_base = OTHER; note = Each t is m1f
  source 1..5785: mol_type = other RNA

SEQ ID NO: 13971 - RNA, 5785 nt, synthetic construct; identical to SEQ ID NO: 12374
  modified_base 1..5785: mod_base = OTHER; note = Each t is m1f
  source 1..5785: mol_type = other RNA

SEQ ID NO: 13972 - RNA, 5785 nt, synthetic construct; identical to SEQ ID NO: 12375
  modified_base 1..5785: mod_base = OTHER; note = Each t is m1f
  source 1..5785: mol_type = other RNA

SEQ ID NO: 13973 - RNA, 5785 nt, synthetic construct; identical to SEQ ID NO: 12376
  modified_base 1..5785: mod_base = OTHER; note = Each t is m1f
  source 1..5785: mol_type = other RNA

SEQ ID NO: 13974 - RNA, 5785 nt, synthetic construct; identical to SEQ ID NO: 12377
  modified_base 1..5785: mod_base = OTHER; note = Each t is m1f
  source 1..5785: mol_type = other RNA

SEQ ID NO: 13975 - RNA, 5785 nt, synthetic construct; identical to SEQ ID NO: 12378
  modified_base 1..5785: mod_base = OTHER; note = Each t is m1f
  source 1..5785: mol_type = other RNA

SEQ ID NO: 13976 - RNA, 5785 nt, synthetic construct; identical to SEQ ID NO: 12379
  modified_base 1..5785: mod_base = OTHER; note = Each t is m1f
  source 1..5785: mol_type = other RNA

SEQ ID NO: 13977 - RNA, 5785 nt, synthetic construct; identical to SEQ ID NO: 12380
  modified_base 1..5785: mod_base = OTHER; note = Each t is m1f
  source 1..5785: mol_type = other RNA

SEQ ID NO: 13978 - RNA, 5785 nt, synthetic construct; identical to SEQ ID NO: 12381
  modified_base 1..5785: mod_base = OTHER; note = Each t is m1f
  source 1..5785: mol_type = other RNA

SEQ ID NO: 13979 - RNA, 5785 nt, synthetic construct; identical to SEQ ID NO: 12382
  modified_base 1..5785: mod_base = OTHER; note = Each t is m1f
  source 1..5785: mol_type = other RNA

SEQ ID NO: 13980 - RNA, 5785 nt, synthetic construct; identical to SEQ ID NO: 12383
  modified_base 1..5785: mod_base = OTHER; note = Each t is m1f
  source 1..5785: mol_type = other RNA

SEQ ID NO: 13981 - RNA, 5785 nt, synthetic construct; identical to SEQ ID NO: 12384
  modified_base 1..5785: mod_base = OTHER; note = Each t is m1f
  source 1..5785: mol_type = other RNA

SEQ ID NO: 13982 - RNA, 5785 nt, synthetic construct; identical to SEQ ID NO: 12385
  modified_base 1..5785: mod_base = OTHER; note = Each t is m1f
  source 1..5785: mol_type = other RNA

SEQ ID NO: 13983 - RNA, 5785 nt, synthetic construct; identical to SEQ ID NO: 12386
  modified_base 1..5785: mod_base = OTHER; note = Each t is m1f
  source 1..5785: mol_type = other RNA

SEQ ID NO: 13984 - RNA, 5785 nt, synthetic construct; identical to SEQ ID NO: 12387
  modified_base 1..5785: mod_base = OTHER; note = Each t is m1f
  source 1..5785: mol_type = other RNA

SEQ ID NO: 13985 - RNA, 5785 nt, synthetic construct; identical to SEQ ID NO: 12388
  modified_base 1..5785: mod_base = OTHER; note = Each t is m1f
  source 1..5785: mol_type = other RNA

SEQ ID NO: 13986 - RNA, 5785 nt, synthetic construct; identical to SEQ ID NO: 12389
  modified_base 1..5785: mod_base = OTHER; note = Each t is m1f
  source 1..5785: mol_type = other RNA

SEQ ID NO: 13987 - RNA, 5785 nt, synthetic construct; identical to SEQ ID NO: 12390
  modified_base 1..5785: mod_base = OTHER; note = Each t is m1f
  source 1..5785: mol_type = other RNA

SEQ ID NO: 13988 - RNA, 5785 nt, synthetic construct; identical to SEQ ID NO: 12391
  modified_base 1..5785: mod_base = OTHER; note = Each t is m1f
  source 1..5785: mol_type = other RNA

SEQ ID NO: 13989 - RNA, 5785 nt, synthetic construct; identical to SEQ ID NO: 12392
  modified_base 1..5785: mod_base = OTHER; note = Each t is m1f
  source 1..5785: mol_type = other RNA

SEQ ID NO: 13990 - RNA, 5785 nt, synthetic construct; identical to SEQ ID NO: 12393
  modified_base 1..5785: mod_base = OTHER; note = Each t is m1f
  source 1..5785: mol_type = other RNA

SEQ ID NO: 13991 - RNA, 5785 nt, synthetic construct; identical to SEQ ID NO: 12394
  modified_base 1..5785: mod_base = OTHER; note = Each t is m1f
  source 1..5785: mol_type = other RNA

SEQ ID NO: 13992 - RNA, 5785 nt, synthetic construct; identical to SEQ ID NO: 12395
  modified_base 1..5785: mod_base = OTHER; note = Each t is m1f
  source 1..5785: mol_type = other RNA

SEQ ID NO: 13993 - RNA, 5785 nt, synthetic construct; identical to SEQ ID NO: 12396
  modified_base 1..5785: mod_base = OTHER; note = Each t is m1f
  source 1..5785: mol_type = other RNA

SEQ ID NO: 13994 - RNA, 5785 nt, synthetic construct; identical to SEQ ID NO: 12397
  modified_base 1..5785: mod_base = OTHER; note = Each t is m1f
  source 1..5785: mol_type = other RNA

SEQ ID NO: 13995 - RNA, 5785 nt, synthetic construct; identical to SEQ ID NO: 12398
  modified_base 1..5785: mod_base = OTHER; note = Each t is m1f
  source 1..5785: mol_type = other RNA

SEQ ID NO: 13996 - RNA, 5785 nt, synthetic construct; identical to SEQ ID NO: 12399
  modified_base 1..5785: mod_base = OTHER; note = Each t is m1f
  source 1..5785: mol_type = other RNA

SEQ ID NO: 13997 - RNA, 5785 nt, synthetic construct; identical to SEQ ID NO: 12400
  modified_base 1..5785: mod_base = OTHER; note = Each t is m1f
  source 1..5785: mol_type = other RNA

SEQ ID NO: 13998 - RNA, 5785 nt, synthetic construct; identical to SEQ ID NO: 12401
  modified_base 1..5785: mod_base = OTHER; note = Each t is m1f
  source 1..5785: mol_type = other RNA

SEQ ID NO: 13999 - RNA, 5785 nt, synthetic construct; identical to SEQ ID NO: 12402
  modified_base 1..5785: mod_base = OTHER; note = Each t is m1f
  source 1..5785: mol_type = other RNA

SEQ ID NO: 14000 - RNA, 5785 nt, synthetic construct; identical to SEQ ID NO: 12403
  modified_base 1..5785: mod_base = OTHER; note = Each t is m1f
  source 1..5785: mol_type = other RNA

SEQ ID NO: 14001 - RNA, 5803 nt, synthetic construct; identical to SEQ ID NO: 12404
  modified_base 1..5803: mod_base = OTHER; note = Each t is m1f
  source 1..5803: mol_type = other RNA

SEQ ID NO: 14002 - RNA, 5785 nt, synthetic construct; identical to SEQ ID NO: 12405
  modified_base 1..5785: mod_base = OTHER; note = Each t is m1f
  source 1..5785: mol_type = other RNA

SEQ ID NO: 14003 - RNA, 5785 nt, synthetic construct; identical to SEQ ID NO: 12406
  modified_base 1..5785: mod_base = OTHER; note = Each t is m1f
  source 1..5785: mol_type = other RNA

SEQ ID NO: 14004 - RNA, 5785 nt, synthetic construct; identical to SEQ ID NO: 12407
  modified_base 1..5785: mod_base = OTHER; note = Each t is m1f
  source 1..5785: mol_type = other RNA

SEQ ID NO: 14005 - RNA, 5785 nt, synthetic construct; identical to SEQ ID NO: 12408
  modified_base 1..5785: mod_base = OTHER; note = Each t is m1f
  source 1..5785: mol_type = other RNA

SEQ ID NO: 14006 - RNA, 5785 nt, synthetic construct; identical to SEQ ID NO: 12409
  modified_base 1..5785: mod_base = OTHER; note = Each t is m1f
  source 1..5785: mol_type = other RNA

SEQ ID NO: 14007 - RNA, 5785 nt, synthetic construct; identical to SEQ ID NO: 12410
  modified_base 1..5785: mod_base = OTHER; note = Each t is m1f
  source 1..5785: mol_type = other RNA

SEQ ID NO: 14008 - RNA, 5785 nt, synthetic construct; identical to SEQ ID NO: 12411
  modified_base 1..5785: mod_base = OTHER; note = Each t is m1f
  source 1..5785: mol_type = other RNA

SEQ ID NO: 14009 - RNA, 5785 nt, synthetic construct; identical to SEQ ID NO: 12412
  modified_base 1..5785: mod_base = OTHER; note = Each t is m1f
  source 1..5785: mol_type = other RNA

SEQ ID NO: 14010 - RNA, 5794 nt, synthetic construct; identical to SEQ ID NO: 12413
  modified_base 1..5794: mod_base = OTHER; note = Each t is m1f
  source 1..5794: mol_type = other RNA

SEQ ID NO: 14011 - RNA, 5785 nt, synthetic construct; identical to SEQ ID NO: 12414
  modified_base 1..5785: mod_base = OTHER; note = Each t is m1f
  source 1..5785: mol_type = other RNA

SEQ ID NO: 14012 - RNA, 5785 nt, synthetic construct; identical to SEQ ID NO: 12415
  modified_base 1..5785: mod_base = OTHER; note = Each t is m1f
  source 1..5785: mol_type = other RNA

SEQ ID NO: 14013 - RNA, 5785 nt, synthetic construct; identical to SEQ ID NO: 12416
  modified_base 1..5785: mod_base = OTHER; note = Each t is m1f
  source 1..5785: mol_type = other RNA

SEQ ID NO: 14014 - RNA, 5785 nt, synthetic construct; identical to SEQ ID NO: 12417
  modified_base 1..5785: mod_base = OTHER; note = Each t is m1f
  source 1..5785: mol_type = other RNA

SEQ ID NO: 14015 - RNA, 5785 nt, synthetic construct; identical to SEQ ID NO: 12418
  modified_base 1..5785: mod_base = OTHER; note = Each t is m1f
  source 1..5785: mol_type = other RNA

SEQ ID NO: 14016 - RNA, 5785 nt, synthetic construct; identical to SEQ ID NO: 12419
  modified_base 1..5785: mod_base = OTHER; note = Each t is m1f
  source 1..5785: mol_type = other RNA

SEQ ID NO: 14017 - RNA, 5785 nt, synthetic construct; identical to SEQ ID NO: 12420
  modified_base 1..5785: mod_base = OTHER; note = Each t is m1f
  source 1..5785: mol_type = other RNA

SEQ ID NO: 14018 - RNA, 5782 nt, synthetic construct; identical to SEQ ID NO: 12421
  modified_base 1..5782: mod_base = OTHER; note = Each t is m1f
  source 1..5782: mol_type = other RNA

SEQ ID NO: 14019 - RNA, 5785 nt, synthetic construct; identical to SEQ ID NO: 12422
  modified_base 1..5785: mod_base = OTHER; note = Each t is m1f
  source 1..5785: mol_type = other RNA

SEQ ID NO: 14020 - RNA, 5785 nt, synthetic construct; identical to SEQ ID NO: 12423
  modified_base 1..5785: mod_base = OTHER; note = Each t is m1f
  source 1..5785: mol_type = other RNA

SEQ ID NO: 14021 - RNA, 5785 nt, synthetic construct; identical to SEQ ID NO: 12424
  modified_base 1..5785: mod_base = OTHER; note = Each t is m1f
  source 1..5785: mol_type = other RNA

SEQ ID NO: 14022 - RNA, 5785 nt, synthetic construct; identical to SEQ ID NO: 12425
  modified_base 1..5785: mod_base = OTHER; note = Each t is m1f
  source 1..5785: mol_type = other RNA

SEQ ID NO: 14023 - RNA, 5785 nt, synthetic construct; identical to SEQ ID NO: 12426
  modified_base 1..5785: mod_base = OTHER; note = Each t is m1f
  source 1..5785: mol_type = other RNA

SEQ ID NO: 14024 - RNA, 5785 nt, synthetic construct; identical to SEQ ID NO: 12427
  modified_base 1..5785: mod_base = OTHER; note = Each t is m1f
  source 1..5785: mol_type = other RNA

SEQ ID NO: 14025 - RNA, 5785 nt, synthetic construct; identical to SEQ ID NO: 12428
  modified_base 1..5785: mod_base = OTHER; note = Each t is m1f
  source 1..5785: mol_type = other RNA

SEQ ID NO: 14026 - RNA, 5785 nt, synthetic construct; identical to SEQ ID NO: 12429
  modified_base 1..5785: mod_base = OTHER; note = Each t is m1f
  source 1..5785: mol_type = other RNA

SEQ ID NO: 14027 - RNA, 5785 nt, synthetic construct; identical to SEQ ID NO: 12430
  modified_base 1..5785: mod_base = OTHER; note = Each t is m1f
  source 1..5785: mol_type = other RNA

SEQ ID NO: 14028 - RNA, 5785 nt, synthetic construct; identical to SEQ ID NO: 12431
  modified_base 1..5785: mod_base = OTHER; note = Each t is m1f
  source 1..5785: mol_type = other RNA

SEQ ID NO: 14029 - RNA, 5785 nt, synthetic construct; identical to SEQ ID NO: 12432
  modified_base 1..5785: mod_base = OTHER; note = Each t is m1f
  source 1..5785: mol_type = other RNA

SEQ ID NO: 14030 - RNA, 5785 nt, synthetic construct; identical to SEQ ID NO: 12433
  modified_base 1..5785: mod_base = OTHER; note = Each t is m1f
  source 1..5785: mol_type = other RNA

SEQ ID NO: 14031 - RNA, 5785 nt, synthetic construct; identical to SEQ ID NO: 12434
  modified_base 1..5785: mod_base = OTHER; note = Each t is m1f
  source 1..5785: mol_type = other RNA

SEQ ID NO: 14032 - RNA, 5785 nt, synthetic construct; identical to SEQ ID NO: 12435
  modified_base 1..5785: mod_base = OTHER; note = Each t is m1f
  source 1..5785: mol_type = other RNA

SEQ ID NO: 14033 - RNA, 5785 nt, synthetic construct; identical to SEQ ID NO: 12436
  modified_base 1..5785: mod_base = OTHER; note = Each t is m1f
  source 1..5785: mol_type = other RNA

SEQ ID NO: 14034 - RNA, 5785 nt, synthetic construct; identical to SEQ ID NO: 12437
  modified_base 1..5785: mod_base = OTHER; note = Each t is m1f
  source 1..5785: mol_type = other RNA

SEQ ID NO: 14035 - RNA, 5785 nt, synthetic construct; identical to SEQ ID NO: 12438
  modified_base 1..5785: mod_base = OTHER; note = Each t is m1f
  source 1..5785: mol_type = other RNA

SEQ ID NO: 14036 - RNA, 5785 nt, synthetic construct; identical to SEQ ID NO: 12439
  modified_base 1..5785: mod_base = OTHER; note = Each t is m1f
  source 1..5785: mol_type = other RNA

SEQ ID NO: 14037 - RNA, 5785 nt, synthetic construct; identical to SEQ ID NO: 12440
  modified_base 1..5785: mod_base = OTHER; note = Each t is m1f
  source 1..5785: mol_type = other RNA

SEQ ID NO: 14038 - RNA, 5785 nt, synthetic construct; identical to SEQ ID NO: 12441
  modified_base 1..5785: mod_base = OTHER; note = Each t is m1f
  source 1..5785: mol_type = other RNA

SEQ ID NO: 14039 - RNA, 5785 nt, synthetic construct; identical to SEQ ID NO: 12442
  modified_base 1..5785: mod_base = OTHER; note = Each t is m1f
  source 1..5785: mol_type = other RNA

SEQ ID NO: 14040 - RNA, 5785 nt, synthetic construct; identical to SEQ ID NO: 12443
  modified_base 1..5785: mod_base = OTHER; note = Each t is m1f
  source 1..5785: mol_type = other RNA

SEQ ID NO: 14041 - RNA, 5785 nt, synthetic construct; identical to SEQ ID NO: 12444
  modified_base 1..5785: mod_base = OTHER; note = Each t is m1f
  source 1..5785: mol_type = other RNA

SEQ ID NO: 14042 - RNA, 5785 nt, synthetic construct; identical to SEQ ID NO: 12445
  modified_base 1..5785: mod_base = OTHER; note = Each t is m1f
  source 1..5785: mol_type = other RNA

SEQ ID NO: 14043 - RNA, 5785 nt, synthetic construct; identical to SEQ ID NO: 12446
  modified_base 1..5785: mod_base = OTHER; note = Each t is m1f
  source 1..5785: mol_type = other RNA

SEQ ID NO: 14044 - RNA, 5785 nt, synthetic construct; identical to SEQ ID NO: 12447
  modified_base 1..5785: mod_base = OTHER; note = Each t is m1f
  source 1..5785: mol_type = other RNA

SEQ ID NO: 14045 - RNA, 5785 nt, synthetic construct; identical to SEQ ID NO: 12448
  modified_base 1..5785: mod_base = OTHER; note = Each t is m1f
  source 1..5785: mol_type = other RNA

SEQ ID NO: 14046 - RNA, 5785 nt, synthetic construct; identical to SEQ ID NO: 12449
  modified_base 1..5785: mod_base = OTHER; note = Each t is m1f
  source 1..5785: mol_type = other RNA

SEQ ID NO: 14047 - RNA, 5785 nt, synthetic construct; identical to SEQ ID NO: 12450
  modified_base 1..5785: mod_base = OTHER; note = Each t is m1f
  source 1..5785: mol_type = other RNA

SEQ ID NO: 14048 - RNA, 5785 nt, synthetic construct; identical to SEQ ID NO: 12451
  modified_base 1..5785: mod_base = OTHER; note = Each t is m1f
  source 1..5785: mol_type = other RNA

SEQ ID NO: 14049 - RNA, 5785 nt, synthetic construct; identical to SEQ ID NO: 12452
  modified_base 1..5785: mod_base = OTHER; note = Each t is m1f
  source 1..5785: mol_type = other RNA

SEQ ID NO: 14050 - RNA, 5785 nt, synthetic construct; identical to SEQ ID NO: 12453
  modified_base 1..5785: mod_base = OTHER; note = Each t is m1f
  source 1..5785: mol_type = other RNA

SEQ ID NO: 14051 - RNA, 5785 nt, synthetic construct; identical to SEQ ID NO: 12454
  modified_base 1..5785: mod_base = OTHER; note = Each t is m1f
  source 1..5785: mol_type = other RNA

SEQ ID NO: 14052 - RNA, 5821 nt, synthetic construct; identical to SEQ ID NO: 12455
  modified_base 1..5821: mod_base = OTHER; note = Each t is m1f
  source 1..5821: mol_type = other RNA

SEQ ID NO: 14053 - RNA, 5785 nt, synthetic construct; identical to SEQ ID NO: 12456
  modified_base 1..5785: mod_base = OTHER; note = Each t is m1f
  source 1..5785: mol_type = other RNA

SEQ ID NO: 14054 - RNA, 5785 nt, synthetic construct; identical to SEQ ID NO: 12457
  modified_base 1..5785: mod_base = OTHER; note = Each t is m1f
  source 1..5785: mol_type = other RNA

SEQ ID NO: 14055 - RNA, 5785 nt, synthetic construct; identical to SEQ ID NO: 12458
  modified_base 1..5785: mod_base = OTHER; note = Each t is m1f
  source 1..5785: mol_type = other RNA

SEQ ID NO: 14056 - RNA, 5785 nt, synthetic construct; identical to SEQ ID NO: 12459
  modified_base 1..5785: mod_base = OTHER; note = Each t is m1f
  source 1..5785: mol_type = other RNA

SEQ ID NO: 14057 - RNA, 5785 nt, synthetic construct; identical to SEQ ID NO: 12460
  modified_base 1..5785: mod_base = OTHER; note = Each t is m1f
  source 1..5785: mol_type = other RNA

SEQ ID NO: 14058 - RNA, 5785 nt, synthetic construct; identical to SEQ ID NO: 12461
  modified_base 1..5785: mod_base = OTHER; note = Each t is m1f
  source 1..5785: mol_type = other RNA

SEQ ID NO: 14059 - RNA, 5785 nt, synthetic construct; identical to SEQ ID NO: 12462
  modified_base 1..5785: mod_base = OTHER; note = Each t is m1f
  source 1..5785: mol_type = other RNA

SEQ ID NO: 14060 - RNA, 5785 nt, synthetic construct; identical to SEQ ID NO: 12463
  modified_base 1..5785: mod_base = OTHER; note = Each t is m1f
  source 1..5785: mol_type = other RNA

SEQ ID NO: 14061 - RNA, 5785 nt, synthetic construct; identical to SEQ ID NO: 12464
  modified_base 1..5785: mod_base = OTHER; note = Each t is m1f
  source 1..5785: mol_type = other RNA

SEQ ID NO: 14062 - RNA, 5785 nt, synthetic construct; identical to SEQ ID NO: 12465
  modified_base 1..5785: mod_base = OTHER; note = Each t is m1f
  source 1..5785: mol_type = other RNA

SEQ ID NO: 14063 - RNA, 5785 nt, synthetic construct; identical to SEQ ID NO: 12466
  modified_base 1..5785: mod_base = OTHER; note = Each t is m1f
  source 1..5785: mol_type = other RNA

SEQ ID NO: 14064 - RNA, 5785 nt, synthetic construct; identical to SEQ ID NO: 12467
  modified_base 1..5785: mod_base = OTHER; note = Each t is m1f
  source 1..5785: mol_type = other RNA

SEQ ID NO: 14065 - RNA, 5785 nt, synthetic construct; identical to SEQ ID NO: 12468
  modified_base 1..5785: mod_base = OTHER; note = Each t is m1f
  source 1..5785: mol_type = other RNA

SEQ ID NO: 14066 - RNA, 5785 nt, synthetic construct; identical to SEQ ID NO: 12469
  modified_base 1..5785: mod_base = OTHER; note = Each t is m1f
  source 1..5785: mol_type = other RNA

SEQ ID NO: 14067 - RNA, 5785 nt, synthetic construct; identical to SEQ ID NO: 12470
  modified_base 1..5785: mod_base = OTHER; note = Each t is m1f
  source 1..5785: mol_type = other RNA

SEQ ID NO: 14068 - RNA, 5785 nt, synthetic construct; identical to SEQ ID NO: 12471
  modified_base 1..5785: mod_base = OTHER; note = Each t is m1f
  source 1..5785: mol_type = other RNA

SEQ ID NO: 14069 - RNA, 5785 nt, synthetic construct; identical to SEQ ID NO: 12472
  modified_base 1..5785: mod_base = OTHER; note = Each t is m1f
  source 1..5785: mol_type = other RNA

SEQ ID NO: 14070 - RNA, 5785 nt, synthetic construct; identical to SEQ ID NO: 12473
  modified_base 1..5785: mod_base = OTHER; note = Each t is m1f
  source 1..5785: mol_type = other RNA

SEQ ID NO: 14071 - RNA, 5785 nt, synthetic construct; identical to SEQ ID NO: 12474
  modified_base 1..5785: mod_base = OTHER; note = Each t is m1f
  source 1..5785: mol_type = other RNA

SEQ ID NO: 14072 - RNA, 5785 nt, synthetic construct; identical to SEQ ID NO: 12475
  modified_base 1..5785: mod_base = OTHER; note = Each t is m1f
  source 1..5785: mol_type = other RNA

SEQ ID NO: 14073 - RNA, 5785 nt, synthetic construct; identical to SEQ ID NO: 12476
  modified_base 1..5785: mod_base = OTHER; note = Each t is m1f
  source 1..5785: mol_type = other RNA

SEQ ID NO: 14074 - RNA, 5785 nt, synthetic construct; identical to SEQ ID NO: 12477
  modified_base 1..5785: mod_base = OTHER; note = Each t is m1f
  source 1..5785: mol_type = other RNA

SEQ ID NO: 14075 - RNA, 5785 nt, synthetic construct; identical to SEQ ID NO: 12478
  modified_base 1..5785: mod_base = OTHER; note = Each t is m1f
  source 1..5785: mol_type = other RNA

SEQ ID NO: 14076 - RNA, 5785 nt, synthetic construct; identical to SEQ ID NO: 12479
  modified_base 1..5785: mod_base = OTHER; note = Each t is m1f
  source 1..5785: mol_type = other RNA

SEQ ID NO: 14077 - RNA, 5785 nt, synthetic construct; identical to SEQ ID NO: 12480
  modified_base 1..5785: mod_base = OTHER; note = Each t is m1f
  source 1..5785: mol_type = other RNA

SEQ ID NO: 14078 - RNA, 5785 nt, synthetic construct; identical to SEQ ID NO: 12481
  modified_base 1..5785: mod_base = OTHER; note = Each t is m1f
  source 1..5785: mol_type = other RNA

SEQ ID NO: 14079 - RNA, 5785 nt, synthetic construct; identical to SEQ ID NO: 12482
  modified_base 1..5785: mod_base = OTHER; note = Each t is m1f
  source 1..5785: mol_type = other RNA

SEQ ID NO: 14080 - RNA, 5785 nt, synthetic construct; identical to SEQ ID NO: 12483
  modified_base 1..5785: mod_base = OTHER; note = Each t is m1f
  source 1..5785: mol_type = other RNA

SEQ ID NO: 14081 - RNA, 5785 nt, synthetic construct; identical to SEQ ID NO: 12484
  modified_base 1..5785: mod_base = OTHER; note = Each t is m1f
  source 1..5785: mol_type = other RNA

SEQ ID NO: 14082 - RNA, 5785 nt, synthetic construct; identical to SEQ ID NO: 12485
  modified_base 1..5785: mod_base = OTHER; note = Each t is m1f
  source 1..5785: mol_type = other RNA

SEQ ID NO: 14083 - RNA, 5785 nt, synthetic construct; identical to SEQ ID NO: 12486
  modified_base 1..5785: mod_base = OTHER; note = Each t is m1f
  source 1..5785: mol_type = other RNA

SEQ ID NO: 14084 - RNA, 5785 nt, synthetic construct; identical to SEQ ID NO: 12487
  modified_base 1..5785: mod_base = OTHER; note = Each t is m1f
  source 1..5785: mol_type = other RNA

SEQ ID NO: 14085 - RNA, 5785 nt, synthetic construct; identical to SEQ ID NO: 12488
  modified_base 1..5785: mod_base = OTHER; note = Each t is m1f
  source 1..5785: mol_type = other RNA

SEQ ID NO: 14086 - RNA, 5785 nt, synthetic construct; identical to SEQ ID NO: 12489
  modified_base 1..5785: mod_base = OTHER; note = Each t is m1f
  source 1..5785: mol_type = other RNA

SEQ ID NO: 14087 - RNA, 5785 nt, synthetic construct; identical to SEQ ID NO: 12490
  modified_base 1..5785: mod_base = OTHER; note = Each t is m1f
  source 1..5785: mol_type = other RNA

SEQ ID NO: 14088 - RNA, 5785 nt, synthetic construct; identical to SEQ ID NO: 12491
  modified_base 1..5785: mod_base = OTHER; note = Each t is m1f
  source 1..5785: mol_type = other RNA

SEQ ID NO: 14089 - RNA, 5785 nt, synthetic construct; identical to SEQ ID NO: 12492
  modified_base 1..5785: mod_base = OTHER; note = Each t is m1f
  source 1..5785: mol_type = other RNA

SEQ ID NO: 14090 - RNA, 5785 nt, synthetic construct; identical to SEQ ID NO: 12493
  modified_base 1..5785: mod_base = OTHER; note = Each t is m1f
  source 1..5785: mol_type = other RNA

SEQ ID NO: 14091 - RNA, 5785 nt, synthetic construct; identical to SEQ ID NO: 12494
  modified_base 1..5785: mod_base = OTHER; note = Each t is m1f
  source 1..5785: mol_type = other RNA

SEQ ID NO: 14092 - RNA, 5785 nt, synthetic construct; identical to SEQ ID NO: 12495
  modified_base 1..5785: mod_base = OTHER; note = Each t is m1f
  source 1..5785: mol_type = other RNA

SEQ ID NO: 14093 - RNA, 5785 nt, synthetic construct; identical to SEQ ID NO: 12496
  modified_base 1..5785: mod_base = OTHER; note = Each t is m1f
  source 1..5785: mol_type = other RNA

SEQ ID NO: 14094 - RNA, 5785 nt, synthetic construct; identical to SEQ ID NO: 12497
  modified_base 1..5785: mod_base = OTHER; note = Each t is m1f
  source 1..5785: mol_type = other RNA

SEQ ID NO: 14095 - RNA, 5785 nt, synthetic construct; identical to SEQ ID NO: 12498
  modified_base 1..5785: mod_base = OTHER; note = Each t is m1f
  source 1..5785: mol_type = other RNA

SEQ ID NO: 14096 - RNA, 5785 nt, synthetic construct; identical to SEQ ID NO: 12499
  modified_base 1..5785: mod_base = OTHER; note = Each t is m1f
  source 1..5785: mol_type = other RNA

SEQ ID NO: 14097 - RNA, 5785 nt, synthetic construct; identical to SEQ ID NO: 12500
  modified_base 1..5785: mod_base = OTHER; note = Each t is m1f
  source 1..5785: mol_type = other RNA

SEQ ID NO: 14098 - RNA, 5785 nt, synthetic construct; identical to SEQ ID NO: 12501
  modified_base 1..5785: mod_base = OTHER; note = Each t is m1f
  source 1..5785: mol_type = other RNA

SEQ ID NO: 14099 - RNA, 5794 nt, synthetic construct; identical to SEQ ID NO: 12502
  modified_base 1..5794: mod_base = OTHER; note = Each t is m1f
  source 1..5794: mol_type = other RNA

SEQ ID NO: 14100 - RNA, 5785 nt, synthetic construct; identical to SEQ ID NO: 12503
  modified_base 1..5785: mod_base = OTHER; note = Each t is m1f
  source 1..5785: mol_type = other RNA

SEQ ID NO: 14101 - RNA, 5785 nt, synthetic construct; identical to SEQ ID NO: 12504
  modified_base 1..5785: mod_base = OTHER; note = Each t is m1f
  source 1..5785: mol_type = other RNA

SEQ ID NO: 14102 - RNA, 5785 nt, synthetic construct; identical to SEQ ID NO: 12505
  modified_base 1..5785: mod_base = OTHER; note = Each t is m1f
  source 1..5785: mol_type = other RNA

SEQ ID NO: 14103 - RNA, 5785 nt, synthetic construct; identical to SEQ ID NO: 12506
  modified_base 1..5785: mod_base = OTHER; note = Each t is m1f
  source 1..5785: mol_type = other RNA

SEQ ID NO: 14104 - RNA, 5785 nt, synthetic construct; identical to SEQ ID NO: 12507
  modified_base 1..5785: mod_base = OTHER; note = Each t is m1f
  source 1..5785: mol_type = other RNA

SEQ ID NO: 14105 - RNA, 5785 nt, synthetic construct; identical to SEQ ID NO: 12508
  modified_base 1..5785: mod_base = OTHER; note = Each t is m1f
  source 1..5785: mol_type = other RNA

SEQ ID NO: 14106 - RNA, 5785 nt, synthetic construct; identical to SEQ ID NO: 12509
  modified_base 1..5785: mod_base = OTHER; note = Each t is m1f
  source 1..5785: mol_type = other RNA

SEQ ID NO: 14107 - RNA, 5785 nt, synthetic construct; identical to SEQ ID NO: 12510
  modified_base 1..5785: mod_base = OTHER; note = Each t is m1f
  source 1..5785: mol_type = other RNA

SEQ ID NO: 14108 - RNA, 5785 nt, synthetic construct; identical to SEQ ID NO: 12511
  modified_base 1..5785: mod_base = OTHER; note = Each t is m1f
  source 1..5785: mol_type = other RNA

SEQ ID NO: 14109 - RNA, 5785 nt, synthetic construct; identical to SEQ ID NO: 12512
  modified_base 1..5785: mod_base = OTHER; note = Each t is m1f
  source 1..5785: mol_type = other RNA

SEQ ID NO: 14110 - RNA, 5785 nt, synthetic construct; identical to SEQ ID NO: 12513
  modified_base 1..5785: mod_base = OTHER; note = Each t is m1f
  source 1..5785: mol_type = other RNA

SEQ ID NO: 14111 - RNA, 5785 nt, synthetic construct; identical to SEQ ID NO: 12514
  modified_base 1..5785: mod_base = OTHER; note = Each t is m1f
  source 1..5785: mol_type = other RNA

SEQ ID NO: 14112 - RNA, 5785 nt, synthetic construct; identical to SEQ ID NO: 12515
  modified_base 1..5785: mod_base = OTHER; note = Each t is m1f
  source 1..5785: mol_type = other RNA

SEQ ID NO: 14113 - RNA, 5785 nt, synthetic construct; identical to SEQ ID NO: 12516
  modified_base 1..5785: mod_base = OTHER; note = Each t is m1f
  source 1..5785: mol_type = other RNA

SEQ ID NO: 14114 - RNA, 5785 nt, synthetic construct; identical to SEQ ID NO: 12517
  modified_base 1..5785: mod_base = OTHER; note = Each t is m1f
  source 1..5785: mol_type = other RNA

SEQ ID NO: 14115 - RNA, 5785 nt, synthetic construct; identical to SEQ ID NO: 12518
  modified_base 1..5785: mod_base = OTHER; note = Each t is m1f
  source 1..5785: mol_type = other RNA

SEQ ID NO: 14116 - RNA, 5785 nt, synthetic construct; identical to SEQ ID NO: 12519
  modified_base 1..5785: mod_base = OTHER; note = Each t is m1f
  source 1..5785: mol_type = other RNA

SEQ ID NO: 14117 - RNA, 5785 nt, synthetic construct; identical to SEQ ID NO: 12520
  modified_base 1..5785: mod_base = OTHER; note = Each t is m1f
  source 1..5785: mol_type = other RNA

SEQ ID NO: 14118 - RNA, 5785 nt, synthetic construct; identical to SEQ ID NO: 12521
  modified_base 1..5785: mod_base = OTHER; note = Each t is m1f
  source 1..5785: mol_type = other RNA

SEQ ID NO: 14119 - RNA, 5785 nt, synthetic construct; identical to SEQ ID NO: 12522
  modified_base 1..5785: mod_base = OTHER; note = Each t is m1f
  source 1..5785: mol_type = other RNA

SEQ ID NO: 14120 - RNA, 5785 nt, synthetic construct; identical to SEQ ID NO: 12523
  modified_base 1..5785: mod_base = OTHER; note = Each t is m1f
  source 1..5785: mol_type = other RNA

SEQ ID NO: 14121 - RNA, 5785 nt, synthetic construct; identical to SEQ ID NO: 12524
  modified_base 1..5785: mod_base = OTHER; note = Each t is m1f
  source 1..5785: mol_type = other RNA

SEQ ID NO: 14122 - RNA, 5785 nt, synthetic construct; identical to SEQ ID NO: 12525
  modified_base 1..5785: mod_base = OTHER; note = Each t is m1f
  source 1..5785: mol_type = other RNA

SEQ ID NO: 14123 - RNA, 5785 nt, synthetic construct; identical to SEQ ID NO: 12526
  modified_base 1..5785: mod_base = OTHER; note = Each t is m1f
  source 1..5785: mol_type = other RNA

SEQ ID NO: 14124 - RNA, 5785 nt, synthetic construct; identical to SEQ ID NO: 12527
  modified_base 1..5785: mod_base = OTHER; note = Each t is m1f
  source 1..5785: mol_type = other RNA

SEQ ID NO: 14125 - RNA, 5785 nt, synthetic construct; identical to SEQ ID NO: 12528
  modified_base 1..5785: mod_base = OTHER; note = Each t is m1f
  source 1..5785: mol_type = other RNA

SEQ ID NO: 14126 - RNA, 5785 nt, synthetic construct; identical to SEQ ID NO: 12529
  modified_base 1..5785: mod_base = OTHER; note = Each t is m1f
  source 1..5785: mol_type = other RNA

SEQ ID NO: 14127 - RNA, 5785 nt, synthetic construct; identical to SEQ ID NO: 12530
  modified_base 1..5785: mod_base = OTHER; note = Each t is m1f
  source 1..5785: mol_type = other RNA

SEQ ID NO: 14128 - RNA, 5785 nt, synthetic construct; identical to SEQ ID NO: 12531
  modified_base 1..5785: mod_base = OTHER; note = Each t is m1f
  source 1..5785: mol_type = other RNA

SEQ ID NO: 14129 - RNA, 5785 nt, synthetic construct; identical to SEQ ID NO: 12532
  modified_base 1..5785: mod_base = OTHER; note = Each t is m1f
  source 1..5785: mol_type = other RNA

SEQ ID NO: 14130 - RNA, 5785 nt, synthetic construct; identical to SEQ ID NO: 12533
  modified_base 1..5785: mod_base = OTHER; note = Each t is m1f
  source 1..5785: mol_type = other RNA

SEQ ID NO: 14131 - RNA, 5785 nt, synthetic construct; identical to SEQ ID NO: 12534
  modified_base 1..5785: mod_base = OTHER; note = Each t is m1f
  source 1..5785: mol_type = other RNA

SEQ ID NO: 14132 - RNA, 5785 nt, synthetic construct; identical to SEQ ID NO: 12535
  modified_base 1..5785: mod_base = OTHER; note = Each t is m1f
  source 1..5785: mol_type = other RNA

SEQ ID NO: 14133 - RNA, 5785 nt, synthetic construct; identical to SEQ ID NO: 12536
  modified_base 1..5785: mod_base = OTHER; note = Each t is m1f
  source 1..5785: mol_type = other RNA

SEQ ID NO: 14134 - RNA, 5785 nt, synthetic construct; identical to SEQ ID NO: 12537
  modified_base 1..5785: mod_base = OTHER; note = Each t is m1f
  source 1..5785: mol_type = other RNA

SEQ ID NO: 14135 - RNA, 5785 nt, synthetic construct; identical to SEQ ID NO: 12538
  modified_base 1..5785: mod_base = OTHER; note = Each t is m1f
  source 1..5785: mol_type = other RNA

SEQ ID NO: 14136 - RNA, 5785 nt, synthetic construct; identical to SEQ ID NO: 12539
  modified_base 1..5785: mod_base = OTHER; note = Each t is m1f
  source 1..5785: mol_type = other RNA

SEQ ID NO: 14137 - RNA, 5785 nt, synthetic construct; identical to SEQ ID NO: 12540
  modified_base 1..5785: mod_base = OTHER; note = Each t is m1f
  source 1..5785: mol_type = other RNA

SEQ ID NO: 14138 - RNA, 5785 nt, synthetic construct; identical to SEQ ID NO: 12541
  modified_base 1..5785: mod_base = OTHER; note = Each t is m1f
  source 1..5785: mol_type = other RNA

SEQ ID NO: 14139 - RNA, 5785 nt, synthetic construct; identical to SEQ ID NO: 12542
  modified_base 1..5785: mod_base = OTHER; note = Each t is m1f
  source 1..5785: mol_type = other RNA

SEQ ID NO: 14140 - RNA, 5785 nt, synthetic construct; identical to SEQ ID NO: 12543
  modified_base 1..5785: mod_base = OTHER; note = Each t is m1f
  source 1..5785: mol_type = other RNA

SEQ ID NO: 14141 - RNA, 5785 nt, synthetic construct; identical to SEQ ID NO: 12544
  modified_base 1..5785: mod_base = OTHER; note = Each t is m1f
  source 1..5785: mol_type = other RNA

SEQ ID NO: 14142 - RNA, 5785 nt, synthetic construct; identical to SEQ ID NO: 12545
  modified_base 1..5785: mod_base = OTHER; note = Each t is m1f
  source 1..5785: mol_type = other RNA

SEQ ID NO: 14143 - RNA, 5785 nt, synthetic construct; identical to SEQ ID NO: 12546
  modified_base 1..5785: mod_base = OTHER; note = Each t is m1f
  source 1..5785: mol_type = other RNA

SEQ ID NO: 14144 - RNA, 5785 nt, synthetic construct; identical to SEQ ID NO: 12547
  modified_base 1..5785: mod_base = OTHER; note = Each t is m1f
  source 1..5785: mol_type = other RNA

SEQ ID NO: 14145 - RNA, 5785 nt, synthetic construct; identical to SEQ ID NO: 12548
  modified_base 1..5785: mod_base = OTHER; note = Each t is m1f
  source 1..5785: mol_type = other RNA

SEQ ID NO: 14146 - RNA, 5785 nt, synthetic construct; identical to SEQ ID NO: 12549
  modified_base 1..5785: mod_base = OTHER; note = Each t is m1f
  source 1..5785: mol_type = other RNA

SEQ ID NO: 14147 - RNA, 5785 nt, synthetic construct; identical to SEQ ID NO: 12550
  modified_base 1..5785: mod_base = OTHER; note = Each t is m1f
  source 1..5785: mol_type = other RNA

SEQ ID NO: 14148 - RNA, 5785 nt, synthetic construct; identical to SEQ ID NO: 12551
  modified_base 1..5785: mod_base = OTHER; note = Each t is m1f
  source 1..5785: mol_type = other RNA

SEQ ID NO: 14149 - RNA, 5785 nt, synthetic construct; identical to SEQ ID NO: 12552
  modified_base 1..5785: mod_base = OTHER; note = Each t is m1f
  source 1..5785: mol_type = other RNA

SEQ ID NO: 14150 - RNA, 5785 nt, synthetic construct; identical to SEQ ID NO: 12553
  modified_base 1..5785: mod_base = OTHER; note = Each t is m1f
  source 1..5785: mol_type = other RNA

SEQ ID NO: 14151 - RNA, 5785 nt, synthetic construct; identical to SEQ ID NO: 12554
  modified_base 1..5785: mod_base = OTHER; note = Each t is m1f
  source 1..5785: mol_type = other RNA

SEQ ID NO: 14152 - RNA, 5785 nt, synthetic construct; identical to SEQ ID NO: 12555
  modified_base 1..5785: mod_base = OTHER; note = Each t is m1f
  source 1..5785: mol_type = other RNA

SEQ ID NO: 14153 - RNA, 5785 nt, synthetic construct; identical to SEQ ID NO: 12556
  modified_base 1..5785: mod_base = OTHER; note = Each t is m1f
  source 1..5785: mol_type = other RNA

SEQ ID NO: 14154 - RNA, 5785 nt, synthetic construct; identical to SEQ ID NO: 12557
  modified_base 1..5785: mod_base = OTHER; note = Each t is m1f
  source 1..5785: mol_type = other RNA

SEQ ID NO: 14155 - RNA, 5785 nt, synthetic construct; identical to SEQ ID NO: 12558
  modified_base 1..5785: mod_base = OTHER; note = Each t is m1f
  source 1..5785: mol_type = other RNA

SEQ ID NO: 14156 - RNA, 5785 nt, synthetic construct; identical to SEQ ID NO: 12559
  modified_base 1..5785: mod_base = OTHER; note = Each t is m1f
  source 1..5785: mol_type = other RNA

SEQ ID NO: 14157 - RNA, 5785 nt, synthetic construct; identical to SEQ ID NO: 12560
  modified_base 1..5785: mod_base = OTHER; note = Each t is m1f
  source 1..5785: mol_type = other RNA

SEQ ID NO: 14158 - RNA, 5785 nt, synthetic construct; identical to SEQ ID NO: 12561
  modified_base 1..5785: mod_base = OTHER; note = Each t is m1f
  source 1..5785: mol_type = other RNA

SEQ ID NO: 14159 - RNA, 5785 nt, synthetic construct; identical to SEQ ID NO: 12562
  modified_base 1..5785: mod_base = OTHER; note = Each t is m1f
  source 1..5785: mol_type = other RNA

SEQ ID NO: 14160 - RNA, 5785 nt, synthetic construct; identical to SEQ ID NO: 12563
  modified_base 1..5785: mod_base = OTHER; note = Each t is m1f
  source 1..5785: mol_type = other RNA

SEQ ID NO: 14161 - RNA, 5785 nt, synthetic construct; identical to SEQ ID NO: 12564
  modified_base 1..5785: mod_base = OTHER; note = Each t is m1f
  source 1..5785: mol_type = other RNA

SEQ ID NO: 14162 - RNA, 5785 nt, synthetic construct; identical to SEQ ID NO: 12565
  modified_base 1..5785: mod_base = OTHER; note = Each t is m1f
  source 1..5785: mol_type = other RNA

SEQ ID NO: 14163 - RNA, 5785 nt, synthetic construct; identical to SEQ ID NO: 12566
  modified_base 1..5785: mod_base = OTHER; note = Each t is m1f
  source 1..5785: mol_type = other RNA

SEQ ID NO: 14164 - RNA, 5785 nt, synthetic construct; identical to SEQ ID NO: 12567
  modified_base 1..5785: mod_base = OTHER; note = Each t is m1f
  source 1..5785: mol_type = other RNA

SEQ ID NO: 14165 - RNA, 5785 nt, synthetic construct; identical to SEQ ID NO: 12568
  modified_base 1..5785: mod_base = OTHER; note = Each t is m1f
  source 1..5785: mol_type = other RNA

SEQ ID NO: 14166 - RNA, 5785 nt, synthetic construct; identical to SEQ ID NO: 12569
  modified_base 1..5785: mod_base = OTHER; note = Each t is m1f
  source 1..5785: mol_type = other RNA

SEQ ID NO: 14167 - RNA, 5785 nt, synthetic construct; identical to SEQ ID NO: 12570
  modified_base 1..5785: mod_base = OTHER; note = Each t is m1f
  source 1..5785: mol_type = other RNA

SEQ ID NO: 14168 - RNA, 5785 nt, synthetic construct; identical to SEQ ID NO: 12571
  modified_base 1..5785: mod_base = OTHER; note = Each t is m1f
  source 1..5785: mol_type = other RNA

SEQ ID NO: 14169 - RNA, 5785 nt, synthetic construct; identical to SEQ ID NO: 12572
  modified_base 1..5785: mod_base = OTHER; note = Each t is m1f
  source 1..5785: mol_type = other RNA

SEQ ID NO: 14170 - RNA, 5785 nt, synthetic construct; identical to SEQ ID NO: 12573
  modified_base 1..5785: mod_base = OTHER; note = Each t is m1f
  source 1..5785: mol_type = other RNA

SEQ ID NO: 14171 - RNA, 5785 nt, synthetic construct; identical to SEQ ID NO: 12574
  modified_base 1..5785: mod_base = OTHER; note = Each t is m1f
  source 1..5785: mol_type = other RNA

SEQ ID NO: 14172 - RNA, 5785 nt, synthetic construct; identical to SEQ ID NO: 12575
  modified_base 1..5785: mod_base = OTHER; note = Each t is m1f
  source 1..5785: mol_type = other RNA

SEQ ID NO: 14173 - RNA, 5785 nt, synthetic construct; identical to SEQ ID NO: 12576
  modified_base 1..5785: mod_base = OTHER; note = Each t is m1f
  source 1..5785: mol_type = other RNA

SEQ ID NO: 14174 - RNA, 5785 nt, synthetic construct; identical to SEQ ID NO: 12577
  modified_base 1..5785: mod_base = OTHER; note = Each t is m1f
  source 1..5785: mol_type = other RNA

SEQ ID NO: 14175 - RNA, 5785 nt, synthetic construct; identical to SEQ ID NO: 12578
  modified_base 1..5785: mod_base = OTHER; note = Each t is m1f
  source 1..5785: mol_type = other RNA

SEQ ID NO: 14176 - RNA, 5785 nt, synthetic construct; identical to SEQ ID NO: 12579
  modified_base 1..5785: mod_base = OTHER; note = Each t is m1f
  source 1..5785: mol_type = other RNA

SEQ ID NO: 14177 - RNA, 5785 nt, synthetic construct; identical to SEQ ID NO: 12580
  modified_base 1..5785: mod_base = OTHER; note = Each t is m1f
  source 1..5785: mol_type = other RNA

SEQ ID NO: 14178 - RNA, 5785 nt, synthetic construct; identical to SEQ ID NO: 12581
  modified_base 1..5785: mod_base = OTHER; note = Each t is m1f
  source 1..5785: mol_type = other RNA

SEQ ID NO: 14179 - RNA, 5785 nt, synthetic construct; identical to SEQ ID NO: 12582
  modified_base 1..5785: mod_base = OTHER; note = Each t is m1f
  source 1..5785: mol_type = other RNA

SEQ ID NO: 14180 - RNA, 5785 nt, synthetic construct; identical to SEQ ID NO: 12583
  modified_base 1..5785: mod_base = OTHER; note = Each t is m1f
  source 1..5785: mol_type = other RNA

SEQ ID NO: 14181 - RNA, 5785 nt, synthetic construct; identical to SEQ ID NO: 12584
  modified_base 1..5785: mod_base = OTHER; note = Each t is m1f
  source 1..5785: mol_type = other RNA

SEQ ID NO: 14182 - RNA, 5785 nt, synthetic construct; identical to SEQ ID NO: 12585
  modified_base 1..5785: mod_base = OTHER; note = Each t is m1f
  source 1..5785: mol_type = other RNA

SEQ ID NO: 14183 - RNA, 5785 nt, synthetic construct; identical to SEQ ID NO: 12586
  modified_base 1..5785: mod_base = OTHER; note = Each t is m1f
  source 1..5785: mol_type = other RNA

SEQ ID NO: 14184 - RNA, 5785 nt, synthetic construct; identical to SEQ ID NO: 12587
  modified_base 1..5785: mod_base = OTHER; note = Each t is m1f
  source 1..5785: mol_type = other RNA

SEQ ID NO: 14185 - RNA, 5785 nt, synthetic construct; identical to SEQ ID NO: 12588
  modified_base 1..5785: mod_base = OTHER; note = Each t is m1f
  source 1..5785: mol_type = other RNA

SEQ ID NO: 14186 - RNA, 5785 nt, synthetic construct; identical to SEQ ID NO: 12589
  modified_base 1..5785: mod_base = OTHER; note = Each t is m1f
  source 1..5785: mol_type = other RNA

SEQ ID NO: 14187 - RNA, 5785 nt, synthetic construct; identical to SEQ ID NO: 12590
  modified_base 1..5785: mod_base = OTHER; note = Each t is m1f
  source 1..5785: mol_type = other RNA

SEQ ID NO: 14188 - RNA, 5785 nt, synthetic construct; identical to SEQ ID NO: 12591
  modified_base 1..5785: mod_base = OTHER; note = Each t is m1f
  source 1..5785: mol_type = other RNA

SEQ ID NO: 14189 - RNA, 5785 nt, synthetic construct; identical to SEQ ID NO: 12592
  modified_base 1..5785: mod_base = OTHER; note = Each t is m1f
  source 1..5785: mol_type = other RNA

SEQ ID NO: 14190 - RNA, 5785 nt, synthetic construct; identical to SEQ ID NO: 12593
  modified_base 1..5785: mod_base = OTHER; note = Each t is m1f
  source 1..5785: mol_type = other RNA

SEQ ID NO: 14191 - RNA, 5785 nt, synthetic construct; identical to SEQ ID NO: 12594
  modified_base 1..5785: mod_base = OTHER; note = Each t is m1f
  source 1..5785: mol_type = other RNA

SEQ ID NO: 14192 - RNA, 5785 nt, synthetic construct; identical to SEQ ID NO: 12595
  modified_base 1..5785: mod_base = OTHER; note = Each t is m1f
  source 1..5785: mol_type = other RNA

SEQ ID NO: 14193 - RNA, 5785 nt, synthetic construct; identical to SEQ ID NO: 12596
  modified_base 1..5785: mod_base = OTHER; note = Each t is m1f
  source 1..5785: mol_type = other RNA

SEQ ID NO: 14194 - RNA, 5785 nt, synthetic construct; identical to SEQ ID NO: 12597
  modified_base 1..5785: mod_base = OTHER; note = Each t is m1f
  source 1..5785: mol_type = other RNA

SEQ ID NO: 14195 - RNA, 5785 nt, synthetic construct; identical to SEQ ID NO: 12598
  modified_base 1..5785: mod_base = OTHER; note = Each t is m1f
  source 1..5785: mol_type = other RNA

SEQ ID NO: 14196 - RNA, 5785 nt, synthetic construct; identical to SEQ ID NO: 12599
  modified_base 1..5785: mod_base = OTHER; note = Each t is m1f
  source 1..5785: mol_type = other RNA

SEQ ID NO: 14197 - RNA, 5785 nt, synthetic construct; identical to SEQ ID NO: 12600
  modified_base 1..5785: mod_base = OTHER; note = Each t is m1f
  source 1..5785: mol_type = other RNA

SEQ ID NO: 14198 - RNA, 5785 nt, synthetic construct; identical to SEQ ID NO: 12601
  modified_base 1..5785: mod_base = OTHER; note = Each t is m1f
  source 1..5785: mol_type = other RNA

SEQ ID NO: 14199 - RNA, 5785 nt, synthetic construct; identical to SEQ ID NO: 12602
  modified_base 1..5785: mod_base = OTHER; note = Each t is m1f
  source 1..5785: mol_type = other RNA

SEQ ID NO: 14200 - RNA, 5785 nt, synthetic construct; identical to SEQ ID NO: 12603
  modified_base 1..5785: mod_base = OTHER; note = Each t is m1f
  source 1..5785: mol_type = other RNA

SEQ ID NO: 14201 - RNA, 5785 nt, synthetic construct; identical to SEQ ID NO: 12604
  modified_base 1..5785: mod_base = OTHER; note = Each t is m1f
  source 1..5785: mol_type = other RNA

SEQ ID NO: 14202 - RNA, 5785 nt, synthetic construct; identical to SEQ ID NO: 12605
  modified_base 1..5785: mod_base = OTHER; note = Each t is m1f
  source 1..5785: mol_type = other RNA

SEQ ID NO: 14203 - RNA, 5785 nt, synthetic construct; identical to SEQ ID NO: 12606
  modified_base 1..5785: mod_base = OTHER; note = Each t is m1f
  source 1..5785: mol_type = other RNA

SEQ ID NO: 14204 - RNA, 5785 nt, synthetic construct; identical to SEQ ID NO: 12607
  modified_base 1..5785: mod_base = OTHER; note = Each t is m1f
  source 1..5785: mol_type = other RNA

SEQ ID NO: 14205 - RNA, 5785 nt, synthetic construct; identical to SEQ ID NO: 12608
  modified_base 1..5785: mod_base = OTHER; note = Each t is m1f
  source 1..5785: mol_type = other RNA

SEQ ID NO: 14206 - RNA, 5785 nt, synthetic construct; identical to SEQ ID NO: 12609
  modified_base 1..5785: mod_base = OTHER; note = Each t is m1f
  source 1..5785: mol_type = other RNA

SEQ ID NO: 14207 - RNA, 5785 nt, synthetic construct; identical to SEQ ID NO: 12610
  modified_base 1..5785: mod_base = OTHER; note = Each t is m1f
  source 1..5785: mol_type = other RNA

SEQ ID NO: 14208 - RNA, 5785 nt, synthetic construct; identical to SEQ ID NO: 12611
  modified_base 1..5785: mod_base = OTHER; note = Each t is m1f
  source 1..5785: mol_type = other RNA

SEQ ID NO: 14209 - RNA, 5785 nt, synthetic construct; identical to SEQ ID NO: 12612
  modified_base 1..5785: mod_base = OTHER; note = Each t is m1f
  source 1..5785: mol_type = other RNA

SEQ ID NO: 14210 - RNA, 5785 nt, synthetic construct; identical to SEQ ID NO: 12613
  modified_base 1..5785: mod_base = OTHER; note = Each t is m1f
  source 1..5785: mol_type = other RNA

SEQ ID NO: 14211 - RNA, 5785 nt, synthetic construct; identical to SEQ ID NO: 12614
  modified_base 1..5785: mod_base = OTHER; note = Each t is m1f
  source 1..5785: mol_type = other RNA

SEQ ID NO: 14212 - RNA, 5785 nt, synthetic construct; identical to SEQ ID NO: 12615
  modified_base 1..5785: mod_base = OTHER; note = Each t is m1f
  source 1..5785: mol_type = other RNA

SEQ ID NO: 14213 - RNA, 5785 nt, synthetic construct; identical to SEQ ID NO: 12616
  modified_base 1..5785: mod_base = OTHER; note = Each t is m1f
  source 1..5785: mol_type = other RNA

SEQ ID NO: 14214 - RNA, 5785 nt, synthetic construct; identical to SEQ ID NO: 12617
  modified_base 1..5785: mod_base = OTHER; note = Each t is m1f
  source 1..5785: mol_type = other RNA

SEQ ID NO: 14215 - RNA, 5785 nt, synthetic construct; identical to SEQ ID NO: 12618
  modified_base 1..5785: mod_base = OTHER; note = Each t is m1f
  source 1..5785: mol_type = other RNA

SEQ ID NO: 14216 - RNA, 5785 nt, synthetic construct; identical to SEQ ID NO: 12619
  modified_base 1..5785: mod_base = OTHER; note = Each t is m1f
  source 1..5785: mol_type = other RNA

SEQ ID NO: 14217 - RNA, 5785 nt, synthetic construct; identical to SEQ ID NO: 12620
  modified_base 1..5785: mod_base = OTHER; note = Each t is m1f
  source 1..5785: mol_type = other RNA

SEQ ID NO: 14218 - RNA, 5785 nt, synthetic construct; identical to SEQ ID NO: 12621
  modified_base 1..5785: mod_base = OTHER; note = Each t is m1f
  source 1..5785: mol_type = other RNA

SEQ ID NO: 14219 - RNA, 5782 nt, synthetic construct; identical to SEQ ID NO: 12622
  modified_base 1..5782: mod_base = OTHER; note = Each t is m1f
  source 1..5782: mol_type = other RNA

SEQ ID NO: 14220 - RNA, 5785 nt, synthetic construct; identical to SEQ ID NO: 12623
  modified_base 1..5785: mod_base = OTHER; note = Each t is m1f
  source 1..5785: mol_type = other RNA

SEQ ID NO: 14221 - RNA, 5785 nt, synthetic construct; identical to SEQ ID NO: 12624
  modified_base 1..5785: mod_base = OTHER; note = Each t is m1f
  source 1..5785: mol_type = other RNA

SEQ ID NO: 14222 - RNA, 5785 nt, synthetic construct; identical to SEQ ID NO: 12625
  modified_base 1..5785: mod_base = OTHER; note = Each t is m1f
  source 1..5785: mol_type = other RNA

SEQ ID NO: 14223 - RNA, 5785 nt, synthetic construct; identical to SEQ ID NO: 12626
  modified_base 1..5785: mod_base = OTHER; note = Each t is m1f
  source 1..5785: mol_type = other RNA

SEQ ID NO: 14224 - RNA, 5785 nt, synthetic construct; identical to SEQ ID NO: 12627
  modified_base 1..5785: mod_base = OTHER; note = Each t is m1f
  source 1..5785: mol_type = other RNA

SEQ ID NO: 14225 - RNA, 5785 nt, synthetic construct; identical to SEQ ID NO: 12628
  modified_base 1..5785: mod_base = OTHER; note = Each t is m1f
  source 1..5785: mol_type = other RNA

SEQ ID NO: 14226 - RNA, 5785 nt, synthetic construct; identical to SEQ ID NO: 12629
  modified_base 1..5785: mod_base = OTHER; note = Each t is m1f
  source 1..5785: mol_type = other RNA

SEQ ID NO: 14227 - RNA, 5785 nt, synthetic construct; identical to SEQ ID NO: 12630
  modified_base 1..5785: mod_base = OTHER; note = Each t is m1f
  source 1..5785: mol_type = other RNA

SEQ ID NO: 14228 - RNA, 5785 nt, synthetic construct; identical to SEQ ID NO: 12631
  modified_base 1..5785: mod_base = OTHER; note = Each t is m1f
  source 1..5785: mol_type = other RNA

SEQ ID NO: 14229 - RNA, 5785 nt, synthetic construct; identical to SEQ ID NO: 12632
  modified_base 1..5785: mod_base = OTHER; note = Each t is m1f
  source 1..5785: mol_type = other RNA

SEQ ID NO: 14230 - RNA, 5785 nt, synthetic construct; identical to SEQ ID NO: 12633
  modified_base 1..5785: mod_base = OTHER; note = Each t is m1f
  source 1..5785: mol_type = other RNA

SEQ ID NO: 14231 - RNA, 5785 nt, synthetic construct; identical to SEQ ID NO: 12634
  modified_base 1..5785: mod_base = OTHER; note = Each t is m1f
  source 1..5785: mol_type = other RNA

SEQ ID NO: 14232 - RNA, 5785 nt, synthetic construct; identical to SEQ ID NO: 12635
  modified_base 1..5785: mod_base = OTHER; note = Each t is m1f
  source 1..5785: mol_type = other RNA

SEQ ID NO: 14233 - RNA, 5785 nt, synthetic construct; identical to SEQ ID NO: 12636
  modified_base 1..5785: mod_base = OTHER; note = Each t is m1f
  source 1..5785: mol_type = other RNA

SEQ ID NO: 14234 - RNA, 5785 nt, synthetic construct; identical to SEQ ID NO: 12637
  modified_base 1..5785: mod_base = OTHER; note = Each t is m1f
  source 1..5785: mol_type = other RNA

SEQ ID NO: 14235 - RNA, 5785 nt, synthetic construct; identical to SEQ ID NO: 12638
  modified_base 1..5785: mod_base = OTHER; note = Each t is m1f
  source 1..5785: mol_type = other RNA

SEQ ID NO: 14236 - RNA, 5785 nt, synthetic construct; identical to SEQ ID NO: 12639
  modified_base 1..5785: mod_base = OTHER; note = Each t is m1f
  source 1..5785: mol_type = other RNA

SEQ ID NO: 14237 - RNA, 5785 nt, synthetic construct; identical to SEQ ID NO: 12640
  modified_base 1..5785: mod_base = OTHER; note = Each t is m1f
  source 1..5785: mol_type = other RNA

SEQ ID NO: 14238 - RNA, 5785 nt, synthetic construct; identical to SEQ ID NO: 12641
  modified_base 1..5785: mod_base = OTHER; note = Each t is m1f
  source 1..5785: mol_type = other RNA

SEQ ID NO: 14239 - RNA, 5785 nt, synthetic construct; identical to SEQ ID NO: 12642
  modified_base 1..5785: mod_base = OTHER; note = Each t is m1f
  source 1..5785: mol_type = other RNA

SEQ ID NO: 14240 - RNA, 5785 nt, synthetic construct; identical to SEQ ID NO: 12643
  modified_base 1..5785: mod_base = OTHER; note = Each t is m1f
  source 1..5785: mol_type = other RNA

SEQ ID NO: 14241 - RNA, 5785 nt, synthetic construct; identical to SEQ ID NO: 12644
  modified_base 1..5785: mod_base = OTHER; note = Each t is m1f
  source 1..5785: mol_type = other RNA

SEQ ID NO: 14242 - RNA, 5785 nt, synthetic construct; identical to SEQ ID NO: 12645
  modified_base 1..5785: mod_base = OTHER; note = Each t is m1f
  source 1..5785: mol_type = other RNA

SEQ ID NO: 14243 - RNA, 5785 nt, synthetic construct; identical to SEQ ID NO: 12646
  modified_base 1..5785: mod_base = OTHER; note = Each t is m1f
  source 1..5785: mol_type = other RNA

SEQ ID NO: 14244 - RNA, 5785 nt, synthetic construct; identical to SEQ ID NO: 12647
  modified_base 1..5785: mod_base = OTHER; note = Each t is m1f
  source 1..5785: mol_type = other RNA

SEQ ID NO: 14245 - RNA, 5785 nt, synthetic construct; identical to SEQ ID NO: 12648
  modified_base 1..5785: mod_base = OTHER; note = Each t is m1f
  source 1..5785: mol_type = other RNA

SEQ ID NO: 14246 - RNA, 5785 nt, synthetic construct; identical to SEQ ID NO: 12649
  modified_base 1..5785: mod_base = OTHER; note = Each t is m1f
  source 1..5785: mol_type = other RNA

SEQ ID NO: 14247 - RNA, 5785 nt, synthetic construct; identical to SEQ ID NO: 12650
  modified_base 1..5785: mod_base = OTHER; note = Each t is m1f
  source 1..5785: mol_type = other RNA

SEQ ID NO: 14248 - RNA, 5785 nt, synthetic construct; identical to SEQ ID NO: 12651
  modified_base 1..5785: mod_base = OTHER; note = Each t is m1f
  source 1..5785: mol_type = other RNA

SEQ ID NO: 14249 - RNA, 5785 nt, synthetic construct; identical to SEQ ID NO: 12652
  modified_base 1..5785: mod_base = OTHER; note = Each t is m1f
  source 1..5785: mol_type = other RNA

SEQ ID NO: 14250 - RNA, 5785 nt, synthetic construct; identical to SEQ ID NO: 12653
  modified_base 1..5785: mod_base = OTHER; note = Each t is m1f
  source 1..5785: mol_type = other RNA

SEQ ID NO: 14251 - RNA, 5785 nt, synthetic construct; identical to SEQ ID NO: 12654
  modified_base 1..5785: mod_base = OTHER; note = Each t is m1f
  source 1..5785: mol_type = other RNA

SEQ ID NO: 14252 - RNA, 5785 nt, synthetic construct; identical to SEQ ID NO: 12655
  modified_base 1..5785: mod_base = OTHER; note = Each t is m1f
  source 1..5785: mol_type = other RNA

SEQ ID NO: 14253 - RNA, 5785 nt, synthetic construct; identical to SEQ ID NO: 12656
  modified_base 1..5785: mod_base = OTHER; note = Each t is m1f
  source 1..5785: mol_type = other RNA

SEQ ID NO: 14254 - RNA, 5785 nt, synthetic construct; identical to SEQ ID NO: 12657
  modified_base 1..5785: mod_base = OTHER; note = Each t is m1f
  source 1..5785: mol_type = other RNA

SEQ ID NO: 14255 - RNA, 5785 nt, synthetic construct; identical to SEQ ID NO: 12658
  modified_base 1..5785: mod_base = OTHER; note = Each t is m1f
  source 1..5785: mol_type = other RNA

SEQ ID NO: 14256 - RNA, 5785 nt, synthetic construct; identical to SEQ ID NO: 12659
  modified_base 1..5785: mod_base = OTHER; note = Each t is m1f
  source 1..5785: mol_type = other RNA

SEQ ID NO: 14257 - RNA, 5785 nt, synthetic construct; identical to SEQ ID NO: 12660
  modified_base 1..5785: mod_base = OTHER; note = Each t is m1f
  source 1..5785: mol_type = other RNA

SEQ ID NO: 14258 - RNA, 5785 nt, synthetic construct; identical to SEQ ID NO: 12661
  modified_base 1..5785: mod_base = OTHER; note = Each t is m1f
  source 1..5785: mol_type = other RNA

SEQ ID NO: 14259 - RNA, 5785 nt, synthetic construct; identical to SEQ ID NO: 12662
  modified_base 1..5785: mod_base = OTHER; note = Each t is m1f
  source 1..5785: mol_type = other RNA

SEQ ID NO: 14260 - RNA, 5785 nt, synthetic construct; identical to SEQ ID NO: 12663
  modified_base 1..5785: mod_base = OTHER; note = Each t is m1f
  source 1..5785: mol_type = other RNA

SEQ ID NO: 14261 - RNA, 5785 nt, synthetic construct; identical to SEQ ID NO: 12664
  modified_base 1..5785: mod_base = OTHER; note = Each t is m1f
  source 1..5785: mol_type = other RNA

SEQ ID NO: 14262 - RNA, 5785 nt, synthetic construct; identical to SEQ ID NO: 12665
  modified_base 1..5785: mod_base = OTHER; note = Each t is m1f
  source 1..5785: mol_type = other RNA

SEQ ID NO: 14263 - RNA, 5785 nt, synthetic construct; identical to SEQ ID NO: 12666
  modified_base 1..5785: mod_base = OTHER; note = Each t is m1f
  source 1..5785: mol_type = other RNA

SEQ ID NO: 14264 - RNA, 5785 nt, synthetic construct; identical to SEQ ID NO: 12667
  modified_base 1..5785: mod_base = OTHER; note = Each t is m1f
  source 1..5785: mol_type = other RNA

SEQ ID NO: 14265 - RNA, 5785 nt, synthetic construct; identical to SEQ ID NO: 12668
  modified_base 1..5785: mod_base = OTHER; note = Each t is m1f
  source 1..5785: mol_type = other RNA

SEQ ID NO: 14266 - RNA, 5785 nt, synthetic construct; identical to SEQ ID NO: 12669
  modified_base 1..5785: mod_base = OTHER; note = Each t is m1f
  source 1..5785: mol_type = other RNA

SEQ ID NO: 14267 - RNA, 5785 nt, synthetic construct; identical to SEQ ID NO: 12670
  modified_base 1..5785: mod_base = OTHER; note = Each t is m1f
  source 1..5785: mol_type = other RNA

SEQ ID NO: 14268 - RNA, 5785 nt, synthetic construct; identical to SEQ ID NO: 12671
  modified_base 1..5785: mod_base = OTHER; note = Each t is m1f
  source 1..5785: mol_type = other RNA

SEQ ID NO: 14269 - RNA, 5785 nt, synthetic construct; identical to SEQ ID NO: 12672
  modified_base 1..5785: mod_base = OTHER; note = Each t is m1f
  source 1..5785: mol_type = other RNA

SEQ ID NO: 14270 - RNA, 5785 nt, synthetic construct; identical to SEQ ID NO: 12673
  modified_base 1..5785: mod_base = OTHER; note = Each t is m1f
  source 1..5785: mol_type = other RNA

SEQ ID NO: 14271 - RNA, 5785 nt, synthetic construct; identical to SEQ ID NO: 12674
  modified_base 1..5785: mod_base = OTHER; note = Each t is m1f
  source 1..5785: mol_type = other RNA

SEQ ID NO: 14272 - RNA, 5785 nt, synthetic construct; identical to SEQ ID NO: 12675
  modified_base 1..5785: mod_base = OTHER; note = Each t is m1f
  source 1..5785: mol_type = other RNA

SEQ ID NO: 14273 - RNA, 5785 nt, synthetic construct; identical to SEQ ID NO: 12676
  modified_base 1..5785: mod_base = OTHER; note = Each t is m1f
  source 1..5785: mol_type = other RNA

SEQ ID NO: 14274 - RNA, 5785 nt, synthetic construct; identical to SEQ ID NO: 12677
  modified_base 1..5785: mod_base = OTHER; note = Each t is m1f
  source 1..5785: mol_type = other RNA

SEQ ID NO: 14275 - RNA, 5785 nt, synthetic construct; identical to SEQ ID NO: 12678
  modified_base 1..5785: mod_base = OTHER; note = Each t is m1f
  source 1..5785: mol_type = other RNA

SEQ ID NO: 14276 - RNA, 5785 nt, synthetic construct; identical to SEQ ID NO: 12679
  modified_base 1..5785: mod_base = OTHER; note = Each t is m1f
  source 1..5785: mol_type = other RNA

SEQ ID NO: 14277 - RNA, 5785 nt, synthetic construct; identical to SEQ ID NO: 12680
  modified_base 1..5785: mod_base = OTHER; note = Each t is m1f
  source 1..5785: mol_type = other RNA

SEQ ID NO: 14278 - RNA, 5785 nt, synthetic construct; identical to SEQ ID NO: 12681
  modified_base 1..5785: mod_base = OTHER; note = Each t is m1f
  source 1..5785: mol_type = other RNA

SEQ ID NO: 14279 - RNA, 5785 nt, synthetic construct; identical to SEQ ID NO: 12682
  modified_base 1..5785: mod_base = OTHER; note = Each t is m1f
  source 1..5785: mol_type = other RNA

SEQ ID NO: 14280 - RNA, 5785 nt, synthetic construct; identical to SEQ ID NO: 12683
  modified_base 1..5785: mod_base = OTHER; note = Each t is m1f
  source 1..5785: mol_type = other RNA

SEQ ID NO: 14281 - RNA, 5785 nt, synthetic construct; identical to SEQ ID NO: 12684
  modified_base 1..5785: mod_base = OTHER; note = Each t is m1f
  source 1..5785: mol_type = other RNA

SEQ ID NO: 14282 - RNA, 5785 nt, synthetic construct; identical to SEQ ID NO: 12685
  modified_base 1..5785: mod_base = OTHER; note = Each t is m1f
  source 1..5785: mol_type = other RNA

SEQ ID NO: 14283 - RNA, 5785 nt, synthetic construct; identical to SEQ ID NO: 12686
  modified_base 1..5785: mod_base = OTHER; note = Each t is m1f
  source 1..5785: mol_type = other RNA

SEQ ID NO: 14284 - RNA, 5785 nt, synthetic construct; identical to SEQ ID NO: 12687
  modified_base 1..5785: mod_base = OTHER; note = Each t is m1f
  source 1..5785: mol_type = other RNA

SEQ ID NO: 14285 - RNA, 5785 nt, synthetic construct; identical to SEQ ID NO: 12688
  modified_base 1..5785: mod_base = OTHER; note = Each t is m1f
  source 1..5785: mol_type = other RNA

SEQ ID NO: 14286 - RNA, 5785 nt, synthetic construct; identical to SEQ ID NO: 12689
  modified_base 1..5785: mod_base = OTHER; note = Each t is m1f
  source 1..5785: mol_type = other RNA

SEQ ID NO: 14287 - RNA, 5785 nt, synthetic construct; identical to SEQ ID NO: 12690
  modified_base 1..5785: mod_base = OTHER; note = Each t is m1f
  source 1..5785: mol_type = other RNA

SEQ ID NO: 14288 - RNA, 5818 nt, synthetic construct; identical to SEQ ID NO: 12691
  modified_base 1..5818: mod_base = OTHER; note = Each t is m1f
  source 1..5818: mol_type = other RNA

SEQ ID NO: 14289 - RNA, 5785 nt, synthetic construct; identical to SEQ ID NO: 12692
  modified_base 1..5785: mod_base = OTHER; note = Each t is m1f
  source 1..5785: mol_type = other RNA

SEQ ID NO: 14290 - RNA, 5785 nt, synthetic construct; identical to SEQ ID NO: 12693
  modified_base 1..5785: mod_base = OTHER; note = Each t is m1f
  source 1..5785: mol_type = other RNA

SEQ ID NO: 14291 - RNA, 5785 nt, synthetic construct; identical to SEQ ID NO: 12694
  modified_base 1..5785: mod_base = OTHER; note = Each t is m1f
  source 1..5785: mol_type = other RNA

SEQ ID NO: 14292 - RNA, 5785 nt, synthetic construct; identical to SEQ ID NO: 12695
  modified_base 1..5785: mod_base = OTHER; note = Each t is m1f
  source 1..5785: mol_type = other RNA

SEQ ID NO: 14293 - RNA, 5785 nt, synthetic construct; identical to SEQ ID NO: 12696
  modified_base 1..5785: mod_base = OTHER; note = Each t is m1f
  source 1..5785: mol_type = other RNA

SEQ ID NO: 14294 - RNA, 5785 nt, synthetic construct; identical to SEQ ID NO: 12697
  modified_base 1..5785: mod_base = OTHER; note = Each t is m1f
  source 1..5785: mol_type = other RNA

SEQ ID NO: 14295 - RNA, 5785 nt, synthetic construct; identical to SEQ ID NO: 12698
  modified_base 1..5785: mod_base = OTHER; note = Each t is m1f
  source 1..5785: mol_type = other RNA

SEQ ID NO: 14296 - RNA, 5785 nt, synthetic construct; identical to SEQ ID NO: 12699
  modified_base 1..5785: mod_base = OTHER; note = Each t is m1f
  source 1..5785: mol_type = other RNA

SEQ ID NO: 14297 - RNA, 5785 nt, synthetic construct; identical to SEQ ID NO: 12700
  modified_base 1..5785: mod_base = OTHER; note = Each t is m1f
  source 1..5785: mol_type = other RNA

SEQ ID NO: 14298 - RNA, 5785 nt, synthetic construct; identical to SEQ ID NO: 12701
  modified_base 1..5785: mod_base = OTHER; note = Each t is m1f
  source 1..5785: mol_type = other RNA

SEQ ID NO: 14299 - RNA, 5785 nt, synthetic construct; identical to SEQ ID NO: 12702
  modified_base 1..5785: mod_base = OTHER; note = Each t is m1f
  source 1..5785: mol_type = other RNA

SEQ ID NO: 14300 - RNA, 5785 nt, synthetic construct; identical to SEQ ID NO: 12703
  modified_base 1..5785: mod_base = OTHER; note = Each t is m1f
  source 1..5785: mol_type = other RNA

SEQ ID NO: 14301 - RNA, 5785 nt, synthetic construct; identical to SEQ ID NO: 12704
  modified_base 1..5785: mod_base = OTHER; note = Each t is m1f
  source 1..5785: mol_type = other RNA

SEQ ID NO: 14302 - RNA, 5785 nt, synthetic construct; identical to SEQ ID NO: 12705
  modified_base 1..5785: mod_base = OTHER; note = Each t is m1f
  source 1..5785: mol_type = other RNA

SEQ ID NO: 14303 - RNA, 5785 nt, synthetic construct; identical to SEQ ID NO: 12706
  modified_base 1..5785: mod_base = OTHER; note = Each t is m1f
  source 1..5785: mol_type = other RNA

SEQ ID NO: 14304 - RNA, 5785 nt, synthetic construct; identical to SEQ ID NO: 12707
  modified_base 1..5785: mod_base = OTHER; note = Each t is m1f
  source 1..5785: mol_type = other RNA

SEQ ID NO: 14305 - RNA, 5785 nt, synthetic construct; identical to SEQ ID NO: 12708
  modified_base 1..5785: mod_base = OTHER; note = Each t is m1f
  source 1..5785: mol_type = other RNA

SEQ ID NO: 14306 - RNA, 5785 nt, synthetic construct; identical to SEQ ID NO: 12709
  modified_base 1..5785: mod_base = OTHER; note = Each t is m1f
  source 1..5785: mol_type = other RNA

SEQ ID NO: 14307 - RNA, 5785 nt, synthetic construct; identical to SEQ ID NO: 12710
  modified_base 1..5785: mod_base = OTHER; note = Each t is m1f
  source 1..5785: mol_type = other RNA

SEQ ID NO: 14308 - RNA, 5785 nt, synthetic construct; identical to SEQ ID NO: 12711
  modified_base 1..5785: mod_base = OTHER; note = Each t is m1f
  source 1..5785: mol_type = other RNA

SEQ ID NO: 14309 - RNA, 5785 nt, synthetic construct; identical to SEQ ID NO: 12712
  modified_base 1..5785: mod_base = OTHER; note = Each t is m1f
  source 1..5785: mol_type = other RNA

SEQ ID NO: 14310 - RNA, 5785 nt, synthetic construct; identical to SEQ ID NO: 12713
  modified_base 1..5785: mod_base = OTHER; note = Each t is m1f
  source 1..5785: mol_type = other RNA

SEQ ID NO: 14311 - RNA, 5785 nt, synthetic construct; identical to SEQ ID NO: 12714
  modified_base 1..5785: mod_base = OTHER; note = Each t is m1f
  source 1..5785: mol_type = other RNA

SEQ ID NO: 14312 - RNA, 5785 nt, synthetic construct; identical to SEQ ID NO: 12715
  modified_base 1..5785: mod_base = OTHER; note = Each t is m1f
  source 1..5785: mol_type = other RNA

SEQ ID NO: 14313 - RNA, 5785 nt, synthetic construct; identical to SEQ ID NO: 12716
  modified_base 1..5785: mod_base = OTHER; note = Each t is m1f
  source 1..5785: mol_type = other RNA

SEQ ID NO: 14314 - RNA, 5785 nt, synthetic construct; identical to SEQ ID NO: 12717
  modified_base 1..5785: mod_base = OTHER; note = Each t is m1f
  source 1..5785: mol_type = other RNA

SEQ ID NO: 14315 - RNA, 5785 nt, synthetic construct; identical to SEQ ID NO: 12718
  modified_base 1..5785: mod_base = OTHER; note = Each t is m1f
  source 1..5785: mol_type = other RNA

SEQ ID NO: 14316 - RNA, 5785 nt, synthetic construct; identical to SEQ ID NO: 12719
  modified_base 1..5785: mod_base = OTHER; note = Each t is m1f
  source 1..5785: mol_type = other RNA

SEQ ID NO: 14317 - RNA, 5785 nt, synthetic construct; identical to SEQ ID NO: 12720
  modified_base 1..5785: mod_base = OTHER; note = Each t is m1f
  source 1..5785: mol_type = other RNA

SEQ ID NO: 14318 - RNA, 5785 nt, synthetic construct; identical to SEQ ID NO: 12721
  modified_base 1..5785: mod_base = OTHER; note = Each t is m1f
  source 1..5785: mol_type = other RNA

SEQ ID NO: 14319 - RNA, 5785 nt, synthetic construct; identical to SEQ ID NO: 12722
  modified_base 1..5785: mod_base = OTHER; note = Each t is m1f
  source 1..5785: mol_type = other RNA

SEQ ID NO: 14320 - RNA, 5785 nt, synthetic construct; identical to SEQ ID NO: 12723
  modified_base 1..5785: mod_base = OTHER; note = Each t is m1f
  source 1..5785: mol_type = other RNA

SEQ ID NO: 14321 - RNA, 5785 nt, synthetic construct; identical to SEQ ID NO: 12724
  modified_base 1..5785: mod_base = OTHER; note = Each t is m1f
  source 1..5785: mol_type = other RNA

SEQ ID NO: 14322 - RNA, 5785 nt, synthetic construct; identical to SEQ ID NO: 12725
  modified_base 1..5785: mod_base = OTHER; note = Each t is m1f
  source 1..5785: mol_type = other RNA

SEQ ID NO: 14323 - RNA, 5785 nt, synthetic construct; identical to SEQ ID NO: 12726
  modified_base 1..5785: mod_base = OTHER; note = Each t is m1f
  source 1..5785: mol_type = other RNA

SEQ ID NO: 14324 - RNA, 5785 nt, synthetic construct; identical to SEQ ID NO: 12727
  modified_base 1..5785: mod_base = OTHER; note = Each t is m1f
  source 1..5785: mol_type = other RNA

SEQ ID NO: 14325 - RNA, 5785 nt, synthetic construct; identical to SEQ ID NO: 12728
  modified_base 1..5785: mod_base = OTHER; note = Each t is m1f
  source 1..5785: mol_type = other RNA

SEQ ID NO: 14326 - RNA, 5785 nt, synthetic construct; identical to SEQ ID NO: 12729
  modified_base 1..5785: mod_base = OTHER; note = Each t is m1f
  source 1..5785: mol_type = other RNA

SEQ ID NO: 14327 - RNA, 5785 nt, synthetic construct; identical to SEQ ID NO: 12730
  modified_base 1..5785: mod_base = OTHER; note = Each t is m1f
  source 1..5785: mol_type = other RNA

SEQ ID NO: 14328 - RNA, 5785 nt, synthetic construct; identical to SEQ ID NO: 12731
  modified_base 1..5785: mod_base = OTHER; note = Each t is m1f
  source 1..5785: mol_type = other RNA

SEQ ID NO: 14329 - RNA, 5785 nt, synthetic construct; identical to SEQ ID NO: 12732
  modified_base 1..5785: mod_base = OTHER; note = Each t is m1f
  source 1..5785: mol_type = other RNA

SEQ ID NO: 14330 - RNA, 5785 nt, synthetic construct; identical to SEQ ID NO: 12733
  modified_base 1..5785: mod_base = OTHER; note = Each t is m1f
  source 1..5785: mol_type = other RNA

SEQ ID NO: 14331 - RNA, 5785 nt, synthetic construct; identical to SEQ ID NO: 12734
  modified_base 1..5785: mod_base = OTHER; note = Each t is m1f
  source 1..5785: mol_type = other RNA

SEQ ID NO: 14332 - RNA, 5785 nt, synthetic construct; identical to SEQ ID NO: 12735
  modified_base 1..5785: mod_base = OTHER; note = Each t is m1f
  source 1..5785: mol_type = other RNA

SEQ ID NO: 14333 - RNA, 5785 nt, synthetic construct; identical to SEQ ID NO: 12736
  modified_base 1..5785: mod_base = OTHER; note = Each t is m1f
  source 1..5785: mol_type = other RNA

SEQ ID NO: 14334 - RNA, 5785 nt, synthetic construct; identical to SEQ ID NO: 12737
  modified_base 1..5785: mod_base = OTHER; note = Each t is m1f
  source 1..5785: mol_type = other RNA

SEQ ID NO: 14335 - RNA, 5785 nt, synthetic construct; identical to SEQ ID NO: 12738
  modified_base 1..5785: mod_base = OTHER; note = Each t is m1f
  source 1..5785: mol_type = other RNA

SEQ ID NO: 14336 - RNA, 5785 nt, synthetic construct; identical to SEQ ID NO: 12739
  modified_base 1..5785: mod_base = OTHER; note = Each t is m1f
  source 1..5785: mol_type = other RNA

SEQ ID NO: 14337 - RNA, 5785 nt, synthetic construct; identical to SEQ ID NO: 12740
  modified_base 1..5785: mod_base = OTHER; note = Each t is m1f
  source 1..5785: mol_type = other RNA

SEQ ID NO: 14338 - RNA, 5785 nt, synthetic construct; identical to SEQ ID NO: 12741
  modified_base 1..5785: mod_base = OTHER; note = Each t is m1f
  source 1..5785: mol_type = other RNA

SEQ ID NO: 14339 - RNA, 5785 nt, synthetic construct; identical to SEQ ID NO: 12742
  modified_base 1..5785: mod_base = OTHER; note = Each t is m1f
  source 1..5785: mol_type = other RNA

SEQ ID NO: 14340 - RNA, 5785 nt, synthetic construct; identical to SEQ ID NO: 12743
  modified_base 1..5785: mod_base = OTHER; note = Each t is m1f
  source 1..5785: mol_type = other RNA

SEQ ID NO: 14341 - RNA, 5785 nt, synthetic construct; identical to SEQ ID NO: 12744
  modified_base 1..5785: mod_base = OTHER; note = Each t is m1f
  source 1..5785: mol_type = other RNA

SEQ ID NO: 14342 - RNA, 5785 nt, synthetic construct; identical to SEQ ID NO: 12745
  modified_base 1..5785: mod_base = OTHER; note = Each t is m1f
  source 1..5785: mol_type = other RNA

SEQ ID NO: 14343 - RNA, 5785 nt, synthetic construct; identical to SEQ ID NO: 12746
  modified_base 1..5785: mod_base = OTHER; note = Each t is m1f
  source 1..5785: mol_type = other RNA

SEQ ID NO: 14344 - RNA, 5785 nt, synthetic construct; identical to SEQ ID NO: 12747
  modified_base 1..5785: mod_base = OTHER; note = Each t is m1f
  source 1..5785: mol_type = other RNA

SEQ ID NO: 14345 - RNA, 5785 nt, synthetic construct; identical to SEQ ID NO: 12748
  modified_base 1..5785: mod_base = OTHER; note = Each t is m1f
  source 1..5785: mol_type = other RNA

SEQ ID NO: 14346 - RNA, 5785 nt, synthetic construct; identical to SEQ ID NO: 12749
  modified_base 1..5785: mod_base = OTHER; note = Each t is m1f
  source 1..5785: mol_type = other RNA

SEQ ID NO: 14347 - RNA, 5785 nt, synthetic construct; identical to SEQ ID NO: 12750
  modified_base 1..5785: mod_base = OTHER; note = Each t is m1f
  source 1..5785: mol_type = other RNA

SEQ ID NO: 14348 - RNA, 5785 nt, synthetic construct; identical to SEQ ID NO: 12751
  modified_base 1..5785: mod_base = OTHER; note = Each t is m1f
  source 1..5785: mol_type = other RNA

SEQ ID NO: 14349 - RNA, 5785 nt, synthetic construct; identical to SEQ ID NO: 12752
  modified_base 1..5785: mod_base = OTHER; note = Each t is m1f
  source 1..5785: mol_type = other RNA

SEQ ID NO: 14350 - RNA, 5785 nt, synthetic construct; identical to SEQ ID NO: 12753
  modified_base 1..5785: mod_base = OTHER; note = Each t is m1f
  source 1..5785: mol_type = other RNA

SEQ ID NO: 14351 - RNA, 5785 nt, synthetic construct; identical to SEQ ID NO: 12754
  modified_base 1..5785: mod_base = OTHER; note = Each t is m1f
  source 1..5785: mol_type = other RNA

SEQ ID NO: 14352 - RNA, 5785 nt, synthetic construct; identical to SEQ ID NO: 12755
  modified_base 1..5785: mod_base = OTHER; note = Each t is m1f
  source 1..5785: mol_type = other RNA

SEQ ID NO: 14353 - RNA, 5785 nt, synthetic construct; identical to SEQ ID NO: 12756
  modified_base 1..5785: mod_base = OTHER; note = Each t is m1f
  source 1..5785: mol_type = other RNA

SEQ ID NO: 14354 - RNA, 5785 nt, synthetic construct; identical to SEQ ID NO: 12757
  modified_base 1..5785: mod_base = OTHER; note = Each t is m1f
  source 1..5785: mol_type = other RNA

SEQ ID NO: 14355 - RNA, 5785 nt, synthetic construct; identical to SEQ ID NO: 12758
  modified_base 1..5785: mod_base = OTHER; note = Each t is m1f
  source 1..5785: mol_type = other RNA

SEQ ID NO: 14356 - RNA, 5785 nt, synthetic construct; identical to SEQ ID NO: 12759
  modified_base 1..5785: mod_base = OTHER; note = Each t is m1f
  source 1..5785: mol_type = other RNA

SEQ ID NO: 14357 - RNA, 5785 nt, synthetic construct; identical to SEQ ID NO: 12760
  modified_base 1..5785: mod_base = OTHER; note = Each t is m1f
  source 1..5785: mol_type = other RNA

SEQ ID NO: 14358 - RNA, 5794 nt, synthetic construct; identical to SEQ ID NO: 12761
  modified_base 1..5794: mod_base = OTHER; note = Each t is m1f
  source 1..5794: mol_type = other RNA

SEQ ID NO: 14359 - RNA, 5794 nt, synthetic construct; identical to SEQ ID NO: 12762
  modified_base 1..5794: mod_base = OTHER; note = Each t is m1f
  source 1..5794: mol_type = other RNA

SEQ ID NO: 14360 - RNA, 5785 nt, synthetic construct; identical to SEQ ID NO: 12763
  modified_base 1..5785: mod_base = OTHER; note = Each t is m1f
  source 1..5785: mol_type = other RNA

SEQ ID NO: 14361 - RNA, 5785 nt, synthetic construct; identical to SEQ ID NO: 12764
  modified_base 1..5785: mod_base = OTHER; note = Each t is m1f
  source 1..5785: mol_type = other RNA

SEQ ID NO: 14362 - RNA, 5785 nt, synthetic construct; identical to SEQ ID NO: 12765
  modified_base 1..5785: mod_base = OTHER; note = Each t is m1f
  source 1..5785: mol_type = other RNA

SEQ ID NO: 14363 - RNA, 5785 nt, synthetic construct; identical to SEQ ID NO: 12766
  modified_base 1..5785: mod_base = OTHER; note = Each t is m1f
  source 1..5785: mol_type = other RNA

SEQ ID NO: 14364 - RNA, 5785 nt, synthetic construct; identical to SEQ ID NO: 12767
  modified_base 1..5785: mod_base = OTHER; note = Each t is m1f
  source 1..5785: mol_type = other RNA

SEQ ID NO: 14365 - RNA, 5785 nt, synthetic construct; identical to SEQ ID NO: 12768
  modified_base 1..5785: mod_base = OTHER; note = Each t is m1f
  source 1..5785: mol_type = other RNA

SEQ ID NO: 14366 - RNA, 5785 nt, synthetic construct; identical to SEQ ID NO: 12769
  modified_base 1..5785: mod_base = OTHER; note = Each t is m1f
  source 1..5785: mol_type = other RNA

SEQ ID NO: 14367 - RNA, 5785 nt, synthetic construct; identical to SEQ ID NO: 12770
  modified_base 1..5785: mod_base = OTHER; note = Each t is m1f
  source 1..5785: mol_type = other RNA

SEQ ID NO: 14368 - RNA, 5785 nt, synthetic construct; identical to SEQ ID NO: 12771
  modified_base 1..5785: mod_base = OTHER; note = Each t is m1f
  source 1..5785: mol_type = other RNA

SEQ ID NO: 14369 - RNA, 5785 nt, synthetic construct; identical to SEQ ID NO: 12772
  modified_base 1..5785: mod_base = OTHER; note = Each t is m1f
  source 1..5785: mol_type = other RNA

SEQ ID NO: 14370 - RNA, 5785 nt, synthetic construct; identical to SEQ ID NO: 12773
  modified_base 1..5785: mod_base = OTHER; note = Each t is m1f
  source 1..5785: mol_type = other RNA

SEQ ID NO: 14371 - RNA, 5785 nt, synthetic construct; identical to SEQ ID NO: 12774
  modified_base 1..5785: mod_base = OTHER; note = Each t is m1f
  source 1..5785: mol_type = other RNA

SEQ ID NO: 14372 - RNA, 5785 nt, synthetic construct; identical to SEQ ID NO: 12775
  modified_base 1..5785: mod_base = OTHER; note = Each t is m1f
  source 1..5785: mol_type = other RNA

SEQ ID NO: 14373 - RNA, 5785 nt, synthetic construct; identical to SEQ ID NO: 12776
  modified_base 1..5785: mod_base = OTHER; note = Each t is m1f
  source 1..5785: mol_type = other RNA

SEQ ID NO: 14374 - RNA, 5785 nt, synthetic construct; identical to SEQ ID NO: 12777
  modified_base 1..5785: mod_base = OTHER; note = Each t is m1f
  source 1..5785: mol_type = other RNA

SEQ ID NO: 14375 - RNA, 5785 nt, synthetic construct; identical to SEQ ID NO: 12778
  modified_base 1..5785: mod_base = OTHER; note = Each t is m1f
  source 1..5785: mol_type = other RNA

SEQ ID NO: 14376 - RNA, 5785 nt, synthetic construct; identical to SEQ ID NO: 12779
  modified_base 1..5785: mod_base = OTHER; note = Each t is m1f
  source 1..5785: mol_type = other RNA

SEQ ID NO: 14377 - RNA, 5785 nt, synthetic construct; identical to SEQ ID NO: 12780
  modified_base 1..5785: mod_base = OTHER; note = Each t is m1f
  source 1..5785: mol_type = other RNA

SEQ ID NO: 14378 - RNA, 5785 nt, synthetic construct; identical to SEQ ID NO: 12781
  modified_base 1..5785: mod_base = OTHER; note = Each t is m1f
  source 1..5785: mol_type = other RNA

SEQ ID NO: 14379 - RNA, 5785 nt, synthetic construct; identical to SEQ ID NO: 12782
  modified_base 1..5785: mod_base = OTHER; note = Each t is m1f
  source 1..5785: mol_type = other RNA

SEQ ID NO: 14380 - RNA, 5785 nt, synthetic construct; identical to SEQ ID NO: 12783
  modified_base 1..5785: mod_base = OTHER; note = Each t is m1f
  source 1..5785: mol_type = other RNA

SEQ ID NO: 14381 - RNA, 5785 nt, synthetic construct; identical to SEQ ID NO: 12784
  modified_base 1..5785: mod_base = OTHER; note = Each t is m1f
  source 1..5785: mol_type = other RNA

SEQ ID NO: 14382 - RNA, 5785 nt, synthetic construct; identical to SEQ ID NO: 12785
  modified_base 1..5785: mod_base = OTHER; note = Each t is m1f
  source 1..5785: mol_type = other RNA

SEQ ID NO: 14383 - RNA, 5785 nt, synthetic construct; identical to SEQ ID NO: 12786
  modified_base 1..5785: mod_base = OTHER; note = Each t is m1f
  source 1..5785: mol_type = other RNA

SEQ ID NO: 14384 - RNA, 5785 nt, synthetic construct; identical to SEQ ID NO: 12787
  modified_base 1..5785: mod_base = OTHER; note = Each t is m1f
  source 1..5785: mol_type = other RNA

SEQ ID NO: 14385 - RNA, 5785 nt, synthetic construct; identical to SEQ ID NO: 12788
  modified_base 1..5785: mod_base = OTHER; note = Each t is m1f
  source 1..5785: mol_type = other RNA

SEQ ID NO: 14386 - RNA, 5785 nt, synthetic construct; identical to SEQ ID NO: 12789
  modified_base 1..5785: mod_base = OTHER; note = Each t is m1f
  source 1..5785: mol_type = other RNA

SEQ ID NO: 14387 - RNA, 5785 nt, synthetic construct; identical to SEQ ID NO: 12790
  modified_base 1..5785: mod_base = OTHER; note = Each t is m1f
  source 1..5785: mol_type = other RNA

SEQ ID NO: 14388 - RNA, 5785 nt, synthetic construct; identical to SEQ ID NO: 12791
  modified_base 1..5785: mod_base = OTHER; note = Each t is m1f
  source 1..5785: mol_type = other RNA

SEQ ID NO: 14389 - RNA, 5785 nt, synthetic construct; identical to SEQ ID NO: 12792
  modified_base 1..5785: mod_base = OTHER; note = Each t is m1f
  source 1..5785: mol_type = other RNA

SEQ ID NO: 14390 - RNA, 5785 nt, synthetic construct; identical to SEQ ID NO: 12793
  modified_base 1..5785: mod_base = OTHER; note = Each t is m1f
  source 1..5785: mol_type = other RNA

SEQ ID NO: 14391 - RNA, 5785 nt, synthetic construct; identical to SEQ ID NO: 12794
  modified_base 1..5785: mod_base = OTHER; note = Each t is m1f
  source 1..5785: mol_type = other RNA

SEQ ID NO: 14392 - RNA, 5785 nt, synthetic construct; identical to SEQ ID NO: 12795
  modified_base 1..5785: mod_base = OTHER; note = Each t is m1f
  source 1..5785: mol_type = other RNA

SEQ ID NO: 14393 - RNA, 5785 nt, synthetic construct; identical to SEQ ID NO: 12796
  modified_base 1..5785: mod_base = OTHER; note = Each t is m1f
  source 1..5785: mol_type = other RNA

SEQ ID NO: 14394 - RNA, 5785 nt, synthetic construct; identical to SEQ ID NO: 12797
  modified_base 1..5785: mod_base = OTHER; note = Each t is m1f
  source 1..5785: mol_type = other RNA

SEQ ID NO: 14395 - RNA, 5785 nt, synthetic construct; identical to SEQ ID NO: 12798
  modified_base 1..5785: mod_base = OTHER; note = Each t is m1f
  source 1..5785: mol_type = other RNA

SEQ ID NO: 14396 - RNA, 5785 nt, synthetic construct; identical to SEQ ID NO: 12799
  modified_base 1..5785: mod_base = OTHER; note = Each t is m1f
  source 1..5785: mol_type = other RNA

SEQ ID NO: 14397 - RNA, 5785 nt, synthetic construct; identical to SEQ ID NO: 12800
  modified_base 1..5785: mod_base = OTHER; note = Each t is m1f
  source 1..5785: mol_type = other RNA

SEQ ID NO: 14398 - RNA, 5785 nt, synthetic construct; identical to SEQ ID NO: 12801
  modified_base 1..5785: mod_base = OTHER; note = Each t is m1f
  source 1..5785: mol_type = other RNA

SEQ ID NO: 14399 - RNA, 5785 nt, synthetic construct; identical to SEQ ID NO: 12802
  modified_base 1..5785: mod_base = OTHER; note = Each t is m1f
  source 1..5785: mol_type = other RNA

SEQ ID NO: 14400 - RNA, 5785 nt, synthetic construct; identical to SEQ ID NO: 12803
  modified_base 1..5785: mod_base = OTHER; note = Each t is m1f
  source 1..5785: mol_type = other RNA

SEQ ID NO: 14401 - RNA, 5785 nt, synthetic construct; identical to SEQ ID NO: 12804
  modified_base 1..5785: mod_base = OTHER; note = Each t is m1f
  source 1..5785: mol_type = other RNA

SEQ ID NO: 14402 - RNA, 5785 nt, synthetic construct; identical to SEQ ID NO: 12805
  modified_base 1..5785: mod_base = OTHER; note = Each t is m1f
  source 1..5785: mol_type = other RNA

SEQ ID NO: 14403 - RNA, 5785 nt, synthetic construct; identical to SEQ ID NO: 12806
  modified_base 1..5785: mod_base = OTHER; note = Each t is m1f
  source 1..5785: mol_type = other RNA

SEQ ID NO: 14404 - RNA, 5785 nt, synthetic construct; identical to SEQ ID NO: 12807
  modified_base 1..5785: mod_base = OTHER; note = Each t is m1f
  source 1..5785: mol_type = other RNA

SEQ ID NO: 14405 - RNA, 5812 nt, synthetic construct; identical to SEQ ID NO: 12808
  modified_base 1..5812: mod_base = OTHER; note = Each t is m1f
  source 1..5812: mol_type = other RNA

SEQ ID NO: 14406 - RNA, 5785 nt, synthetic construct; identical to SEQ ID NO: 12809
  modified_base 1..5785: mod_base = OTHER; note = Each t is m1f
  source 1..5785: mol_type = other RNA

SEQ ID NO: 14407 - RNA, 5785 nt, synthetic construct; identical to SEQ ID NO: 12810
  modified_base 1..5785: mod_base = OTHER; note = Each t is m1f
  source 1..5785: mol_type = other RNA

SEQ ID NO: 14408 - RNA, 5785 nt, synthetic construct; identical to SEQ ID NO: 12811
  modified_base 1..5785: mod_base = OTHER; note = Each t is m1f
  source 1..5785: mol_type = other RNA

SEQ ID NO: 14409 - RNA, 5785 nt, synthetic construct; identical to SEQ ID NO: 12812
  modified_base 1..5785: mod_base = OTHER; note = Each t is m1f
  source 1..5785: mol_type = other RNA

SEQ ID NO: 14410 - RNA, 5785 nt, synthetic construct; identical to SEQ ID NO: 12813
  modified_base 1..5785: mod_base = OTHER; note = Each t is m1f
  source 1..5785: mol_type = other RNA

SEQ ID NO: 14411 - RNA, 5785 nt, synthetic construct; identical to SEQ ID NO: 12814
  modified_base 1..5785: mod_base = OTHER; note = Each t is m1f
  source 1..5785: mol_type = other RNA

SEQ ID NO: 14412 - RNA, 5785 nt, synthetic construct; identical to SEQ ID NO: 12815
  modified_base 1..5785: mod_base = OTHER; note = Each t is m1f
  source 1..5785: mol_type = other RNA

SEQ ID NO: 14413 - RNA, 5785 nt, synthetic construct; identical to SEQ ID NO: 12816
  modified_base 1..5785: mod_base = OTHER; note = Each t is m1f
  source 1..5785: mol_type = other RNA

SEQ ID NO: 14414 - RNA, 5785 nt, synthetic construct; identical to SEQ ID NO: 12817
  modified_base 1..5785: mod_base = OTHER; note = Each t is m1f
  source 1..5785: mol_type = other RNA

SEQ ID NO: 14415 - RNA, 5785 nt, synthetic construct; identical to SEQ ID NO: 12818
  modified_base 1..5785: mod_base = OTHER; note = Each t is m1f
  source 1..5785: mol_type = other RNA

SEQ ID NO: 14416 - RNA, 5785 nt, synthetic construct; identical to SEQ ID NO: 12819
  modified_base 1..5785: mod_base = OTHER; note = Each t is m1f
  source 1..5785: mol_type = other RNA

SEQ ID NO: 14417 - RNA, 5785 nt, synthetic construct; identical to SEQ ID NO: 12820
  modified_base 1..5785: mod_base = OTHER; note = Each t is m1f
  source 1..5785: mol_type = other RNA

SEQ ID NO: 14418 - RNA, 5785 nt, synthetic construct; identical to SEQ ID NO: 12821
  modified_base 1..5785: mod_base = OTHER; note = Each t is m1f
  source 1..5785: mol_type = other RNA

SEQ ID NO: 14419 - RNA, 5785 nt, synthetic construct; identical to SEQ ID NO: 12822
  modified_base 1..5785: mod_base = OTHER; note = Each t is m1f
  source 1..5785: mol_type = other RNA

SEQ ID NO: 14420 - RNA, 5785 nt, synthetic construct; identical to SEQ ID NO: 12823
  modified_base 1..5785: mod_base = OTHER; note = Each t is m1f
  source 1..5785: mol_type = other RNA

SEQ ID NO: 14421 - RNA, 5785 nt, synthetic construct; identical to SEQ ID NO: 12824
  modified_base 1..5785: mod_base = OTHER; note = Each t is m1f
  source 1..5785: mol_type = other RNA

SEQ ID NO: 14422 - RNA, 5785 nt, synthetic construct; identical to SEQ ID NO: 12825
  modified_base 1..5785: mod_base = OTHER; note = Each t is m1f
  source 1..5785: mol_type = other RNA

SEQ ID NO: 14423 - RNA, 5785 nt, synthetic construct; identical to SEQ ID NO: 12826
  modified_base 1..5785: mod_base = OTHER; note = Each t is m1f
  source 1..5785: mol_type = other RNA

SEQ ID NO: 14424 - RNA, 5785 nt, synthetic construct; identical to SEQ ID NO: 12827
  modified_base 1..5785: mod_base = OTHER; note = Each t is m1f
  source 1..5785: mol_type = other RNA

SEQ ID NO: 14425 - RNA, 5785 nt, synthetic construct; identical to SEQ ID NO: 12828
  modified_base 1..5785: mod_base = OTHER; note = Each t is m1f
  source 1..5785: mol_type = other RNA

SEQ ID NO: 14426 - RNA, 5785 nt, synthetic construct; identical to SEQ ID NO: 12829
  modified_base 1..5785: mod_base = OTHER; note = Each t is m1f
  source 1..5785: mol_type = other RNA

SEQ ID NO: 14427 - RNA, 5785 nt, synthetic construct; identical to SEQ ID NO: 12830
  modified_base 1..5785: mod_base = OTHER; note = Each t is m1f
  source 1..5785: mol_type = other RNA

SEQ ID NO: 14428 - RNA, 5785 nt, synthetic construct; identical to SEQ ID NO: 12831
  modified_base 1..5785: mod_base = OTHER; note = Each t is m1f
  source 1..5785: mol_type = other RNA

SEQ ID NO: 14429 - RNA, 5785 nt, synthetic construct; identical to SEQ ID NO: 12832
  modified_base 1..5785: mod_base = OTHER; note = Each t is m1f
  source 1..5785: mol_type = other RNA

SEQ ID NO: 14430 - RNA, 5785 nt, synthetic construct; identical to SEQ ID NO: 12833
  modified_base 1..5785: mod_base = OTHER; note = Each t is m1f
  source 1..5785: mol_type = other RNA

SEQ ID NO: 14431 - RNA, 5785 nt, synthetic construct; identical to SEQ ID NO: 12834
  modified_base 1..5785: mod_base = OTHER; note = Each t is m1f
  source 1..5785: mol_type = other RNA

SEQ ID NO: 14432 - RNA, 5821 nt, synthetic construct; identical to SEQ ID NO: 12835
  modified_base 1..5821: mod_base = OTHER; note = Each t is m1f
  source 1..5821: mol_type = other RNA

SEQ ID NO: 14433 - RNA, 5785 nt, synthetic construct; identical to SEQ ID NO: 12836
  modified_base 1..5785: mod_base = OTHER; note = Each t is m1f
  source 1..5785: mol_type = other RNA

SEQ ID NO: 14434 - RNA, 5785 nt, synthetic construct; identical to SEQ ID NO: 12837
  modified_base 1..5785: mod_base = OTHER; note = Each t is m1f
  source 1..5785: mol_type = other RNA

SEQ ID NO: 14435 - RNA, 5785 nt, synthetic construct; identical to SEQ ID NO: 12838
  modified_base 1..5785: mod_base = OTHER; note = Each t is m1f
  source 1..5785: mol_type = other RNA

SEQ ID NO: 14436 - RNA, 5785 nt, synthetic construct; identical to SEQ ID NO: 12839
  modified_base 1..5785: mod_base = OTHER; note = Each t is m1f
  source 1..5785: mol_type = other RNA

SEQ ID NO: 14437 - RNA, 5785 nt, synthetic construct; identical to SEQ ID NO: 12840
  modified_base 1..5785: mod_base = OTHER; note = Each t is m1f
  source 1..5785: mol_type = other RNA

SEQ ID NO: 14438 - RNA, 5785 nt, synthetic construct; identical to SEQ ID NO: 12841
  modified_base 1..5785: mod_base = OTHER; note = Each t is m1f
  source 1..5785: mol_type = other RNA

SEQ ID NO: 14439 - RNA, 5785 nt, synthetic construct; identical to SEQ ID NO: 12842
  modified_base 1..5785: mod_base = OTHER; note = Each t is m1f
  source 1..5785: mol_type = other RNA

SEQ ID NO: 14440 - RNA, 5785 nt, synthetic construct; identical to SEQ ID NO: 12843
  modified_base 1..5785: mod_base = OTHER; note = Each t is m1f
  source 1..5785: mol_type = other RNA

SEQ ID NO: 14441 - RNA, 5785 nt, synthetic construct; identical to SEQ ID NO: 12844
  modified_base 1..5785: mod_base = OTHER; note = Each t is m1f
  source 1..5785: mol_type = other RNA

SEQ ID NO: 14442 - RNA, 5785 nt, synthetic construct; identical to SEQ ID NO: 12845
  modified_base 1..5785: mod_base = OTHER; note = Each t is m1f
  source 1..5785: mol_type = other RNA

SEQ ID NO: 14443 - RNA, 5785 nt, synthetic construct; identical to SEQ ID NO: 12846
  modified_base 1..5785: mod_base = OTHER; note = Each t is m1f
  source 1..5785: mol_type = other RNA

SEQ ID NO: 14444 - RNA, 5785 nt, synthetic construct; identical to SEQ ID NO: 12847
  modified_base 1..5785: mod_base = OTHER; note = Each t is m1f
  source 1..5785: mol_type = other RNA

SEQ ID NO: 14445 - RNA, 5785 nt, synthetic construct; identical to SEQ ID NO: 12848
  modified_base 1..5785: mod_base = OTHER; note = Each t is m1f
  source 1..5785: mol_type = other RNA

SEQ ID NO: 14446 - RNA, 5785 nt, synthetic construct; identical to SEQ ID NO: 12849
  modified_base 1..5785: mod_base = OTHER; note = Each t is m1f
  source 1..5785: mol_type = other RNA

SEQ ID NO: 14447 - RNA, 5785 nt, synthetic construct; identical to SEQ ID NO: 12850
  modified_base 1..5785: mod_base = OTHER; note = Each t is m1f
  source 1..5785: mol_type = other RNA

SEQ ID NO: 14448 - RNA, 5785 nt, synthetic construct; identical to SEQ ID NO: 12851
  modified_base 1..5785: mod_base = OTHER; note = Each t is m1f
  source 1..5785: mol_type = other RNA

SEQ ID NO: 14449 - RNA, 5785 nt, synthetic construct; identical to SEQ ID NO: 12852
  modified_base 1..5785: mod_base = OTHER; note = Each t is m1f
  source 1..5785: mol_type = other RNA

SEQ ID NO: 14450 - RNA, 5785 nt, synthetic construct; identical to SEQ ID NO: 12853
  modified_base 1..5785: mod_base = OTHER; note = Each t is m1f
  source 1..5785: mol_type = other RNA

SEQ ID NO: 14451 - RNA, 5785 nt, synthetic construct; identical to SEQ ID NO: 12854
  modified_base 1..5785: mod_base = OTHER; note = Each t is m1f
  source 1..5785: mol_type = other RNA

SEQ ID NO: 14452 - RNA, 5785 nt, synthetic construct; identical to SEQ ID NO: 12855
  modified_base 1..5785: mod_base = OTHER; note = Each t is m1f
  source 1..5785: mol_type = other RNA

SEQ ID NO: 14453 - RNA, 5785 nt, synthetic construct; identical to SEQ ID NO: 12856
  modified_base 1..5785: mod_base = OTHER; note = Each t is m1f
  source 1..5785: mol_type = other RNA

SEQ ID NO: 14454 - RNA, 5785 nt, synthetic construct; identical to SEQ ID NO: 12857
  modified_base 1..5785: mod_base = OTHER; note = Each t is m1f
  source 1..5785: mol_type = other RNA

SEQ ID NO: 14455 - RNA, 5785 nt, synthetic construct; identical to SEQ ID NO: 12858
  modified_base 1..5785: mod_base = OTHER; note = Each t is m1f
  source 1..5785: mol_type = other RNA

SEQ ID NO: 14456 - RNA, 5785 nt, synthetic construct; identical to SEQ ID NO: 12859
  modified_base 1..5785: mod_base = OTHER; note = Each t is m1f
  source 1..5785: mol_type = other RNA

SEQ ID NO: 14457 - RNA, 5785 nt, synthetic construct; identical to SEQ ID NO: 12860
  modified_base 1..5785: mod_base = OTHER; note = Each t is m1f
  source 1..5785: mol_type = other RNA

SEQ ID NO: 14458 - RNA, 5785 nt, synthetic construct; identical to SEQ ID NO: 12861
  modified_base 1..5785: mod_base = OTHER; note = Each t is m1f
  source 1..5785: mol_type = other RNA

SEQ ID NO: 14459 - RNA, 5785 nt, synthetic construct; identical to SEQ ID NO: 12862
  modified_base 1..5785: mod_base = OTHER; note = Each t is m1f
  source 1..5785: mol_type = other RNA

SEQ ID NO: 14460 - RNA, 5785 nt, synthetic construct; identical to SEQ ID NO: 12863
  modified_base 1..5785: mod_base = OTHER; note = Each t is m1f
  source 1..5785: mol_type = other RNA

SEQ ID NO: 14461 - RNA, 5785 nt, synthetic construct; identical to SEQ ID NO: 12864
  modified_base 1..5785: mod_base = OTHER; note = Each t is m1f
  source 1..5785: mol_type = other RNA

SEQ ID NO: 14462 - RNA, 5785 nt, synthetic construct; identical to SEQ ID NO: 12865
  modified_base 1..5785: mod_base = OTHER; note = Each t is m1f
  source 1..5785: mol_type = other RNA

SEQ ID NO: 14463 - RNA, 5785 nt, synthetic construct; identical to SEQ ID NO: 12866
  modified_base 1..5785: mod_base = OTHER; note = Each t is m1f
  source 1..5785: mol_type = other RNA

SEQ ID NO: 14464 - RNA, 5785 nt, synthetic construct; identical to SEQ ID NO: 12867
  modified_base 1..5785: mod_base = OTHER; note = Each t is m1f
  source 1..5785: mol_type = other RNA

SEQ ID NO: 14465 - RNA, 5785 nt, synthetic construct; identical to SEQ ID NO: 12868
  modified_base 1..5785: mod_base = OTHER; note = Each t is m1f
  source 1..5785: mol_type = other RNA

SEQ ID NO: 14466 - RNA, 5785 nt, synthetic construct; identical to SEQ ID NO: 12869
  modified_base 1..5785: mod_base = OTHER; note = Each t is m1f
  source 1..5785: mol_type = other RNA

SEQ ID NO: 14467 - RNA, 5785 nt, synthetic construct; identical to SEQ ID NO: 12870
  modified_base 1..5785: mod_base = OTHER; note = Each t is m1f
  source 1..5785: mol_type = other RNA

SEQ ID NO: 14468 - RNA, 5785 nt, synthetic construct; identical to SEQ ID NO: 12871
  modified_base 1..5785: mod_base = OTHER; note = Each t is m1f
  source 1..5785: mol_type = other RNA

SEQ ID NO: 14469 - RNA, 5785 nt, synthetic construct; identical to SEQ ID NO: 12872
  modified_base 1..5785: mod_base = OTHER; note = Each t is m1f
  source 1..5785: mol_type = other RNA

SEQ ID NO: 14470 - RNA, 5785 nt, synthetic construct; identical to SEQ ID NO: 12873
  modified_base 1..5785: mod_base = OTHER; note = Each t is m1f
  source 1..5785: mol_type = other RNA

SEQ ID NO: 14471 - RNA, 5785 nt, synthetic construct; identical to SEQ ID NO: 12874
  modified_base 1..5785: mod_base = OTHER; note = Each t is m1f
  source 1..5785: mol_type = other RNA

SEQ ID NO: 14472 - RNA, 5785 nt, synthetic construct; identical to SEQ ID NO: 12875
  modified_base 1..5785: mod_base = OTHER; note = Each t is m1f
  source 1..5785: mol_type = other RNA

SEQ ID NO: 14473 - RNA, 5785 nt, synthetic construct; identical to SEQ ID NO: 12876
  modified_base 1..5785: mod_base = OTHER; note = Each t is m1f
  source 1..5785: mol_type = other RNA

SEQ ID NO: 14474 - RNA, 5785 nt, synthetic construct; identical to SEQ ID NO: 12877
  modified_base 1..5785: mod_base = OTHER; note = Each t is m1f
  source 1..5785: mol_type = other RNA

SEQ ID NO: 14475 - RNA, 5785 nt, synthetic construct; identical to SEQ ID NO: 12878
  modified_base 1..5785: mod_base = OTHER; note = Each t is m1f
  source 1..5785: mol_type = other RNA

SEQ ID NO: 14476 - RNA, 5785 nt, synthetic construct; identical to SEQ ID NO: 12879
  modified_base 1..5785: mod_base = OTHER; note = Each t is m1f
  source 1..5785: mol_type = other RNA

SEQ ID NO: 14477 - RNA, 5785 nt, synthetic construct; identical to SEQ ID NO: 12880
  modified_base 1..5785: mod_base = OTHER; note = Each t is m1f
  source 1..5785: mol_type = other RNA

SEQ ID NO: 14478 - RNA, 5785 nt, synthetic construct; identical to SEQ ID NO: 12881
  modified_base 1..5785: mod_base = OTHER; note = Each t is m1f
  source 1..5785: mol_type = other RNA

SEQ ID NO: 14479 - RNA, 5785 nt, synthetic construct; identical to SEQ ID NO: 12882
  modified_base 1..5785: mod_base = OTHER; note = Each t is m1f
  source 1..5785: mol_type = other RNA

SEQ ID NO: 14480 - RNA, 5785 nt, synthetic construct; identical to SEQ ID NO: 12883
  modified_base 1..5785: mod_base = OTHER; note = Each t is m1f
  source 1..5785: mol_type = other RNA

SEQ ID NO: 14481 - RNA, 5785 nt, synthetic construct; identical to SEQ ID NO: 12884
  modified_base 1..5785: mod_base = OTHER; note = Each t is m1f
  source 1..5785: mol_type = other RNA

SEQ ID NO: 14482 - RNA, 5785 nt, synthetic construct; identical to SEQ ID NO: 12885
  modified_base 1..5785: mod_base = OTHER; note = Each t is m1f
  source 1..5785: mol_type = other RNA

SEQ ID NO: 14483 - RNA, 5785 nt, synthetic construct; identical to SEQ ID NO: 12886
  modified_base 1..5785: mod_base = OTHER; note = Each t is m1f
  source 1..5785: mol_type = other RNA

SEQ ID NO: 14484 - RNA, 5785 nt, synthetic construct; identical to SEQ ID NO: 12887
  modified_base 1..5785: mod_base = OTHER; note = Each t is m1f
  source 1..5785: mol_type = other RNA

SEQ ID NO: 14485 - RNA, 5785 nt, synthetic construct; identical to SEQ ID NO: 12888
  modified_base 1..5785: mod_base = OTHER; note = Each t is m1f
  source 1..5785: mol_type = other RNA

SEQ ID NO: 14486 - RNA, 5785 nt, synthetic construct; identical to SEQ ID NO: 12889
  modified_base 1..5785: mod_base = OTHER; note = Each t is m1f
  source 1..5785: mol_type = other RNA

SEQ ID NO: 14487 - RNA, 5785 nt, synthetic construct; identical to SEQ ID NO: 12890
  modified_base 1..5785: mod_base = OTHER; note = Each t is m1f
  source 1..5785: mol_type = other RNA

SEQ ID NO: 14488 - RNA, 5785 nt, synthetic construct; identical to SEQ ID NO: 12891
  modified_base 1..5785: mod_base = OTHER; note = Each t is m1f
  source 1..5785: mol_type = other RNA

SEQ ID NO: 14489 - RNA, 5785 nt, synthetic construct; identical to SEQ ID NO: 12892
  modified_base 1..5785: mod_base = OTHER; note = Each t is m1f
  source 1..5785: mol_type = other RNA

SEQ ID NO: 14490 - RNA, 5785 nt, synthetic construct; identical to SEQ ID NO: 12893
  modified_base 1..5785: mod_base = OTHER; note = Each t is m1f
  source 1..5785: mol_type = other RNA

SEQ ID NO: 14491 - RNA, 5785 nt, synthetic construct; identical to SEQ ID NO: 12894
  modified_base 1..5785: mod_base = OTHER; note = Each t is m1f
  source 1..5785: mol_type = other RNA

SEQ ID NO: 14492 - RNA, 5785 nt, synthetic construct; identical to SEQ ID NO: 12895
  modified_base 1..5785: mod_base = OTHER; note = Each t is m1f
  source 1..5785: mol_type = other RNA

SEQ ID NO: 14493 - RNA, 5782 nt, synthetic construct; identical to SEQ ID NO: 12896
  modified_base 1..5782: mod_base = OTHER; note = Each t is m1f
  source 1..5782: mol_type = other RNA

SEQ ID NO: 14494 - RNA, 5785 nt, synthetic construct; identical to SEQ ID NO: 12897
  modified_base 1..5785: mod_base = OTHER; note = Each t is m1f
  source 1..5785: mol_type = other RNA

SEQ ID NO: 14495 - RNA, 5785 nt, synthetic construct; identical to SEQ ID NO: 12898
  modified_base 1..5785: mod_base = OTHER; note = Each t is m1f
  source 1..5785: mol_type = other RNA

SEQ ID NO: 14496 - RNA, 5785 nt, synthetic construct; identical to SEQ ID NO: 12899
  modified_base 1..5785: mod_base = OTHER; note = Each t is m1f
  source 1..5785: mol_type = other RNA

SEQ ID NO: 14497 - RNA, 5782 nt, synthetic construct; identical to SEQ ID NO: 12900
  modified_base 1..5782: mod_base = OTHER; note = Each t is m1f
  source 1..5782: mol_type = other RNA

SEQ ID NO: 14498 - RNA, 5785 nt, synthetic construct; identical to SEQ ID NO: 12901
  modified_base 1..5785: mod_base = OTHER; note = Each t is m1f
  source 1..5785: mol_type = other RNA

SEQ ID NO: 14499 - RNA, 5785 nt, synthetic construct; identical to SEQ ID NO: 12902
  modified_base 1..5785: mod_base = OTHER; note = Each t is m1f
  source 1..5785: mol_type = other RNA

SEQ ID NO: 14500 - RNA, 5785 nt, synthetic construct; identical to SEQ ID NO: 12903
  modified_base 1..5785: mod_base = OTHER; note = Each t is m1f
  source 1..5785: mol_type = other RNA

SEQ ID NO: 14501 - RNA, 5785 nt, synthetic construct; identical to SEQ ID NO: 12904
  modified_base 1..5785: mod_base = OTHER; note = Each t is m1f
  source 1..5785: mol_type = other RNA

SEQ ID NO: 14502 - RNA, 5785 nt, synthetic construct; identical to SEQ ID NO: 12905
  modified_base 1..5785: mod_base = OTHER; note = Each t is m1f
  source 1..5785: mol_type = other RNA

SEQ ID NO: 14503 - RNA, 5785 nt, synthetic construct; identical to SEQ ID NO: 12906
  modified_base 1..5785: mod_base = OTHER; note = Each t is m1f
  source 1..5785: mol_type = other RNA

SEQ ID NO: 14504 - RNA, 5785 nt, synthetic construct; identical to SEQ ID NO: 12907
  modified_base 1..5785: mod_base = OTHER; note = Each t is m1f
  source 1..5785: mol_type = other RNA

SEQ ID NO: 14505 - RNA, 5785 nt, synthetic construct; identical to SEQ ID NO: 12908
  modified_base 1..5785: mod_base = OTHER; note = Each t is m1f
  source 1..5785: mol_type = other RNA

SEQ ID NO: 14506 - RNA, 5785 nt, synthetic construct; identical to SEQ ID NO: 12909
  modified_base 1..5785: mod_base = OTHER; note = Each t is m1f
  source 1..5785: mol_type = other RNA

SEQ ID NO: 14507 - RNA, 5785 nt, synthetic construct; identical to SEQ ID NO: 12910
  modified_base 1..5785: mod_base = OTHER; note = Each t is m1f
  source 1..5785: mol_type = other RNA

SEQ ID NO: 14508 - RNA, 5785 nt, synthetic construct; identical to SEQ ID NO: 12911
  modified_base 1..5785: mod_base = OTHER; note = Each t is m1f
  source 1..5785: mol_type = other RNA

SEQ ID NO: 14509 - RNA, 5785 nt, synthetic construct; identical to SEQ ID NO: 12912
  modified_base 1..5785: mod_base = OTHER; note = Each t is m1f
  source 1..5785: mol_type = other RNA

SEQ ID NO: 14510 - RNA, 5785 nt, synthetic construct; identical to SEQ ID NO: 12913
  modified_base 1..5785: mod_base = OTHER; note = Each t is m1f
  source 1..5785: mol_type = other RNA

SEQ ID NO: 14511 - RNA, 5785 nt, synthetic construct; identical to SEQ ID NO: 12914
  modified_base 1..5785: mod_base = OTHER; note = Each t is m1f
  source 1..5785: mol_type = other RNA

SEQ ID NO: 14512 - RNA, 5782 nt, synthetic construct; identical to SEQ ID NO: 12915
  modified_base 1..5782: mod_base = OTHER; note = Each t is m1f
  source 1..5782: mol_type = other RNA

SEQ ID NO: 14513 - RNA, 5785 nt, synthetic construct; identical to SEQ ID NO: 12916
  modified_base 1..5785: mod_base = OTHER; note = Each t is m1f
  source 1..5785: mol_type = other RNA

SEQ ID NO: 14514 - RNA, 5785 nt, synthetic construct; identical to SEQ ID NO: 12917
  modified_base 1..5785: mod_base = OTHER; note = Each t is m1f
  source 1..5785: mol_type = other RNA

SEQ ID NO: 14515 - RNA, 5785 nt, synthetic construct; identical to SEQ ID NO: 12918
  modified_base 1..5785: mod_base = OTHER; note = Each t is m1f
  source 1..5785: mol_type = other RNA

SEQ ID NO: 14516 - RNA, 5785 nt, synthetic construct; identical to SEQ ID NO: 12919
  modified_base 1..5785: mod_base = OTHER; note = Each t is m1f
  source 1..5785: mol_type = other RNA

SEQ ID NO: 14517 - RNA, 5785 nt, synthetic construct; identical to SEQ ID NO: 12920
  modified_base 1..5785: mod_base = OTHER; note = Each t is m1f
  source 1..5785: mol_type = other RNA

SEQ ID NO: 14518 - RNA, 5785 nt, synthetic construct; identical to SEQ ID NO: 12921
  modified_base 1..5785: mod_base = OTHER; note = Each t is m1f
  source 1..5785: mol_type = other RNA

SEQ ID NO: 14519 - RNA, 5785 nt, synthetic construct; identical to SEQ ID NO: 12922
  modified_base 1..5785: mod_base = OTHER; note = Each t is m1f
  source 1..5785: mol_type = other RNA

SEQ ID NO: 14520 - RNA, 5785 nt, synthetic construct; identical to SEQ ID NO: 12923
  modified_base 1..5785: mod_base = OTHER; note = Each t is m1f
  source 1..5785: mol_type = other RNA

SEQ ID NO: 14521 - RNA, 5785 nt, synthetic construct; identical to SEQ ID NO: 12924
  modified_base 1..5785: mod_base = OTHER; note = Each t is m1f
  source 1..5785: mol_type = other RNA

SEQ ID NO: 14522 - RNA, 5785 nt, synthetic construct; identical to SEQ ID NO: 12925
  modified_base 1..5785: mod_base = OTHER; note = Each t is m1f
  source 1..5785: mol_type = other RNA

SEQ ID NO: 14523 - RNA, 5785 nt, synthetic construct; identical to SEQ ID NO: 12926
  modified_base 1..5785: mod_base = OTHER; note = Each t is m1f
  source 1..5785: mol_type = other RNA

SEQ ID NO: 14524 - RNA, 5785 nt, synthetic construct; identical to SEQ ID NO: 12927
  modified_base 1..5785: mod_base = OTHER; note = Each t is m1f
  source 1..5785: mol_type = other RNA

SEQ ID NO: 14525 - RNA, 5785 nt, synthetic construct; identical to SEQ ID NO: 12928
  modified_base 1..5785: mod_base = OTHER; note = Each t is m1f
  source 1..5785: mol_type = other RNA

SEQ ID NO: 14526 - RNA, 5785 nt, synthetic construct; identical to SEQ ID NO: 12929
  modified_base 1..5785: mod_base = OTHER; note = Each t is m1f
  source 1..5785: mol_type = other RNA

SEQ ID NO: 14527 - RNA, 5785 nt, synthetic construct; identical to SEQ ID NO: 12930
  modified_base 1..5785: mod_base = OTHER; note = Each t is m1f
  source 1..5785: mol_type = other RNA

SEQ ID NO: 14528 - RNA, 5791 nt, synthetic construct; identical to SEQ ID NO: 12931
  modified_base 1..5791: mod_base = OTHER; note = Each t is m1f
  source 1..5791: mol_type = other RNA

SEQ ID NO: 14529 - RNA, 5785 nt, synthetic construct; identical to SEQ ID NO: 12932
  modified_base 1..5785: mod_base = OTHER; note = Each t is m1f
  source 1..5785: mol_type = other RNA

SEQ ID NO: 14530 - RNA, 5785 nt, synthetic construct; identical to SEQ ID NO: 12933
  modified_base 1..5785: mod_base = OTHER; note = Each t is m1f
  source 1..5785: mol_type = other RNA

SEQ ID NO: 14531 - RNA, 5785 nt, synthetic construct; identical to SEQ ID NO: 12934
  modified_base 1..5785: mod_base = OTHER; note = Each t is m1f
  source 1..5785: mol_type = other RNA

SEQ ID NO: 14532 - RNA, 5785 nt, synthetic construct; identical to SEQ ID NO: 12935
  modified_base 1..5785: mod_base = OTHER; note = Each t is m1f
  source 1..5785: mol_type = other RNA

SEQ ID NO: 14533 - RNA, 5785 nt, synthetic construct; identical to SEQ ID NO: 12936
  modified_base 1..5785: mod_base = OTHER; note = Each t is m1f
  source 1..5785: mol_type = other RNA

SEQ ID NO: 14534 - RNA, 5785 nt, synthetic construct; identical to SEQ ID NO: 12937
  modified_base 1..5785: mod_base = OTHER; note = Each t is m1f
  source 1..5785: mol_type = other RNA

SEQ ID NO: 14535 - RNA, 5785 nt, synthetic construct; identical to SEQ ID NO: 12938
  modified_base 1..5785: mod_base = OTHER; note = Each t is m1f
  source 1..5785: mol_type = other RNA

SEQ ID NO: 14536 - RNA, 5785 nt, synthetic construct; identical to SEQ ID NO: 12939
  modified_base 1..5785: mod_base = OTHER; note = Each t is m1f
  source 1..5785: mol_type = other RNA

SEQ ID NO: 14537 - RNA, 5785 nt, synthetic construct; identical to SEQ ID NO: 12940
  modified_base 1..5785: mod_base = OTHER; note = Each t is m1f
  source 1..5785: mol_type = other RNA

SEQ ID NO: 14538 - RNA, 5785 nt, synthetic construct; identical to SEQ ID NO: 12941
  modified_base 1..5785: mod_base = OTHER; note = Each t is m1f
  source 1..5785: mol_type = other RNA

SEQ ID NO: 14539 - RNA, 5785 nt, synthetic construct; identical to SEQ ID NO: 12942
  modified_base 1..5785: mod_base = OTHER; note = Each t is m1f
  source 1..5785: mol_type = other RNA

SEQ ID NO: 14540 - RNA, 5785 nt, synthetic construct; identical to SEQ ID NO: 12943
  modified_base 1..5785: mod_base = OTHER; note = Each t is m1f
  source 1..5785: mol_type = other RNA

SEQ ID NO: 14541 - RNA, 5785 nt, synthetic construct; identical to SEQ ID NO: 12944
  modified_base 1..5785: mod_base = OTHER; note = Each t is m1f
  source 1..5785: mol_type = other RNA

SEQ ID NO: 14542 - RNA, 5785 nt, synthetic construct; identical to SEQ ID NO: 12945
  modified_base 1..5785: mod_base = OTHER; note = Each t is m1f
  source 1..5785: mol_type = other RNA

SEQ ID NO: 14543 - RNA, 5785 nt, synthetic construct; identical to SEQ ID NO: 12946
  modified_base 1..5785: mod_base = OTHER; note = Each t is m1f
  source 1..5785: mol_type = other RNA

SEQ ID NO: 14544 - RNA, 5785 nt, synthetic construct; identical to SEQ ID NO: 12947
  modified_base 1..5785: mod_base = OTHER; note = Each t is m1f
  source 1..5785: mol_type = other RNA

SEQ ID NO: 14545 - RNA, 5785 nt, synthetic construct; identical to SEQ ID NO: 12948
  modified_base 1..5785: mod_base = OTHER; note = Each t is m1f
  source 1..5785: mol_type = other RNA

SEQ ID NO: 14546 - RNA, 5785 nt, synthetic construct; identical to SEQ ID NO: 12949
  modified_base 1..5785: mod_base = OTHER; note = Each t is m1f
  source 1..5785: mol_type = other RNA

SEQ ID NO: 14547 - RNA, 5785 nt, synthetic construct; identical to SEQ ID NO: 12950
  modified_base 1..5785: mod_base = OTHER; note = Each t is m1f
  source 1..5785: mol_type = other RNA

SEQ ID NO: 14548 - RNA, 5785 nt, synthetic construct; identical to SEQ ID NO: 12951
  modified_base 1..5785: mod_base = OTHER; note = Each t is m1f
  source 1..5785: mol_type = other RNA

SEQ ID NO: 14549 - RNA, 5785 nt, synthetic construct; identical to SEQ ID NO: 12952
  modified_base 1..5785: mod_base = OTHER; note = Each t is m1f
  source 1..5785: mol_type = other RNA

SEQ ID NO: 14550 - RNA, 5785 nt, synthetic construct; identical to SEQ ID NO: 12953
  modified_base 1..5785: mod_base = OTHER; note = Each t is m1f
  source 1..5785: mol_type = other RNA

SEQ ID NO: 14551 - RNA, 5785 nt, synthetic construct; identical to SEQ ID NO: 12954
  modified_base 1..5785: mod_base = OTHER; note = Each t is m1f
  source 1..5785: mol_type = other RNA

SEQ ID NO: 14552 - RNA, 5785 nt, synthetic construct; identical to SEQ ID NO: 12955
  modified_base 1..5785: mod_base = OTHER; note = Each t is m1f
  source 1..5785: mol_type = other RNA

SEQ ID NO: 14553 - RNA, 5785 nt, synthetic construct; identical to SEQ ID NO: 12956
  modified_base 1..5785: mod_base = OTHER; note = Each t is m1f
  source 1..5785: mol_type = other RNA

SEQ ID NO: 14554 - RNA, 5785 nt, synthetic construct; identical to SEQ ID NO: 12957
  modified_base 1..5785: mod_base = OTHER; note = Each t is m1f
  source 1..5785: mol_type = other RNA

SEQ ID NO: 14555 - RNA, 5785 nt, synthetic construct; identical to SEQ ID NO: 12958
  modified_base 1..5785: mod_base = OTHER; note = Each t is m1f
  source 1..5785: mol_type = other RNA

SEQ ID NO: 14556 - RNA, 5785 nt, synthetic construct; identical to SEQ ID NO: 12959
  modified_base 1..5785: mod_base = OTHER; note = Each t is m1f
  source 1..5785: mol_type = other RNA

SEQ ID NO: 14557 - RNA, 5785 nt, synthetic construct; identical to SEQ ID NO: 12960
  modified_base 1..5785: mod_base = OTHER; note = Each t is m1f
  source 1..5785: mol_type = other RNA

SEQ ID NO: 14558 - RNA, 5785 nt, synthetic construct; identical to SEQ ID NO: 12961
  modified_base 1..5785: mod_base = OTHER; note = Each t is m1f
  source 1..5785: mol_type = other RNA

SEQ ID NO: 14559 - RNA, 5785 nt, synthetic construct; identical to SEQ ID NO: 12962
  modified_base 1..5785: mod_base = OTHER; note = Each t is m1f
  source 1..5785: mol_type = other RNA

SEQ ID NO: 14560 - RNA, 5785 nt, synthetic construct; identical to SEQ ID NO: 12963
  modified_base 1..5785: mod_base = OTHER; note = Each t is m1f
  source 1..5785: mol_type = other RNA

SEQ ID NO: 14561 - RNA, 5785 nt, synthetic construct; identical to SEQ ID NO: 12964
  modified_base 1..5785: mod_base = OTHER; note = Each t is m1f
  source 1..5785: mol_type = other RNA

SEQ ID NO: 14562 - RNA, 5785 nt, synthetic construct; identical to SEQ ID NO: 12965
  modified_base 1..5785: mod_base = OTHER; note = Each t is m1f
  source 1..5785: mol_type = other RNA

SEQ ID NO: 14563 - RNA, 5785 nt, synthetic construct; identical to SEQ ID NO: 12966
  modified_base 1..5785: mod_base = OTHER; note = Each t is m1f
  source 1..5785: mol_type = other RNA

SEQ ID NO: 14564 - RNA, 5785 nt, synthetic construct; identical to SEQ ID NO: 12967
  modified_base 1..5785: mod_base = OTHER; note = Each t is m1f
  source 1..5785: mol_type = other RNA

SEQ ID NO: 14565 - RNA, 5785 nt, synthetic construct; identical to SEQ ID NO: 12968
  modified_base 1..5785: mod_base = OTHER; note = Each t is m1f
  source 1..5785: mol_type = other RNA

SEQ ID NO: 14566 - RNA, 5785 nt, synthetic construct; identical to SEQ ID NO: 12969
  modified_base 1..5785: mod_base = OTHER; note = Each t is m1f
  source 1..5785: mol_type = other RNA

SEQ ID NO: 14567 - RNA, 5785 nt, synthetic construct; identical to SEQ ID NO: 12970
  modified_base 1..5785: mod_base = OTHER; note = Each t is m1f
  source 1..5785: mol_type = other RNA

SEQ ID NO: 14568 - RNA, 5785 nt, synthetic construct; identical to SEQ ID NO: 12971
  modified_base 1..5785: mod_base = OTHER; note = Each t is m1f
  source 1..5785: mol_type = other RNA

SEQ ID NO: 14569 - RNA, 5785 nt, synthetic construct; identical to SEQ ID NO: 12972
  modified_base 1..5785: mod_base = OTHER; note = Each t is m1f
  source 1..5785: mol_type = other RNA

SEQ ID NO: 14570 - RNA, 5785 nt, synthetic construct; identical to SEQ ID NO: 12973
  modified_base 1..5785: mod_base = OTHER; note = Each t is m1f
  source 1..5785: mol_type = other RNA

SEQ ID NO: 14571 - RNA, 5785 nt, synthetic construct; identical to SEQ ID NO: 12974
  modified_base 1..5785: mod_base = OTHER; note = Each t is m1f
  source 1..5785: mol_type = other RNA

SEQ ID NO: 14572 - RNA, 5785 nt, synthetic construct; identical to SEQ ID NO: 12975
  modified_base 1..5785: mod_base = OTHER; note = Each t is m1f
  source 1..5785: mol_type = other RNA

SEQ ID NO: 14573 - RNA, 5785 nt, synthetic construct; identical to SEQ ID NO: 12976
  modified_base 1..5785: mod_base = OTHER; note = Each t is m1f
  source 1..5785: mol_type = other RNA

SEQ ID NO: 14574 - RNA, 5785 nt, synthetic construct; identical to SEQ ID NO: 12977
  modified_base 1..5785: mod_base = OTHER; note = Each t is m1f
  source 1..5785: mol_type = other RNA

SEQ ID NO: 14575 - RNA, 5785 nt, synthetic construct; identical to SEQ ID NO: 12978
  modified_base 1..5785: mod_base = OTHER; note = Each t is m1f
  source 1..5785: mol_type = other RNA

SEQ ID NO: 14576 - RNA, 5818 nt, synthetic construct; identical to SEQ ID NO: 12979
  modified_base 1..5818: mod_base = OTHER; note = Each t is m1f
  source 1..5818: mol_type = other RNA

SEQ ID NO: 14577 - RNA, 5785 nt, synthetic construct; identical to SEQ ID NO: 12980
  modified_base 1..5785: mod_base = OTHER; note = Each t is m1f
  source 1..5785: mol_type = other RNA

SEQ ID NO: 14578 - RNA, 5785 nt, synthetic construct; identical to SEQ ID NO: 12981
  modified_base 1..5785: mod_base = OTHER; note = Each t is m1f
  source 1..5785: mol_type = other RNA

SEQ ID NO: 14579 - RNA, 5785 nt, synthetic construct; identical to SEQ ID NO: 12982
  modified_base 1..5785: mod_base = OTHER; note = Each t is m1f
  source 1..5785: mol_type = other RNA

SEQ ID NO: 14580 - RNA, 5785 nt, synthetic construct; identical to SEQ ID NO: 12983
  modified_base 1..5785: mod_base = OTHER; note = Each t is m1f
  source 1..5785: mol_type = other RNA

SEQ ID NO: 14581 - RNA, 5785 nt, synthetic construct; identical to SEQ ID NO: 12984
  modified_base 1..5785: mod_base = OTHER; note = Each t is m1f
  source 1..5785: mol_type = other RNA

SEQ ID NO: 14582 - RNA, 5785 nt, synthetic construct; identical to SEQ ID NO: 12985
  modified_base 1..5785: mod_base = OTHER; note = Each t is m1f
  source 1..5785: mol_type = other RNA

SEQ ID NO: 14583 - RNA, 5785 nt, synthetic construct; identical to SEQ ID NO: 12986
  modified_base 1..5785: mod_base = OTHER; note = Each t is m1f
  source 1..5785: mol_type = other RNA

SEQ ID NO: 14584 - RNA, 5785 nt, synthetic construct; identical to SEQ ID NO: 12987
  modified_base 1..5785: mod_base = OTHER; note = Each t is m1f
  source 1..5785: mol_type = other RNA

SEQ ID NO: 14585 - RNA, 5785 nt, synthetic construct; identical to SEQ ID NO: 12988
  modified_base 1..5785: mod_base = OTHER; note = Each t is m1f
  source 1..5785: mol_type = other RNA

SEQ ID NO: 14586 - RNA, 5785 nt, synthetic construct; identical to SEQ ID NO: 12989
  modified_base 1..5785: mod_base = OTHER; note = Each t is m1f
  source 1..5785: mol_type = other RNA

SEQ ID NO: 14587 - RNA, 5785 nt, synthetic construct; identical to SEQ ID NO: 12990
  modified_base 1..5785: mod_base = OTHER; note = Each t is m1f
  source 1..5785: mol_type = other RNA

SEQ ID NO: 14588 - RNA, 5785 nt, synthetic construct; identical to SEQ ID NO: 12991
  modified_base 1..5785: mod_base = OTHER; note = Each t is m1f
  source 1..5785: mol_type = other RNA

SEQ ID NO: 14589 - RNA, 5785 nt, synthetic construct; identical to SEQ ID NO: 12992
  modified_base 1..5785: mod_base = OTHER; note = Each t is m1f
  source 1..5785: mol_type = other RNA

SEQ ID NO: 14590 - RNA, 5785 nt, synthetic construct; identical to SEQ ID NO: 12993
  modified_base 1..5785: mod_base = OTHER; note = Each t is m1f
  source 1..5785: mol_type = other RNA

SEQ ID NO: 14591 - RNA, 5785 nt, synthetic construct; identical to SEQ ID NO: 12994
  modified_base 1..5785: mod_base = OTHER; note = Each t is m1f
  source 1..5785: mol_type = other RNA

SEQ ID NO: 14592 - RNA, 5785 nt, synthetic construct; identical to SEQ ID NO: 12995
  modified_base 1..5785: mod_base = OTHER; note = Each t is m1f
  source 1..5785: mol_type = other RNA

SEQ ID NO: 14593 - RNA, 5785 nt, synthetic construct; identical to SEQ ID NO: 12996
  modified_base 1..5785: mod_base = OTHER; note = Each t is m1f
  source 1..5785: mol_type = other RNA

SEQ ID NO: 14594 - RNA, 5785 nt, synthetic construct; identical to SEQ ID NO: 12997
  modified_base 1..5785: mod_base = OTHER; note = Each t is m1f
  source 1..5785: mol_type = other RNA

SEQ ID NO: 14595 - RNA, 5794 nt, synthetic construct; identical to SEQ ID NO: 12998
  modified_base 1..5794: mod_base = OTHER; note = Each t is m1f
  source 1..5794: mol_type = other RNA

SEQ ID NO: 14596 - RNA, 5785 nt, synthetic construct; identical to SEQ ID NO: 12999
  modified_base 1..5785: mod_base = OTHER; note = Each t is m1f
  source 1..5785: mol_type = other RNA

SEQ ID NO: 14597 - RNA, 5785 nt, synthetic construct; identical to SEQ ID NO: 13000
  modified_base 1..5785: mod_base = OTHER; note = Each t is m1f
  source 1..5785: mol_type = other RNA

SEQ ID NO: 14598 - RNA, 5785 nt, synthetic construct; identical to SEQ ID NO: 13001
  modified_base 1..5785: mod_base = OTHER; note = Each t is m1f
  source 1..5785: mol_type = other RNA

SEQ ID NO: 14599 - RNA, 5785 nt, synthetic construct; identical to SEQ ID NO: 13002
  modified_base 1..5785: mod_base = OTHER; note = Each t is m1f
  source 1..5785: mol_type = other RNA

SEQ ID NO: 14600 - RNA, 5785 nt, synthetic construct; identical to SEQ ID NO: 13003
  modified_base 1..5785: mod_base = OTHER; note = Each t is m1f
  source 1..5785: mol_type = other RNA

SEQ ID NO: 14601 - RNA, 5785 nt, synthetic construct; identical to SEQ ID NO: 13004
  modified_base 1..5785: mod_base = OTHER; note = Each t is m1f
  source 1..5785: mol_type = other RNA

SEQ ID NO: 14602 - RNA, 5785 nt, synthetic construct; identical to SEQ ID NO: 13005
  modified_base 1..5785: mod_base = OTHER; note = Each t is m1f
  source 1..5785: mol_type = other RNA

SEQ ID NO: 14603 - RNA, 5785 nt, synthetic construct; identical to SEQ ID NO: 13006
  modified_base 1..5785: mod_base = OTHER; note = Each t is m1f
  source 1..5785: mol_type = other RNA

SEQ ID NO: 14604 - RNA, 5785 nt, synthetic construct; identical to SEQ ID NO: 13007
  modified_base 1..5785: mod_base = OTHER; note = Each t is m1f
  source 1..5785: mol_type = other RNA

SEQ ID NO: 14605 - RNA, 5785 nt, synthetic construct; identical to SEQ ID NO: 13008
  modified_base 1..5785: mod_base = OTHER; note = Each t is m1f
  source 1..5785: mol_type = other RNA

SEQ ID NO: 14606 - RNA, 5785 nt, synthetic construct; identical to SEQ ID NO: 13009
  modified_base 1..5785: mod_base = OTHER; note = Each t is m1f
  source 1..5785: mol_type = other RNA

SEQ ID NO: 14607 - RNA, 5785 nt, synthetic construct; identical to SEQ ID NO: 13010
  modified_base 1..5785: mod_base = OTHER; note = Each t is m1f
  source 1..5785: mol_type = other RNA

SEQ ID NO: 14608 - RNA, 5785 nt, synthetic construct; identical to SEQ ID NO: 13011
  modified_base 1..5785: mod_base = OTHER; note = Each t is m1f
  source 1..5785: mol_type = other RNA

SEQ ID NO: 14609 - RNA, 5785 nt, synthetic construct; identical to SEQ ID NO: 13012
  modified_base 1..5785: mod_base = OTHER; note = Each t is m1f
  source 1..5785: mol_type = other RNA

SEQ ID NO: 14610 - RNA, 5782 nt, synthetic construct; identical to SEQ ID NO: 13013
  modified_base 1..5782: mod_base = OTHER; note = Each t is m1f
  source 1..5782: mol_type = other RNA

SEQ ID NO: 14611 - RNA, 5785 nt, synthetic construct; identical to SEQ ID NO: 13014
  modified_base 1..5785: mod_base = OTHER; note = Each t is m1f
  source 1..5785: mol_type = other RNA

SEQ ID NO: 14612 - RNA, 5785 nt, synthetic construct; identical to SEQ ID NO: 13015
  modified_base 1..5785: mod_base = OTHER; note = Each t is m1f
  source 1..5785: mol_type = other RNA

SEQ ID NO: 14613 - RNA, 5785 nt, synthetic construct; identical to SEQ ID NO: 13016
  modified_base 1..5785: mod_base = OTHER; note = Each t is m1f
  source 1..5785: mol_type = other RNA

SEQ ID NO: 14614 - RNA, 5785 nt, synthetic construct; identical to SEQ ID NO: 13017
  modified_base 1..5785: mod_base = OTHER; note = Each t is m1f
  source 1..5785: mol_type = other RNA

SEQ ID NO: 14615 - RNA, 5785 nt, synthetic construct; identical to SEQ ID NO: 13018
  modified_base 1..5785: mod_base = OTHER; note = Each t is m1f
  source 1..5785: mol_type = other RNA

SEQ ID NO: 14616 - RNA, 5785 nt, synthetic construct; identical to SEQ ID NO: 13019
  modified_base 1..5785: mod_base = OTHER; note = Each t is m1f
  source 1..5785: mol_type = other RNA

SEQ ID NO: 14617 - RNA, 5785 nt, synthetic construct; identical to SEQ ID NO: 13020
  modified_base 1..5785: mod_base = OTHER; note = Each t is m1f
  source 1..5785: mol_type = other RNA

SEQ ID NO: 14618 - RNA, 5785 nt, synthetic construct; identical to SEQ ID NO: 13021
  modified_base 1..5785: mod_base = OTHER; note = Each t is m1f
  source 1..5785: mol_type = other RNA

SEQ ID NO: 14619 - RNA, 5785 nt, synthetic construct; identical to SEQ ID NO: 13022
  modified_base 1..5785: mod_base = OTHER; note = Each t is m1f
  source 1..5785: mol_type = other RNA

SEQ ID NO: 14620 - RNA, 5785 nt, synthetic construct; identical to SEQ ID NO: 13023
  modified_base 1..5785: mod_base = OTHER; note = Each t is m1f
  source 1..5785: mol_type = other RNA

SEQ ID NO: 14621 - RNA, 5785 nt, synthetic construct; identical to SEQ ID NO: 13024
  modified_base 1..5785: mod_base = OTHER; note = Each t is m1f
  source 1..5785: mol_type = other RNA

SEQ ID NO: 14622 - RNA, 5785 nt, synthetic construct; identical to SEQ ID NO: 13025
  modified_base 1..5785: mod_base = OTHER; note = Each t is m1f
  source 1..5785: mol_type = other RNA

SEQ ID NO: 14623 - RNA, 5821 nt, synthetic construct; identical to SEQ ID NO: 13026
  modified_base 1..5821: mod_base = OTHER; note = Each t is m1f
  source 1..5821: mol_type = other RNA

SEQ ID NO: 14624 - RNA, 5785 nt, synthetic construct; identical to SEQ ID NO: 13027
  modified_base 1..5785: mod_base = OTHER; note = Each t is m1f
  source 1..5785: mol_type = other RNA

SEQ ID NO: 14625 - RNA, 5785 nt, synthetic construct; identical to SEQ ID NO: 13028
  modified_base 1..5785: mod_base = OTHER; note = Each t is m1f
  source 1..5785: mol_type = other RNA

SEQ ID NO: 14626 - RNA, 5785 nt, synthetic construct; identical to SEQ ID NO: 13029
  modified_base 1..5785: mod_base = OTHER; note = Each t is m1f
  source 1..5785: mol_type = other RNA

SEQ ID NO: 14627 - RNA, 5785 nt, synthetic construct; identical to SEQ ID NO: 13030
  modified_base 1..5785: mod_base = OTHER; note = Each t is m1f
  source 1..5785: mol_type = other RNA

SEQ ID NO: 14628 - RNA, 5785 nt, synthetic construct; identical to SEQ ID NO: 13031
  modified_base 1..5785: mod_base = OTHER; note = Each t is m1f
  source 1..5785: mol_type = other RNA

SEQ ID NO: 14629 - RNA, 5785 nt, synthetic construct; identical to SEQ ID NO: 13032
  modified_base 1..5785: mod_base = OTHER; note = Each t is m1f
  source 1..5785: mol_type = other RNA

SEQ ID NO: 14630 - RNA, 5785 nt, synthetic construct; identical to SEQ ID NO: 13033
  modified_base 1..5785: mod_base = OTHER; note = Each t is m1f
  source 1..5785: mol_type = other RNA

SEQ ID NO: 14631 - RNA, 5785 nt, synthetic construct; identical to SEQ ID NO: 13034
  modified_base 1..5785: mod_base = OTHER; note = Each t is m1f
  source 1..5785: mol_type = other RNA

SEQ ID NO: 14632 - RNA, 5785 nt, synthetic construct; identical to SEQ ID NO: 13035
  modified_base 1..5785: mod_base = OTHER; note = Each t is m1f
  source 1..5785: mol_type = other RNA

SEQ ID NO: 14633 - RNA, 5785 nt, synthetic construct; identical to SEQ ID NO: 13036
  modified_base 1..5785: mod_base = OTHER; note = Each t is m1f
  source 1..5785: mol_type = other RNA

SEQ ID NO: 14634 - RNA, 5785 nt, synthetic construct; identical to SEQ ID NO: 13037
  modified_base 1..5785: mod_base = OTHER; note = Each t is m1f
  source 1..5785: mol_type = other RNA

SEQ ID NO: 14635 - RNA, 5785 nt, synthetic construct; identical to SEQ ID NO: 13038
  modified_base 1..5785: mod_base = OTHER; note = Each t is m1f
  source 1..5785: mol_type = other RNA

SEQ ID NO: 14636 - RNA, 5785 nt, synthetic construct; identical to SEQ ID NO: 13039
  modified_base 1..5785: mod_base = OTHER; note = Each t is m1f
  source 1..5785: mol_type = other RNA

SEQ ID NO: 14637 - RNA, 5785 nt, synthetic construct; identical to SEQ ID NO: 13040
  modified_base 1..5785: mod_base = OTHER; note = Each t is m1f
  source 1..5785: mol_type = other RNA

SEQ ID NO: 14638 - RNA, 5785 nt, synthetic construct; identical to SEQ ID NO: 13041
  modified_base 1..5785: mod_base = OTHER; note = Each t is m1f
  source 1..5785: mol_type = other RNA

SEQ ID NO: 14639 - RNA, 5785 nt, synthetic construct; identical to SEQ ID NO: 13042
  modified_base 1..5785: mod_base = OTHER; note = Each t is m1f
  source 1..5785: mol_type = other RNA

SEQ ID NO: 14640 - RNA, 5785 nt, synthetic construct; identical to SEQ ID NO: 13043
  modified_base 1..5785: mod_base = OTHER; note = Each t is m1f
  source 1..5785: mol_type = other RNA

SEQ ID NO: 14641 - RNA, 5785 nt, synthetic construct; identical to SEQ ID NO: 13044
  modified_base 1..5785: mod_base = OTHER; note = Each t is m1f
  source 1..5785: mol_type = other RNA

SEQ ID NO: 14642 - RNA, 5785 nt, synthetic construct; identical to SEQ ID NO: 13045
  modified_base 1..5785: mod_base = OTHER; note = Each t is m1f
  source 1..5785: mol_type = other RNA

SEQ ID NO: 14643 - RNA, 5785 nt, synthetic construct; identical to SEQ ID NO: 13046
  modified_base 1..5785: mod_base = OTHER; note = Each t is m1f
  source 1..5785: mol_type = other RNA

SEQ ID NO: 14644 - RNA, 5785 nt, synthetic construct; identical to SEQ ID NO: 13047
  modified_base 1..5785: mod_base = OTHER; note = Each t is m1f
  source 1..5785: mol_type = other RNA

SEQ ID NO: 14645 - RNA, 5785 nt, synthetic construct; identical to SEQ ID NO: 13048
  modified_base 1..5785: mod_base = OTHER; note = Each t is m1f
  source 1..5785: mol_type = other RNA

SEQ ID NO: 14646 - RNA, 5785 nt, synthetic construct; identical to SEQ ID NO: 13049
  modified_base 1..5785: mod_base = OTHER; note = Each t is m1f
  source 1..5785: mol_type = other RNA

SEQ ID NO: 14647 - RNA, 5785 nt, synthetic construct; identical to SEQ ID NO: 13050
  modified_base 1..5785: mod_base = OTHER; note = Each t is m1f
  source 1..5785: mol_type = other RNA

SEQ ID NO: 14648 - RNA, 5785 nt, synthetic construct; identical to SEQ ID NO: 13051
  modified_base 1..5785: mod_base = OTHER; note = Each t is m1f
  source 1..5785: mol_type = other RNA

SEQ ID NO: 14649 - RNA, 5785 nt, synthetic construct; identical to SEQ ID NO: 13052
  modified_base 1..5785: mod_base = OTHER; note = Each t is m1f
  source 1..5785: mol_type = other RNA

SEQ ID NO: 14650 - RNA, 5785 nt, synthetic construct; identical to SEQ ID NO: 13053
  modified_base 1..5785: mod_base = OTHER; note = Each t is m1f
  source 1..5785: mol_type = other RNA

SEQ ID NO: 14651 - RNA, 5785 nt, synthetic construct; identical to SEQ ID NO: 13054
  modified_base 1..5785: mod_base = OTHER; note = Each t is m1f
  source 1..5785: mol_type = other RNA

SEQ ID NO: 14652 - RNA, 5785 nt, synthetic construct; identical to SEQ ID NO: 13055
  modified_base 1..5785: mod_base = OTHER; note = Each t is m1f
  source 1..5785: mol_type = other RNA

SEQ ID NO: 14653 - RNA, 5785 nt, synthetic construct; identical to SEQ ID NO: 13056
  modified_base 1..5785: mod_base = OTHER; note = Each t is m1f
  source 1..5785: mol_type = other RNA

SEQ ID NO: 14654 - RNA, 5785 nt, synthetic construct; identical to SEQ ID NO: 13057
  modified_base 1..5785: mod_base = OTHER; note = Each t is m1f
  source 1..5785: mol_type = other RNA

SEQ ID NO: 14655 - RNA, 5785 nt, synthetic construct; identical to SEQ ID NO: 13058
  modified_base 1..5785: mod_base = OTHER; note = Each t is m1f
  source 1..5785: mol_type = other RNA

SEQ ID NO: 14656 - RNA, 5785 nt, synthetic construct; identical to SEQ ID NO: 13059
  modified_base 1..5785: mod_base = OTHER; note = Each t is m1f
  source 1..5785: mol_type = other RNA

SEQ ID NO: 14657 - RNA, 5785 nt, synthetic construct; identical to SEQ ID NO: 13060
  modified_base 1..5785: mod_base = OTHER; note = Each t is m1f
  source 1..5785: mol_type = other RNA

SEQ ID NO: 14658 - RNA, 5785 nt, synthetic construct; identical to SEQ ID NO: 13061
  modified_base 1..5785: mod_base = OTHER; note = Each t is m1f
  source 1..5785: mol_type = other RNA

SEQ ID NO: 14659 - RNA, 5785 nt, synthetic construct; identical to SEQ ID NO: 13062
  modified_base 1..5785: mod_base = OTHER; note = Each t is m1f
  source 1..5785: mol_type = other RNA

SEQ ID NO: 14660 - RNA, 5785 nt, synthetic construct; identical to SEQ ID NO: 13063
  modified_base 1..5785: mod_base = OTHER; note = Each t is m1f
  source 1..5785: mol_type = other RNA

SEQ ID NO: 14661 - RNA, 5785 nt, synthetic construct; identical to SEQ ID NO: 13064
  modified_base 1..5785: mod_base = OTHER; note = Each t is m1f
  source 1..5785: mol_type = other RNA

SEQ ID NO: 14662 - RNA, 5785 nt, synthetic construct; identical to SEQ ID NO: 13065
  modified_base 1..5785: mod_base = OTHER; note = Each t is m1f
  source 1..5785: mol_type = other RNA

SEQ ID NO: 14663 - RNA, 5785 nt, synthetic construct; identical to SEQ ID NO: 13066
  modified_base 1..5785: mod_base = OTHER; note = Each t is m1f
  source 1..5785: mol_type = other RNA

SEQ ID NO: 14664 - RNA, 5785 nt, synthetic construct; identical to SEQ ID NO: 13067
  modified_base 1..5785: mod_base = OTHER; note = Each t is m1f
  source 1..5785: mol_type = other RNA

SEQ ID NO: 14665 - RNA, 5785 nt, synthetic construct; identical to SEQ ID NO: 13068
  modified_base 1..5785: mod_base = OTHER; note = Each t is m1f
  source 1..5785: mol_type = other RNA

SEQ ID NO: 14666 - RNA, 5785 nt, synthetic construct; identical to SEQ ID NO: 13069
  modified_base 1..5785: mod_base = OTHER; note = Each t is m1f
  source 1..5785: mol_type = other RNA

SEQ ID NO: 14667 - RNA, 5785 nt, synthetic construct; identical to SEQ ID NO: 13070
  modified_base 1..5785: mod_base = OTHER; note = Each t is m1f
  source 1..5785: mol_type = other RNA

SEQ ID NO: 14668 - RNA, 5785 nt, synthetic construct; identical to SEQ ID NO: 13071
  modified_base 1..5785: mod_base = OTHER; note = Each t is m1f
  source 1..5785: mol_type = other RNA

SEQ ID NO: 14669 - RNA, 5785 nt, synthetic construct; identical to SEQ ID NO: 13072
  modified_base 1..5785: mod_base = OTHER; note = Each t is m1f
  source 1..5785: mol_type = other RNA

SEQ ID NO: 14670 - RNA, 5785 nt, synthetic construct; identical to SEQ ID NO: 13073
  modified_base 1..5785: mod_base = OTHER; note = Each t is m1f
  source 1..5785: mol_type = other RNA

SEQ ID NO: 14671 - RNA, 5785 nt, synthetic construct; identical to SEQ ID NO: 13074
  modified_base 1..5785: mod_base = OTHER; note = Each t is m1f
  source 1..5785: mol_type = other RNA

SEQ ID NO: 14672 - RNA, 5785 nt, synthetic construct; identical to SEQ ID NO: 13075
  modified_base 1..5785: mod_base = OTHER; note = Each t is m1f
  source 1..5785: mol_type = other RNA

SEQ ID NO: 14673 - RNA, 5785 nt, synthetic construct; identical to SEQ ID NO: 13076
  modified_base 1..5785: mod_base = OTHER; note = Each t is m1f
  source 1..5785: mol_type = other RNA

SEQ ID NO: 14674 - RNA, 5785 nt, synthetic construct; identical to SEQ ID NO: 13077
  modified_base 1..5785: mod_base = OTHER; note = Each t is m1f
  source 1..5785: mol_type = other RNA

SEQ ID NO: 14675 - RNA, 5785 nt, synthetic construct; identical to SEQ ID NO: 13078
  modified_base 1..5785: mod_base = OTHER; note = Each t is m1f
  source 1..5785: mol_type = other RNA

SEQ ID NO: 14676 - RNA, 5785 nt, synthetic construct; identical to SEQ ID NO: 13079
  modified_base 1..5785: mod_base = OTHER; note = Each t is m1f
  source 1..5785: mol_type = other RNA

SEQ ID NO: 14677 - RNA, 5785 nt, synthetic construct; identical to SEQ ID NO: 13080
  modified_base 1..5785: mod_base = OTHER; note = Each t is m1f
  source 1..5785: mol_type = other RNA

SEQ ID NO: 14678 - RNA, 5785 nt, synthetic construct; identical to SEQ ID NO: 13081
  modified_base 1..5785: mod_base = OTHER; note = Each t is m1f
  source 1..5785: mol_type = other RNA

SEQ ID NO: 14679 - RNA, 5785 nt, synthetic construct; identical to SEQ ID NO: 13082
  modified_base 1..5785: mod_base = OTHER; note = Each t is m1f
  source 1..5785: mol_type = other RNA

SEQ ID NO: 14680 - RNA, 5785 nt, synthetic construct; identical to SEQ ID NO: 13083
  modified_base 1..5785: mod_base = OTHER; note = Each t is m1f
  source 1..5785: mol_type = other RNA

SEQ ID NO: 14681 - RNA, 5785 nt, synthetic construct; identical to SEQ ID NO: 13084
  modified_base 1..5785: mod_base = OTHER; note = Each t is m1f
  source 1..5785: mol_type = other RNA

SEQ ID NO: 14682 - RNA, 5785 nt, synthetic construct; identical to SEQ ID NO: 13085
  modified_base 1..5785: mod_base = OTHER; note = Each t is m1f
  source 1..5785: mol_type = other RNA

SEQ ID NO: 14683 - RNA, 5785 nt, synthetic construct; identical to SEQ ID NO: 13086
  modified_base 1..5785: mod_base = OTHER; note = Each t is m1f
  source 1..5785: mol_type = other RNA

SEQ ID NO: 14684 - RNA, 5785 nt, synthetic construct; identical to SEQ ID NO: 13087
  modified_base 1..5785: mod_base = OTHER; note = Each t is m1f
  source 1..5785: mol_type = other RNA

SEQ ID NO: 14685 - RNA, 5785 nt, synthetic construct; identical to SEQ ID NO: 13088
  modified_base 1..5785: mod_base = OTHER; note = Each t is m1f
  source 1..5785: mol_type = other RNA

SEQ ID NO: 14686 - RNA, 5785 nt, synthetic construct; identical to SEQ ID NO: 13089
  modified_base 1..5785: mod_base = OTHER; note = Each t is m1f
  source 1..5785: mol_type = other RNA

SEQ ID NO: 14687 - RNA, 5785 nt, synthetic construct; identical to SEQ ID NO: 13090
  modified_base 1..5785: mod_base = OTHER; note = Each t is m1f
  source 1..5785: mol_type = other RNA

SEQ ID NO: 14688 - RNA, 5785 nt, synthetic construct; identical to SEQ ID NO: 13091
  modified_base 1..5785: mod_base = OTHER; note = Each t is m1f
  source 1..5785: mol_type = other RNA

SEQ ID NO: 14689 - RNA, 5785 nt, synthetic construct; identical to SEQ ID NO: 13092
  modified_base 1..5785: mod_base = OTHER; note = Each t is m1f
  source 1..5785: mol_type = other RNA

SEQ ID NO: 14690 - RNA, 5785 nt, synthetic construct; identical to SEQ ID NO: 13093
  modified_base 1..5785: mod_base = OTHER; note = Each t is m1f
  source 1..5785: mol_type = other RNA

SEQ ID NO: 14691 - RNA, 5785 nt, synthetic construct; identical to SEQ ID NO: 13094
  modified_base 1..5785: mod_base = OTHER; note = Each t is m1f
  source 1..5785: mol_type = other RNA

SEQ ID NO: 14692 - RNA, 5785 nt, synthetic construct; identical to SEQ ID NO: 13095
  modified_base 1..5785: mod_base = OTHER; note = Each t is m1f
  source 1..5785: mol_type = other RNA

SEQ ID NO: 14693 - RNA, 5785 nt, synthetic construct; identical to SEQ ID NO: 13096
  modified_base 1..5785: mod_base = OTHER; note = Each t is m1f
  source 1..5785: mol_type = other RNA

SEQ ID NO: 14694 - RNA, 5785 nt, synthetic construct; identical to SEQ ID NO: 13097
  modified_base 1..5785: mod_base = OTHER; note = Each t is m1f
  source 1..5785: mol_type = other RNA

SEQ ID NO: 14695 - RNA, 5785 nt, synthetic construct; identical to SEQ ID NO: 13098
  modified_base 1..5785: mod_base = OTHER; note = Each t is m1f
  source 1..5785: mol_type = other RNA

SEQ ID NO: 14696 - RNA, 5785 nt, synthetic construct; identical to SEQ ID NO: 13099
  modified_base 1..5785: mod_base = OTHER; note = Each t is m1f
  source 1..5785: mol_type = other RNA

SEQ ID NO: 14697 - RNA, 5785 nt, synthetic construct; identical to SEQ ID NO: 13100
  modified_base 1..5785: mod_base = OTHER; note = Each t is m1f
  source 1..5785: mol_type = other RNA

SEQ ID NO: 14698 - RNA, 5785 nt, synthetic construct; identical to SEQ ID NO: 13101
  modified_base 1..5785: mod_base = OTHER; note = Each t is m1f
  source 1..5785: mol_type = other RNA

SEQ ID NO: 14699 - RNA, 5785 nt, synthetic construct; identical to SEQ ID NO: 13102
  modified_base 1..5785: mod_base = OTHER; note = Each t is m1f
  source 1..5785: mol_type = other RNA

SEQ ID NO: 14700 - RNA, 5785 nt, synthetic construct; identical to SEQ ID NO: 13103
  modified_base 1..5785: mod_base = OTHER; note = Each t is m1f
  source 1..5785: mol_type = other RNA

SEQ ID NO: 14701 - RNA, 5785 nt, synthetic construct; identical to SEQ ID NO: 13104
  modified_base 1..5785: mod_base = OTHER; note = Each t is m1f
  source 1..5785: mol_type = other RNA

SEQ ID NO: 14702 - RNA, 5785 nt, synthetic construct; identical to SEQ ID NO: 13105
  modified_base 1..5785: mod_base = OTHER; note = Each t is m1f
  source 1..5785: mol_type = other RNA

SEQ ID NO: 14703 - RNA, 5785 nt, synthetic construct; identical to SEQ ID NO: 13106
  modified_base 1..5785: mod_base = OTHER; note = Each t is m1f
  source 1..5785: mol_type = other RNA

SEQ ID NO: 14704 - RNA, 5785 nt, synthetic construct; identical to SEQ ID NO: 13107
  modified_base 1..5785: mod_base = OTHER; note = Each t is m1f
  source 1..5785: mol_type = other RNA

SEQ ID NO: 14705 - RNA, 5785 nt, synthetic construct; identical to SEQ ID NO: 13108
  modified_base 1..5785: mod_base = OTHER; note = Each t is m1f
  source 1..5785: mol_type = other RNA

SEQ ID NO: 14706 - RNA, 5785 nt, synthetic construct; identical to SEQ ID NO: 13109
  modified_base 1..5785: mod_base = OTHER; note = Each t is m1f
  source 1..5785: mol_type = other RNA

SEQ ID NO: 14707 - RNA, 5785 nt, synthetic construct; identical to SEQ ID NO: 13110
  modified_base 1..5785: mod_base = OTHER; note = Each t is m1f
  source 1..5785: mol_type = other RNA

SEQ ID NO: 14708 - RNA, 5785 nt, synthetic construct; identical to SEQ ID NO: 13111
  modified_base 1..5785: mod_base = OTHER; note = Each t is m1f
  source 1..5785: mol_type = other RNA

SEQ ID NO: 14709 - RNA, 5785 nt, synthetic construct; identical to SEQ ID NO: 13112
  modified_base 1..5785: mod_base = OTHER; note = Each t is m1f
  source 1..5785: mol_type = other RNA

SEQ ID NO: 14710 - RNA, 5785 nt, synthetic construct; identical to SEQ ID NO: 13113
  modified_base 1..5785: mod_base = OTHER; note = Each t is m1f
  source 1..5785: mol_type = other RNA

SEQ ID NO: 14711 - RNA, 5785 nt, synthetic construct; identical to SEQ ID NO: 13114
  modified_base 1..5785: mod_base = OTHER; note = Each t is m1f
  source 1..5785: mol_type = other RNA

SEQ ID NO: 14712 - RNA, 5785 nt, synthetic construct; identical to SEQ ID NO: 13115
  modified_base 1..5785: mod_base = OTHER; note = Each t is m1f
  source 1..5785: mol_type = other RNA

SEQ ID NO: 14713 - RNA, 5785 nt, synthetic construct; identical to SEQ ID NO: 13116
  modified_base 1..5785: mod_base = OTHER; note = Each t is m1f
  source 1..5785: mol_type = other RNA

SEQ ID NO: 14714 - RNA, 5785 nt, synthetic construct; identical to SEQ ID NO: 13117
  modified_base 1..5785: mod_base = OTHER; note = Each t is m1f
  source 1..5785: mol_type = other RNA

SEQ ID NO: 14715 - RNA, 5785 nt, synthetic construct; identical to SEQ ID NO: 13118
  modified_base 1..5785: mod_base = OTHER; note = Each t is m1f
  source 1..5785: mol_type = other RNA

SEQ ID NO: 14716 - RNA, 5785 nt, synthetic construct; identical to SEQ ID NO: 13119
  modified_base 1..5785: mod_base = OTHER; note = Each t is m1f
  source 1..5785: mol_type = other RNA

SEQ ID NO: 14717 - RNA, 5785 nt, synthetic construct; identical to SEQ ID NO: 13120
  modified_base 1..5785: mod_base = OTHER; note = Each t is m1f
  source 1..5785: mol_type = other RNA

SEQ ID NO: 14718 - RNA, 5785 nt, synthetic construct; identical to SEQ ID NO: 13121
  modified_base 1..5785: mod_base = OTHER; note = Each t is m1f
  source 1..5785: mol_type = other RNA

SEQ ID NO: 14719 - RNA, 5791 nt, synthetic construct; identical to SEQ ID NO: 13122
  modified_base 1..5791: mod_base = OTHER; note = Each t is m1f
  source 1..5791: mol_type = other RNA

SEQ ID NO: 14720 - RNA, 5785 nt, synthetic construct; identical to SEQ ID NO: 13123
  modified_base 1..5785: mod_base = OTHER; note = Each t is m1f
  source 1..5785: mol_type = other RNA

SEQ ID NO: 14721 - RNA, 5785 nt, synthetic construct; identical to SEQ ID NO: 13124
  modified_base 1..5785: mod_base = OTHER; note = Each t is m1f
  source 1..5785: mol_type = other RNA

SEQ ID NO: 14722 - RNA, 5785 nt, synthetic construct; identical to SEQ ID NO: 13125
  modified_base 1..5785: mod_base = OTHER; note = Each t is m1f
  source 1..5785: mol_type = other RNA

SEQ ID NO: 14723 - RNA, 5785 nt, synthetic construct; identical to SEQ ID NO: 13126
  modified_base 1..5785: mod_base = OTHER; note = Each t is m1f
  source 1..5785: mol_type = other RNA

SEQ ID NO: 14724 - RNA, 5785 nt, synthetic construct; identical to SEQ ID NO: 13127
  modified_base 1..5785: mod_base = OTHER; note = Each t is m1f
  source 1..5785: mol_type = other RNA

SEQ ID NO: 14725 - RNA, 5785 nt, synthetic construct; identical to SEQ ID NO: 13128
  modified_base 1..5785: mod_base = OTHER; note = Each t is m1f
  source 1..5785: mol_type = other RNA

SEQ ID NO: 14726 - RNA, 5785 nt, synthetic construct; identical to SEQ ID NO: 13129
  modified_base 1..5785: mod_base = OTHER; note = Each t is m1f
  source 1..5785: mol_type = other RNA

SEQ ID NO: 14727 - RNA, 5785 nt, synthetic construct; identical to SEQ ID NO: 13130
  modified_base 1..5785: mod_base = OTHER; note = Each t is m1f
  source 1..5785: mol_type = other RNA

SEQ ID NO: 14728 - RNA, 5785 nt, synthetic construct; identical to SEQ ID NO: 13131
  modified_base 1..5785: mod_base = OTHER; note = Each t is m1f
  source 1..5785: mol_type = other RNA

SEQ ID NO: 14729 - RNA, 5785 nt, synthetic construct; identical to SEQ ID NO: 13132
  modified_base 1..5785: mod_base = OTHER; note = Each t is m1f
  source 1..5785: mol_type = other RNA

SEQ ID NO: 14730 - RNA, 5785 nt, synthetic construct; identical to SEQ ID NO: 13133
  modified_base 1..5785: mod_base = OTHER; note = Each t is m1f
  source 1..5785: mol_type = other RNA

SEQ ID NO: 14731 - RNA, 5785 nt, synthetic construct; identical to SEQ ID NO: 13134
  modified_base 1..5785: mod_base = OTHER; note = Each t is m1f
  source 1..5785: mol_type = other RNA

SEQ ID NO: 14732 - RNA, 5785 nt, synthetic construct; identical to SEQ ID NO: 13135
  modified_base 1..5785: mod_base = OTHER; note = Each t is m1f
  source 1..5785: mol_type = other RNA

SEQ ID NO: 14733 - RNA, 5785 nt, synthetic construct; identical to SEQ ID NO: 13136
  modified_base 1..5785: mod_base = OTHER; note = Each t is m1f
  source 1..5785: mol_type = other RNA

SEQ ID NO: 14734 - RNA, 5785 nt, synthetic construct; identical to SEQ ID NO: 13137
  modified_base 1..5785: mod_base = OTHER; note = Each t is m1f
  source 1..5785: mol_type = other RNA

SEQ ID NO: 14735 - RNA, 5785 nt, synthetic construct; identical to SEQ ID NO: 13138
  modified_base 1..5785: mod_base = OTHER; note = Each t is m1f
  source 1..5785: mol_type = other RNA

SEQ ID NO: 14736 - RNA, 5785 nt, synthetic construct; identical to SEQ ID NO: 13139
  modified_base 1..5785: mod_base = OTHER; note = Each t is m1f
  source 1..5785: mol_type = other RNA

SEQ ID NO: 14737 - RNA, 5785 nt, synthetic construct; identical to SEQ ID NO: 13140
  modified_base 1..5785: mod_base = OTHER; note = Each t is m1f
  source 1..5785: mol_type = other RNA

SEQ ID NO: 14738 - RNA, 5785 nt, synthetic construct; identical to SEQ ID NO: 13141
  modified_base 1..5785: mod_base = OTHER; note = Each t is m1f
  source 1..5785: mol_type = other RNA

SEQ ID NO: 14739 - RNA, 5785 nt, synthetic construct; identical to SEQ ID NO: 13142
  modified_base 1..5785: mod_base = OTHER; note = Each t is m1f
  source 1..5785: mol_type = other RNA

SEQ ID NO: 14740 - RNA, 5785 nt, synthetic construct; identical to SEQ ID NO: 13143
  modified_base 1..5785: mod_base = OTHER; note = Each t is m1f
  source 1..5785: mol_type = other RNA

SEQ ID NO: 14741 - RNA, 5785 nt, synthetic construct; identical to SEQ ID NO: 13144
  modified_base 1..5785: mod_base = OTHER; note = Each t is m1f
  source 1..5785: mol_type = other RNA

SEQ ID NO: 14742 - RNA, 5785 nt, synthetic construct; identical to SEQ ID NO: 13145
  modified_base 1..5785: mod_base = OTHER; note = Each t is m1f
  source 1..5785: mol_type = other RNA

SEQ ID NO: 14743 - RNA, 5785 nt, synthetic construct; identical to SEQ ID NO: 13146
  modified_base 1..5785: mod_base = OTHER; note = Each t is m1f
  source 1..5785: mol_type = other RNA

SEQ ID NO: 14744 - RNA, 5785 nt, synthetic construct; identical to SEQ ID NO: 13147
  modified_base 1..5785: mod_base = OTHER; note = Each t is m1f
  source 1..5785: mol_type = other RNA

SEQ ID NO: 14745 - RNA, 5809 nt, synthetic construct; identical to SEQ ID NO: 13148
  modified_base 1..5809: mod_base = OTHER; note = Each t is m1f
  source 1..5809: mol_type = other RNA

SEQ ID NO: 14746 - RNA, 5785 nt, synthetic construct; identical to SEQ ID NO: 13149
  modified_base 1..5785: mod_base = OTHER; note = Each t is m1f
  source 1..5785: mol_type = other RNA

SEQ ID NO: 14747 - RNA, 5785 nt, synthetic construct; identical to SEQ ID NO: 13150
  modified_base 1..5785: mod_base = OTHER; note = Each t is m1f
  source 1..5785: mol_type = other RNA

SEQ ID NO: 14748 - RNA, 5785 nt, synthetic construct; identical to SEQ ID NO: 13151
  modified_base 1..5785: mod_base = OTHER; note = Each t is m1f
  source 1..5785: mol_type = other RNA

SEQ ID NO: 14749 - RNA, 5785 nt, synthetic construct; identical to SEQ ID NO: 13152
  modified_base 1..5785: mod_base = OTHER; note = Each t is m1f
  source 1..5785: mol_type = other RNA

SEQ ID NO: 14750 - RNA, 5782 nt, synthetic construct; identical to SEQ ID NO: 13153
  modified_base 1..5782: mod_base = OTHER; note = Each t is m1f
  source 1..5782: mol_type = other RNA

SEQ ID NO: 14751 - RNA, 5785 nt, synthetic construct; identical to SEQ ID NO: 13154
  modified_base 1..5785: mod_base = OTHER; note = Each t is m1f
  source 1..5785: mol_type = other RNA

SEQ ID NO: 14752 - RNA, 5785 nt, synthetic construct; identical to SEQ ID NO: 13155
  modified_base 1..5785: mod_base = OTHER; note = Each t is m1f
  source 1..5785: mol_type = other RNA

SEQ ID NO: 14753 - RNA, 5785 nt, synthetic construct; identical to SEQ ID NO: 13156
  modified_base 1..5785: mod_base = OTHER; note = Each t is m1f
  source 1..5785: mol_type = other RNA

SEQ ID NO: 14754 - RNA, 5785 nt, synthetic construct; identical to SEQ ID NO: 13157
  modified_base 1..5785: mod_base = OTHER; note = Each t is m1f
  source 1..5785: mol_type = other RNA

SEQ ID NO: 14755 - RNA, 5785 nt, synthetic construct; identical to SEQ ID NO: 13158
  modified_base 1..5785: mod_base = OTHER; note = Each t is m1f
  source 1..5785: mol_type = other RNA

SEQ ID NO: 14756 - RNA, 5785 nt, synthetic construct; identical to SEQ ID NO: 13159
  modified_base 1..5785: mod_base = OTHER; note = Each t is m1f
  source 1..5785: mol_type = other RNA

SEQ ID NO: 14757 - RNA, 5785 nt, synthetic construct; identical to SEQ ID NO: 13160
  modified_base 1..5785: mod_base = OTHER; note = Each t is m1f
  source 1..5785: mol_type = other RNA

SEQ ID NO: 14758 - RNA, 5785 nt, synthetic construct; identical to SEQ ID NO: 13161
  modified_base 1..5785: mod_base = OTHER; note = Each t is m1f
  source 1..5785: mol_type = other RNA

SEQ ID NO: 14759 - RNA, 5785 nt, synthetic construct; identical to SEQ ID NO: 13162
  modified_base 1..5785: mod_base = OTHER; note = Each t is m1f
  source 1..5785: mol_type = other RNA

SEQ ID NO: 14760 - RNA, 5785 nt, synthetic construct; identical to SEQ ID NO: 13163
  modified_base 1..5785: mod_base = OTHER; note = Each t is m1f
  source 1..5785: mol_type = other RNA

SEQ ID NO: 14761 - RNA, 5785 nt, synthetic construct; identical to SEQ ID NO: 13164
  modified_base 1..5785: mod_base = OTHER; note = Each t is m1f
  source 1..5785: mol_type = other RNA

SEQ ID NO: 14762 - RNA, 5785 nt, synthetic construct; identical to SEQ ID NO: 13165
  modified_base 1..5785: mod_base = OTHER; note = Each t is m1f
  source 1..5785: mol_type = other RNA

SEQ ID NO: 14763 - RNA, 5785 nt, synthetic construct; identical to SEQ ID NO: 13166
  modified_base 1..5785: mod_base = OTHER; note = Each t is m1f
  source 1..5785: mol_type = other RNA

SEQ ID NO: 14764 - RNA, 5785 nt, synthetic construct; identical to SEQ ID NO: 13167
  modified_base 1..5785: mod_base = OTHER; note = Each t is m1f
  source 1..5785: mol_type = other RNA

SEQ ID NO: 14765 - RNA, 5785 nt, synthetic construct; identical to SEQ ID NO: 13168
  modified_base 1..5785: mod_base = OTHER; note = Each t is m1f
  source 1..5785: mol_type = other RNA

SEQ ID NO: 14766 - RNA, 5785 nt, synthetic construct; identical to SEQ ID NO: 13169
  modified_base 1..5785: mod_base = OTHER; note = Each t is m1f
  source 1..5785: mol_type = other RNA

SEQ ID NO: 14767 - RNA, 5785 nt, synthetic construct; identical to SEQ ID NO: 13170
  modified_base 1..5785: mod_base = OTHER; note = Each t is m1f
  source 1..5785: mol_type = other RNA

SEQ ID NO: 14768 - RNA, 5785 nt, synthetic construct; identical to SEQ ID NO: 13171
  modified_base 1..5785: mod_base = OTHER; note = Each t is m1f
  source 1..5785: mol_type = other RNA

SEQ ID NO: 14769 - RNA, 5785 nt, synthetic construct; identical to SEQ ID NO: 13172
  modified_base 1..5785: mod_base = OTHER; note = Each t is m1f
  source 1..5785: mol_type = other RNA

SEQ ID NO: 14770 - RNA, 5785 nt, synthetic construct; identical to SEQ ID NO: 13173
  modified_base 1..5785: mod_base = OTHER; note = Each t is m1f
  source 1..5785: mol_type = other RNA

SEQ ID NO: 14771 - RNA, 5785 nt, synthetic construct; identical to SEQ ID NO: 13174
  modified_base 1..5785: mod_base = OTHER; note = Each t is m1f
  source 1..5785: mol_type = other RNA

SEQ ID NO: 14772 - RNA, 5785 nt, synthetic construct; identical to SEQ ID NO: 13175
  modified_base 1..5785: mod_base = OTHER; note = Each t is m1f
  source 1..5785: mol_type = other RNA

SEQ ID NO: 14773 - RNA, 5785 nt, synthetic construct; identical to SEQ ID NO: 13176
  modified_base 1..5785: mod_base = OTHER; note = Each t is m1f
  source 1..5785: mol_type = other RNA

SEQ ID NO: 14774 - RNA, 5785 nt, synthetic construct; identical to SEQ ID NO: 13177
  modified_base 1..5785: mod_base = OTHER; note = Each t is m1f
  source 1..5785: mol_type = other RNA

SEQ ID NO: 14775 - RNA, 5785 nt, synthetic construct; identical to SEQ ID NO: 13178
  modified_base 1..5785: mod_base = OTHER; note = Each t is m1f
  source 1..5785: mol_type = other RNA

SEQ ID NO: 14776 - RNA, 5785 nt, synthetic construct; identical to SEQ ID NO: 13179
  modified_base 1..5785: mod_base = OTHER; note = Each t is m1f
  source 1..5785: mol_type = other RNA

SEQ ID NO: 14777 - RNA, 5785 nt, synthetic construct; identical to SEQ ID NO: 13180
  modified_base 1..5785: mod_base = OTHER; note = Each t is m1f
  source 1..5785: mol_type = other RNA

SEQ ID NO: 14778 - RNA, 5785 nt, synthetic construct; identical to SEQ ID NO: 13181
  modified_base 1..5785: mod_base = OTHER; note = Each t is m1f
  source 1..5785: mol_type = other RNA

SEQ ID NO: 14779 - RNA, 5785 nt, synthetic construct; identical to SEQ ID NO: 13182
  modified_base 1..5785: mod_base = OTHER; note = Each t is m1f
  source 1..5785: mol_type = other RNA

SEQ ID NO: 14780 - RNA, 5785 nt, synthetic construct; identical to SEQ ID NO: 13183
  modified_base 1..5785: mod_base = OTHER; note = Each t is m1f
  source 1..5785: mol_type = other RNA

SEQ ID NO: 14781 - RNA, 5785 nt, synthetic construct; identical to SEQ ID NO: 13184
  modified_base 1..5785: mod_base = OTHER; note = Each t is m1f
  source 1..5785: mol_type = other RNA

SEQ ID NO: 14782 - RNA, 5785 nt, synthetic construct; identical to SEQ ID NO: 13185
  modified_base 1..5785: mod_base = OTHER; note = Each t is m1f
  source 1..5785: mol_type = other RNA

SEQ ID NO: 14783 - RNA, 5785 nt, synthetic construct; identical to SEQ ID NO: 13186
  modified_base 1..5785: mod_base = OTHER; note = Each t is m1f
  source 1..5785: mol_type = other RNA

SEQ ID NO: 14784 - RNA, 5785 nt, synthetic construct; identical to SEQ ID NO: 13187
  modified_base 1..5785: mod_base = OTHER; note = Each t is m1f
  source 1..5785: mol_type = other RNA

SEQ ID NO: 14785 - RNA, 5785 nt, synthetic construct; identical to SEQ ID NO: 13188
  modified_base 1..5785: mod_base = OTHER; note = Each t is m1f
  source 1..5785: mol_type = other RNA

SEQ ID NO: 14786 - RNA, 5785 nt, synthetic construct; identical to SEQ ID NO: 13189
  modified_base 1..5785: mod_base = OTHER; note = Each t is m1f
  source 1..5785: mol_type = other RNA

SEQ ID NO: 14787 - RNA, 5785 nt, synthetic construct; identical to SEQ ID NO: 13190
  modified_base 1..5785: mod_base = OTHER; note = Each t is m1f
  source 1..5785: mol_type = other RNA

SEQ ID NO: 14788 - RNA, 5785 nt, synthetic construct; identical to SEQ ID NO: 13191
  modified_base 1..5785: mod_base = OTHER; note = Each t is m1f
  source 1..5785: mol_type = other RNA

SEQ ID NO: 14789 - RNA, 5785 nt, synthetic construct; identical to SEQ ID NO: 13192
  modified_base 1..5785: mod_base = OTHER; note = Each t is m1f
  source 1..5785: mol_type = other RNA

SEQ ID NO: 14790 - RNA, 5785 nt, synthetic construct; identical to SEQ ID NO: 13193
  modified_base 1..5785: mod_base = OTHER; note = Each t is m1f
  source 1..5785: mol_type = other RNA

SEQ ID NO: 14791 - RNA, 5785 nt, synthetic construct; identical to SEQ ID NO: 13194
  modified_base 1..5785: mod_base = OTHER; note = Each t is m1f
  source 1..5785: mol_type = other RNA

SEQ ID NO: 14792 - RNA, 5785 nt, synthetic construct; identical to SEQ ID NO: 13195
  modified_base 1..5785: mod_base = OTHER; note = Each t is m1f
  source 1..5785: mol_type = other RNA

SEQ ID NO: 14793 - RNA, 5785 nt, synthetic construct; identical to SEQ ID NO: 13196
  modified_base 1..5785: mod_base = OTHER; note = Each t is m1f
  source 1..5785: mol_type = other RNA

SEQ ID NO: 14794 - RNA, 5785 nt, synthetic construct; identical to SEQ ID NO: 13197
  modified_base 1..5785: mod_base = OTHER; note = Each t is m1f
  source 1..5785: mol_type = other RNA

SEQ ID NO: 14795 - RNA, 5785 nt, synthetic construct; identical to SEQ ID NO: 13198
  modified_base 1..5785: mod_base = OTHER; note = Each t is m1f
  source 1..5785: mol_type = other RNA

SEQ ID NO: 14796 - RNA, 5785 nt, synthetic construct; identical to SEQ ID NO: 13199
  modified_base 1..5785: mod_base = OTHER; note = Each t is m1f
  source 1..5785: mol_type = other RNA

SEQ ID NO: 14797 - RNA, 5785 nt, synthetic construct; identical to SEQ ID NO: 13200
  modified_base 1..5785: mod_base = OTHER; note = Each t is m1f
  source 1..5785: mol_type = other RNA

SEQ ID NO: 14798 - RNA, 5785 nt, synthetic construct; identical to SEQ ID NO: 13201
  modified_base 1..5785: mod_base = OTHER; note = Each t is m1f
  source 1..5785: mol_type = other RNA

SEQ ID NO: 14799 - RNA, 5785 nt, synthetic construct; identical to SEQ ID NO: 13202
  modified_base 1..5785: mod_base = OTHER; note = Each t is m1f
  source 1..5785: mol_type = other RNA

SEQ ID NO: 14800 - RNA, 5785 nt, synthetic construct; identical to SEQ ID NO: 13203
  modified_base 1..5785: mod_base = OTHER; note = Each t is m1f
  source 1..5785: mol_type = other RNA

SEQ ID NO: 14801 - RNA, 5785 nt, synthetic construct; identical to SEQ ID NO: 13204
  modified_base 1..5785: mod_base = OTHER; note = Each t is m1f
  source 1..5785: mol_type = other RNA

SEQ ID NO: 14802 - RNA, 5785 nt, synthetic construct; identical to SEQ ID NO: 13205
  modified_base 1..5785: mod_base = OTHER; note = Each t is m1f
  source 1..5785: mol_type = other RNA

SEQ ID NO: 14803 - RNA, 5785 nt, synthetic construct; identical to SEQ ID NO: 13206
  modified_base 1..5785: mod_base = OTHER; note = Each t is m1f
  source 1..5785: mol_type = other RNA

SEQ ID NO: 14804 - RNA, 5785 nt, synthetic construct; identical to SEQ ID NO: 13207
  modified_base 1..5785: mod_base = OTHER; note = Each t is m1f
  source 1..5785: mol_type = other RNA

SEQ ID NO: 14805 - RNA, 5785 nt, synthetic construct; identical to SEQ ID NO: 13208
  modified_base 1..5785: mod_base = OTHER; note = Each t is m1f
  source 1..5785: mol_type = other RNA

SEQ ID NO: 14806 - RNA, 5785 nt, synthetic construct; identical to SEQ ID NO: 13209
  modified_base 1..5785: mod_base = OTHER; note = Each t is m1f
  source 1..5785: mol_type = other RNA

SEQ ID NO: 14807 - RNA, 5785 nt, synthetic construct; identical to SEQ ID NO: 13210
  modified_base 1..5785: mod_base = OTHER; note = Each t is m1f
  source 1..5785: mol_type = other RNA

SEQ ID NO: 14808 - RNA, 5785 nt, synthetic construct; identical to SEQ ID NO: 13211
  modified_base 1..5785: mod_base = OTHER; note = Each t is m1f
  source 1..5785: mol_type = other RNA

SEQ ID NO: 14809 - RNA, 5785 nt, synthetic construct; identical to SEQ ID NO: 13212
  modified_base 1..5785: mod_base = OTHER; note = Each t is m1f
  source 1..5785: mol_type = other RNA

SEQ ID NO: 14810 - RNA, 5785 nt, synthetic construct; identical to SEQ ID NO: 13213
  modified_base 1..5785: mod_base = OTHER; note = Each t is m1f
  source 1..5785: mol_type = other RNA

SEQ ID NO: 14811 - RNA, 5785 nt, synthetic construct; identical to SEQ ID NO: 13214
  modified_base 1..5785: mod_base = OTHER; note = Each t is m1f
  source 1..5785: mol_type = other RNA

SEQ ID NO: 14812 - RNA, 5785 nt, synthetic construct; identical to SEQ ID NO: 13215
  modified_base 1..5785: mod_base = OTHER; note = Each t is m1f
  source 1..5785: mol_type = other RNA

SEQ ID NO: 14813 - RNA, 5785 nt, synthetic construct; identical to SEQ ID NO: 13216
  modified_base 1..5785: mod_base = OTHER; note = Each t is m1f
  source 1..5785: mol_type = other RNA

SEQ ID NO: 14814 - RNA, 5785 nt, synthetic construct; identical to SEQ ID NO: 13217
  modified_base 1..5785: mod_base = OTHER; note = Each t is m1f
  source 1..5785: mol_type = other RNA

SEQ ID NO: 14815 - RNA, 5785 nt, synthetic construct; identical to SEQ ID NO: 13218
  modified_base 1..5785: mod_base = OTHER; note = Each t is m1f
  source 1..5785: mol_type = other RNA

SEQ ID NO: 14816 - RNA, 5785 nt, synthetic construct; identical to SEQ ID NO: 13219
  modified_base 1..5785: mod_base = OTHER; note = Each t is m1f
  source 1..5785: mol_type = other RNA

SEQ ID NO: 14817 - RNA, 5785 nt, synthetic construct; identical to SEQ ID NO: 13220
  modified_base 1..5785: mod_base = OTHER; note = Each t is m1f
  source 1..5785: mol_type = other RNA

SEQ ID NO: 14818 - RNA, 5785 nt, synthetic construct; identical to SEQ ID NO: 13221
  modified_base 1..5785: mod_base = OTHER; note = Each t is m1f
  source 1..5785: mol_type = other RNA

SEQ ID NO: 14819 - RNA, 5785 nt, synthetic construct; identical to SEQ ID NO: 13222
  modified_base 1..5785: mod_base = OTHER; note = Each t is m1f
  source 1..5785: mol_type = other RNA

SEQ ID NO: 14820 - RNA, 5785 nt, synthetic construct; identical to SEQ ID NO: 13223
  modified_base 1..5785: mod_base = OTHER; note = Each t is m1f
  source 1..5785: mol_type = other RNA

SEQ ID NO: 14821 - RNA, 5785 nt, synthetic construct; identical to SEQ ID NO: 13224
  modified_base 1..5785: mod_base = OTHER; note = Each t is m1f
  source 1..5785: mol_type = other RNA

SEQ ID NO: 14822 - RNA, 5785 nt, synthetic construct; identical to SEQ ID NO: 13225
  modified_base 1..5785: mod_base = OTHER; note = Each t is m1f
  source 1..5785: mol_type = other RNA

SEQ ID NO: 14823 - RNA, 5785 nt, synthetic construct; identical to SEQ ID NO: 13226
  modified_base 1..5785: mod_base = OTHER; note = Each t is m1f
  source 1..5785: mol_type = other RNA

SEQ ID NO: 14824 - RNA, 5785 nt, synthetic construct; identical to SEQ ID NO: 13227
  modified_base 1..5785: mod_base = OTHER; note = Each t is m1f
  source 1..5785: mol_type = other RNA

SEQ ID NO: 14825 - RNA, 5785 nt, synthetic construct; identical to SEQ ID NO: 13228
  modified_base 1..5785: mod_base = OTHER; note = Each t is m1f
  source 1..5785: mol_type = other RNA

SEQ ID NO: 14826 - RNA, 5785 nt, synthetic construct; identical to SEQ ID NO: 13229
  modified_base 1..5785: mod_base = OTHER; note = Each t is m1f
  source 1..5785: mol_type = other RNA

SEQ ID NO: 14827 - RNA, 5785 nt, synthetic construct; identical to SEQ ID NO: 13230
  modified_base 1..5785: mod_base = OTHER; note = Each t is m1f
  source 1..5785: mol_type = other RNA

SEQ ID NO: 14828 - RNA, 5785 nt, synthetic construct; identical to SEQ ID NO: 13231
  modified_base 1..5785: mod_base = OTHER; note = Each t is m1f
  source 1..5785: mol_type = other RNA

SEQ ID NO: 14829 - RNA, 5785 nt, synthetic construct; identical to SEQ ID NO: 13232
  modified_base 1..5785: mod_base = OTHER; note = Each t is m1f
  source 1..5785: mol_type = other RNA

SEQ ID NO: 14830 - RNA, 5785 nt, synthetic construct; identical to SEQ ID NO: 13233
  modified_base 1..5785: mod_base = OTHER; note = Each t is m1f
  source 1..5785: mol_type = other RNA

SEQ ID NO: 14831 - RNA, 5785 nt, synthetic construct; identical to SEQ ID NO: 13234
  modified_base 1..5785: mod_base = OTHER; note = Each t is m1f
  source 1..5785: mol_type = other RNA

SEQ ID NO: 14832 - RNA, 5785 nt, synthetic construct; identical to SEQ ID NO: 13235
  modified_base 1..5785: mod_base = OTHER; note = Each t is m1f
  source 1..5785: mol_type = other RNA

SEQ ID NO: 14833 - RNA, 5785 nt, synthetic construct; identical to SEQ ID NO: 13236
  modified_base 1..5785: mod_base = OTHER; note = Each t is m1f
  source 1..5785: mol_type = other RNA

SEQ ID NO: 14834 - RNA, 5785 nt, synthetic construct; identical to SEQ ID NO: 13237
  modified_base 1..5785: mod_base = OTHER; note = Each t is m1f
  source 1..5785: mol_type = other RNA

SEQ ID NO: 14835 - RNA, 5785 nt, synthetic construct; identical to SEQ ID NO: 13238
  modified_base 1..5785: mod_base = OTHER; note = Each t is m1f
  source 1..5785: mol_type = other RNA

SEQ ID NO: 14836 - RNA, 5785 nt, synthetic construct; identical to SEQ ID NO: 13239
  modified_base 1..5785: mod_base = OTHER; note = Each t is m1f
  source 1..5785: mol_type = other RNA

SEQ ID NO: 14837 - RNA, 5785 nt, synthetic construct; identical to SEQ ID NO: 13240
  modified_base 1..5785: mod_base = OTHER; note = Each t is m1f
  source 1..5785: mol_type = other RNA

SEQ ID NO: 14838 - RNA, 5785 nt, synthetic construct; identical to SEQ ID NO: 13241
  modified_base 1..5785: mod_base = OTHER; note = Each t is m1f
  source 1..5785: mol_type = other RNA

SEQ ID NO: 14839 - RNA, 5785 nt, synthetic construct; identical to SEQ ID NO: 13242
  modified_base 1..5785: mod_base = OTHER; note = Each t is m1f
  source 1..5785: mol_type = other RNA

SEQ ID NO: 14840 - RNA, 5785 nt, synthetic construct; identical to SEQ ID NO: 13243
  modified_base 1..5785: mod_base = OTHER; note = Each t is m1f
  source 1..5785: mol_type = other RNA

SEQ ID NO: 14841 - RNA, 5785 nt, synthetic construct; identical to SEQ ID NO: 13244
  modified_base 1..5785: mod_base = OTHER; note = Each t is m1f
  source 1..5785: mol_type = other RNA

SEQ ID NO: 14842 - RNA, 5785 nt, synthetic construct; identical to SEQ ID NO: 13245
  modified_base 1..5785: mod_base = OTHER; note = Each t is m1f
  source 1..5785: mol_type = other RNA

SEQ ID NO: 14843 - RNA, 5785 nt, synthetic construct; identical to SEQ ID NO: 13246
  modified_base 1..5785: mod_base = OTHER; note = Each t is m1f
  source 1..5785: mol_type = other RNA

SEQ ID NO: 14844 - RNA, 5785 nt, synthetic construct; identical to SEQ ID NO: 13247
  modified_base 1..5785: mod_base = OTHER; note = Each t is m1f
  source 1..5785: mol_type = other RNA

SEQ ID NO: 14845 - RNA, 5785 nt, synthetic construct; identical to SEQ ID NO: 13248
  modified_base 1..5785: mod_base = OTHER; note = Each t is m1f
  source 1..5785: mol_type = other RNA

SEQ ID NO: 14846 - RNA, 5785 nt, synthetic construct; identical to SEQ ID NO: 13249
  modified_base 1..5785: mod_base = OTHER; note = Each t is m1f
  source 1..5785: mol_type = other RNA

SEQ ID NO: 14847 - RNA, 5785 nt, synthetic construct; identical to SEQ ID NO: 13250
  modified_base 1..5785: mod_base = OTHER; note = Each t is m1f
  source 1..5785: mol_type = other RNA

SEQ ID NO: 14848 - RNA, 5785 nt, synthetic construct; identical to SEQ ID NO: 13251
  modified_base 1..5785: mod_base = OTHER; note = Each t is m1f
  source 1..5785: mol_type = other RNA

SEQ ID NO: 14849 - RNA, 5785 nt, synthetic construct; identical to SEQ ID NO: 13252
  modified_base 1..5785: mod_base = OTHER; note = Each t is m1f
  source 1..5785: mol_type = other RNA

SEQ ID NO: 14850 - RNA, 5785 nt, synthetic construct; identical to SEQ ID NO: 13253
  modified_base 1..5785: mod_base = OTHER; note = Each t is m1f
  source 1..5785: mol_type = other RNA

SEQ ID NO: 14851 - RNA, 5785 nt, synthetic construct; identical to SEQ ID NO: 13254
  modified_base 1..5785: mod_base = OTHER; note = Each t is m1f
  source 1..5785: mol_type = other RNA

SEQ ID NO: 14852 - RNA, 5785 nt, synthetic construct; identical to SEQ ID NO: 13255
  modified_base 1..5785: mod_base = OTHER; note = Each t is m1f
  source 1..5785: mol_type = other RNA

SEQ ID NO: 14853 - RNA, 5785 nt, synthetic construct; identical to SEQ ID NO: 13256
  modified_base 1..5785: mod_base = OTHER; note = Each t is m1f
  source 1..5785: mol_type = other RNA

SEQ ID NO: 14854 - RNA, 5785 nt, synthetic construct; identical to SEQ ID NO: 13257
  modified_base 1..5785: mod_base = OTHER; note = Each t is m1f
  source 1..5785: mol_type = other RNA

SEQ ID NO: 14855 - RNA, 5785 nt, synthetic construct; identical to SEQ ID NO: 13258
  modified_base 1..5785: mod_base = OTHER; note = Each t is m1f
  source 1..5785: mol_type = other RNA

SEQ ID NO: 14856 - RNA, 5785 nt, synthetic construct; identical to SEQ ID NO: 13259
  modified_base 1..5785: mod_base = OTHER; note = Each t is m1f
  source 1..5785: mol_type = other RNA

SEQ ID NO: 14857 - RNA, 5818 nt, synthetic construct; identical to SEQ ID NO: 13260
  modified_base 1..5818: mod_base = OTHER; note = Each t is m1f
  source 1..5818: mol_type = other RNA

SEQ ID NO: 14858 - RNA, 5785 nt, synthetic construct; identical to SEQ ID NO: 13261
  modified_base 1..5785: mod_base = OTHER; note = Each t is m1f
  source 1..5785: mol_type = other RNA

SEQ ID NO: 14859 - RNA, 5782 nt, synthetic construct; identical to SEQ ID NO: 13262
  modified_base 1..5782: mod_base = OTHER; note = Each t is m1f
  source 1..5782: mol_type = other RNA

SEQ ID NO: 14860 - RNA, 5785 nt, synthetic construct; identical to SEQ ID NO: 13263
  modified_base 1..5785: mod_base = OTHER; note = Each t is m1f
  source 1..5785: mol_type = other RNA

SEQ ID NO: 14861 - RNA, 5785 nt, synthetic construct; identical to SEQ ID NO: 13264
  modified_base 1..5785: mod_base = OTHER; note = Each t is m1f
  source 1..5785: mol_type = other RNA

SEQ ID NO: 14862 - RNA, 5785 nt, synthetic construct; identical to SEQ ID NO: 13265
  modified_base 1..5785: mod_base = OTHER; note = Each t is m1f
  source 1..5785: mol_type = other RNA

SEQ ID NO: 14863 - RNA, 5785 nt, synthetic construct; identical to SEQ ID NO: 13266
  modified_base 1..5785: mod_base = OTHER; note = Each t is m1f
  source 1..5785: mol_type = other RNA

SEQ ID NO: 14864 - RNA, 5785 nt, synthetic construct; identical to SEQ ID NO: 13267
  modified_base 1..5785: mod_base = OTHER; note = Each t is m1f
  source 1..5785: mol_type = other RNA

SEQ ID NO: 14865 - RNA, 5785 nt, synthetic construct; identical to SEQ ID NO: 13268
  modified_base 1..5785: mod_base = OTHER; note = Each t is m1f
  source 1..5785: mol_type = other RNA

SEQ ID NO: 14866 - RNA, 5785 nt, synthetic construct; identical to SEQ ID NO: 13269
  modified_base 1..5785: mod_base = OTHER; note = Each t is m1f
  source 1..5785: mol_type = other RNA

SEQ ID NO: 14867 - RNA, 5785 nt, synthetic construct; identical to SEQ ID NO: 13270
  modified_base 1..5785: mod_base = OTHER; note = Each t is m1f
  source 1..5785: mol_type = other RNA

SEQ ID NO: 14868 - RNA, 5785 nt, synthetic construct; identical to SEQ ID NO: 13271
  modified_base 1..5785: mod_base = OTHER; note = Each t is m1f
  source 1..5785: mol_type = other RNA

SEQ ID NO: 14869 - RNA, 5785 nt, synthetic construct; identical to SEQ ID NO: 13272
  modified_base 1..5785: mod_base = OTHER; note = Each t is m1f
  source 1..5785: mol_type = other RNA

SEQ ID NO: 14870 - RNA, 5785 nt, synthetic construct; identical to SEQ ID NO: 13273
  modified_base 1..5785: mod_base = OTHER; note = Each t is m1f
  source 1..5785: mol_type = other RNA

SEQ ID NO: 14871 - RNA, 5785 nt, synthetic construct; identical to SEQ ID NO: 13274
  modified_base 1..5785: mod_base = OTHER; note = Each t is m1f
  source 1..5785: mol_type = other RNA

SEQ ID NO: 14872 - RNA, 5785 nt, synthetic construct; identical to SEQ ID NO: 13275
  modified_base 1..5785: mod_base = OTHER; note = Each t is m1f
  source 1..5785: mol_type = other RNA

SEQ ID NO: 14873 - RNA, 5785 nt, synthetic construct; identical to SEQ ID NO: 13276
  modified_base 1..5785: mod_base = OTHER; note = Each t is m1f
  source 1..5785: mol_type = other RNA

SEQ ID NO: 14874 - RNA, 5785 nt, synthetic construct; identical to SEQ ID NO: 13277
  modified_base 1..5785: mod_base = OTHER; note = Each t is m1f
  source 1..5785: mol_type = other RNA

SEQ ID NO: 14875 - RNA, 5788 nt, synthetic construct; identical to SEQ ID NO: 13278
  modified_base 1..5788: mod_base = OTHER; note = Each t is m1f
  source 1..5788: mol_type = other RNA

SEQ ID NO: 14876 - RNA, 5785 nt, synthetic construct; identical to SEQ ID NO: 13279
  modified_base 1..5785: mod_base = OTHER; note = Each t is m1f
  source 1..5785: mol_type = other RNA

SEQ ID NO: 14877 - RNA, 5785 nt, synthetic construct; identical to SEQ ID NO: 13280
  modified_base 1..5785: mod_base = OTHER; note = Each t is m1f
  source 1..5785: mol_type = other RNA

SEQ ID NO: 14878 - RNA, 5785 nt, synthetic construct; identical to SEQ ID NO: 13281
  modified_base 1..5785: mod_base = OTHER; note = Each t is m1f
  source 1..5785: mol_type = other RNA

SEQ ID NO: 14879 - RNA, 5785 nt, synthetic construct; identical to SEQ ID NO: 13282
  modified_base 1..5785: mod_base = OTHER; note = Each t is m1f
  source 1..5785: mol_type = other RNA

SEQ ID NO: 14880 - RNA, 5785 nt, synthetic construct; identical to SEQ ID NO: 13283
  modified_base 1..5785: mod_base = OTHER; note = Each t is m1f
  source 1..5785: mol_type = other RNA

SEQ ID NO: 14881 - RNA, 5785 nt, synthetic construct; identical to SEQ ID NO: 13284
  modified_base 1..5785: mod_base = OTHER; note = Each t is m1f
  source 1..5785: mol_type = other RNA

SEQ ID NO: 14882 - RNA, 5785 nt, synthetic construct; identical to SEQ ID NO: 13285
  modified_base 1..5785: mod_base = OTHER; note = Each t is m1f
  source 1..5785: mol_type = other RNA

SEQ ID NO: 14883 - RNA, 5785 nt, synthetic construct; identical to SEQ ID NO: 13286
  modified_base 1..5785: mod_base = OTHER; note = Each t is m1f
  source 1..5785: mol_type = other RNA

SEQ ID NO: 14884 - RNA, 5785 nt, synthetic construct; identical to SEQ ID NO: 13287
  modified_base 1..5785: mod_base = OTHER; note = Each t is m1f
  source 1..5785: mol_type = other RNA

SEQ ID NO: 14885 - RNA, 5785 nt, synthetic construct; identical to SEQ ID NO: 13288
  modified_base 1..5785: mod_base = OTHER; note = Each t is m1f
  source 1..5785: mol_type = other RNA

SEQ ID NO: 14886 - RNA, 5785 nt, synthetic construct; identical to SEQ ID NO: 13289
  modified_base 1..5785: mod_base = OTHER; note = Each t is m1f
  source 1..5785: mol_type = other RNA

SEQ ID NO: 14887 - RNA, 5785 nt, synthetic construct; identical to SEQ ID NO: 13290
  modified_base 1..5785: mod_base = OTHER; note = Each t is m1f
  source 1..5785: mol_type = other RNA

SEQ ID NO: 14888 - RNA, 5785 nt, synthetic construct; identical to SEQ ID NO: 13291
  modified_base 1..5785: mod_base = OTHER; note = Each t is m1f
  source 1..5785: mol_type = other RNA

SEQ ID NO: 14889 - RNA, 5785 nt, synthetic construct; identical to SEQ ID NO: 13292
  modified_base 1..5785: mod_base = OTHER; note = Each t is m1f
  source 1..5785: mol_type = other RNA

SEQ ID NO: 14890 - RNA, 5785 nt, synthetic construct; identical to SEQ ID NO: 13293
  modified_base 1..5785: mod_base = OTHER; note = Each t is m1f
  source 1..5785: mol_type = other RNA

SEQ ID NO: 14891 - RNA, 5785 nt, synthetic construct; identical to SEQ ID NO: 13294
  modified_base 1..5785: mod_base = OTHER; note = Each t is m1f
  source 1..5785: mol_type = other RNA

SEQ ID NO: 14892 - RNA, 5785 nt, synthetic construct; identical to SEQ ID NO: 13295
  modified_base 1..5785: mod_base = OTHER; note = Each t is m1f
  source 1..5785: mol_type = other RNA

SEQ ID NO: 14893 - RNA, 5785 nt, synthetic construct; identical to SEQ ID NO: 13296
  modified_base 1..5785: mod_base = OTHER; note = Each t is m1f
  source 1..5785: mol_type = other RNA

SEQ ID NO: 14894 - RNA, 5785 nt, synthetic construct; identical to SEQ ID NO: 13297
  modified_base 1..5785: mod_base = OTHER; note = Each t is m1f
  source 1..5785: mol_type = other RNA

SEQ ID NO: 14895 - RNA, 5785 nt, synthetic construct; identical to SEQ ID NO: 13298
  modified_base 1..5785: mod_base = OTHER; note = Each t is m1f
  source 1..5785: mol_type = other RNA

SEQ ID NO: 14896 - RNA, 5785 nt, synthetic construct; identical to SEQ ID NO: 13299
  modified_base 1..5785: mod_base = OTHER; note = Each t is m1f
  source 1..5785: mol_type = other RNA

SEQ ID NO: 14897 - RNA, 5785 nt, synthetic construct; identical to SEQ ID NO: 13300
  modified_base 1..5785: mod_base = OTHER; note = Each t is m1f
  source 1..5785: mol_type = other RNA

SEQ ID NO: 14898 - RNA, 5785 nt, synthetic construct; identical to SEQ ID NO: 13301
  modified_base 1..5785: mod_base = OTHER; note = Each t is m1f
  source 1..5785: mol_type = other RNA

SEQ ID NO: 14899 - RNA, 5785 nt, synthetic construct; identical to SEQ ID NO: 13302
  modified_base 1..5785: mod_base = OTHER; note = Each t is m1f
  source 1..5785: mol_type = other RNA

SEQ ID NO: 14900 - RNA, 5785 nt, synthetic construct; identical to SEQ ID NO: 13303
  modified_base 1..5785: mod_base = OTHER; note = Each t is m1f
  source 1..5785: mol_type = other RNA

SEQ ID NO: 14901 - RNA, 5785 nt, synthetic construct; identical to SEQ ID NO: 13304
  modified_base 1..5785: mod_base = OTHER; note = Each t is m1f
  source 1..5785: mol_type = other RNA

SEQ ID NO: 14902 - RNA, 5785 nt, synthetic construct; identical to SEQ ID NO: 13305
  modified_base 1..5785: mod_base = OTHER; note = Each t is m1f
  source 1..5785: mol_type = other RNA

SEQ ID NO: 14903 - RNA, 5785 nt, synthetic construct; identical to SEQ ID NO: 13306
  modified_base 1..5785: mod_base = OTHER; note = Each t is m1f
  source 1..5785: mol_type = other RNA

SEQ ID NO: 14904 - RNA, 5785 nt, synthetic construct; identical to SEQ ID NO: 13307
  modified_base 1..5785: mod_base = OTHER; note = Each t is m1f
  source 1..5785: mol_type = other RNA

SEQ ID NO: 14905 - RNA, 5785 nt, synthetic construct; identical to SEQ ID NO: 13308
  modified_base 1..5785: mod_base = OTHER; note = Each t is m1f
  source 1..5785: mol_type = other RNA

SEQ ID NO: 14906 - RNA, 5785 nt, synthetic construct; identical to SEQ ID NO: 13309
  modified_base 1..5785: mod_base = OTHER; note = Each t is m1f
  source 1..5785: mol_type = other RNA

SEQ ID NO: 14907 - RNA, 5785 nt, synthetic construct; identical to SEQ ID NO: 13310
  modified_base 1..5785: mod_base = OTHER; note = Each t is m1f
  source 1..5785: mol_type = other RNA

SEQ ID NO: 14908 - RNA, 5785 nt, synthetic construct; identical to SEQ ID NO: 13311
  modified_base 1..5785: mod_base = OTHER; note = Each t is m1f
  source 1..5785: mol_type = other RNA

SEQ ID NO: 14909 - RNA, 5785 nt, synthetic construct; identical to SEQ ID NO: 13312
  modified_base 1..5785: mod_base = OTHER; note = Each t is m1f
  source 1..5785: mol_type = other RNA

SEQ ID NO: 14910 - RNA, 5785 nt, synthetic construct; identical to SEQ ID NO: 13313
  modified_base 1..5785: mod_base = OTHER; note = Each t is m1f
  source 1..5785: mol_type = other RNA

SEQ ID NO: 14911 - RNA, 5785 nt, synthetic construct; identical to SEQ ID NO: 13314
  modified_base 1..5785: mod_base = OTHER; note = Each t is m1f
  source 1..5785: mol_type = other RNA

SEQ ID NO: 14912 - RNA, 5785 nt, synthetic construct; identical to SEQ ID NO: 13315
  modified_base 1..5785: mod_base = OTHER; note = Each t is m1f
  source 1..5785: mol_type = other RNA

SEQ ID NO: 14913 - RNA, 5785 nt, synthetic construct; identical to SEQ ID NO: 13316
  modified_base 1..5785: mod_base = OTHER; note = Each t is m1f
  source 1..5785: mol_type = other RNA

SEQ ID NO: 14914 - RNA, 5785 nt, synthetic construct; identical to SEQ ID NO: 13317
  modified_base 1..5785: mod_base = OTHER; note = Each t is m1f
  source 1..5785: mol_type = other RNA

SEQ ID NO: 14915 - RNA, 5785 nt, synthetic construct; identical to SEQ ID NO: 13318
  modified_base 1..5785: mod_base = OTHER; note = Each t is m1f
  source 1..5785: mol_type = other RNA

SEQ ID NO: 14916 - RNA, 5785 nt, synthetic construct; identical to SEQ ID NO: 13319
  modified_base 1..5785: mod_base = OTHER; note = Each t is m1f
  source 1..5785: mol_type = other RNA

SEQ ID NO: 14917 - RNA, 5785 nt, synthetic construct; identical to SEQ ID NO: 13320
  modified_base 1..5785: mod_base = OTHER; note = Each t is m1f
  source 1..5785: mol_type = other RNA

SEQ ID NO: 14918 - RNA, 5785 nt, synthetic construct; identical to SEQ ID NO: 13321
  modified_base 1..5785: mod_base = OTHER; note = Each t is m1f
  source 1..5785: mol_type = other RNA

SEQ ID NO: 14919 - RNA, 5785 nt, synthetic construct; identical to SEQ ID NO: 13322
  modified_base 1..5785: mod_base = OTHER; note = Each t is m1f
  source 1..5785: mol_type = other RNA

SEQ ID NO: 14920 - RNA, 5785 nt, synthetic construct; identical to SEQ ID NO: 13323
  modified_base 1..5785: mod_base = OTHER; note = Each t is m1f
  source 1..5785: mol_type = other RNA

SEQ ID NO: 14921 - RNA, 5785 nt, synthetic construct; identical to SEQ ID NO: 13324
  modified_base 1..5785: mod_base = OTHER; note = Each t is m1f
  source 1..5785: mol_type = other RNA

SEQ ID NO: 14922 - RNA, 5785 nt, synthetic construct; identical to SEQ ID NO: 13325
  modified_base 1..5785: mod_base = OTHER; note = Each t is m1f
  source 1..5785: mol_type = other RNA

SEQ ID NO: 14923 - RNA, 5785 nt, synthetic construct; identical to SEQ ID NO: 13326
  modified_base 1..5785: mod_base = OTHER; note = Each t is m1f
  source 1..5785: mol_type = other RNA

SEQ ID NO: 14924 - RNA, 5785 nt, synthetic construct; identical to SEQ ID NO: 13327
  modified_base 1..5785: mod_base = OTHER; note = Each t is m1f
  source 1..5785: mol_type = other RNA

SEQ ID NO: 14925 - RNA, 5785 nt, synthetic construct; identical to SEQ ID NO: 13328
  modified_base 1..5785: mod_base = OTHER; note = Each t is m1f
  source 1..5785: mol_type = other RNA

SEQ ID NO: 14926 - RNA, 5782 nt, synthetic construct; identical to SEQ ID NO: 13329
  modified_base 1..5782: mod_base = OTHER; note = Each t is m1f
  source 1..5782: mol_type = other RNA

SEQ ID NO: 14927 - RNA, 5785 nt, synthetic construct; identical to SEQ ID NO: 13330
  modified_base 1..5785: mod_base = OTHER; note = Each t is m1f
  source 1..5785: mol_type = other RNA

SEQ ID NO: 14928 - RNA, 5785 nt, synthetic construct; identical to SEQ ID NO: 13331
  modified_base 1..5785: mod_base = OTHER; note = Each t is m1f
  source 1..5785: mol_type = other RNA

SEQ ID NO: 14929 - RNA, 5785 nt, synthetic construct; identical to SEQ ID NO: 13332
  modified_base 1..5785: mod_base = OTHER; note = Each t is m1f
  source 1..5785: mol_type = other RNA

SEQ ID NO: 14930 - RNA, 5785 nt, synthetic construct; identical to SEQ ID NO: 13333
  modified_base 1..5785: mod_base = OTHER; note = Each t is m1f
  source 1..5785: mol_type = other RNA

SEQ ID NO: 14931 - RNA, 5785 nt, synthetic construct; identical to SEQ ID NO: 13334
  modified_base 1..5785: mod_base = OTHER; note = Each t is m1f
  source 1..5785: mol_type = other RNA

SEQ ID NO: 14932 - RNA, 5785 nt, synthetic construct; identical to SEQ ID NO: 13335
  modified_base 1..5785: mod_base = OTHER; note = Each t is m1f
  source 1..5785: mol_type = other RNA

SEQ ID NO: 14933 - RNA, 5785 nt, synthetic construct; identical to SEQ ID NO: 13336
  modified_base 1..5785: mod_base = OTHER; note = Each t is m1f
  source 1..5785: mol_type = other RNA

SEQ ID NO: 14934 - RNA, 5785 nt, synthetic construct; identical to SEQ ID NO: 13337
  modified_base 1..5785: mod_base = OTHER; note = Each t is m1f
  source 1..5785: mol_type = other RNA

SEQ ID NO: 14935 - RNA, 5785 nt, synthetic construct; identical to SEQ ID NO: 13338
  modified_base 1..5785: mod_base = OTHER; note = Each t is m1f
  source 1..5785: mol_type = other RNA

SEQ ID NO: 14936 - RNA, 5785 nt, synthetic construct; identical to SEQ ID NO: 13339
  modified_base 1..5785: mod_base = OTHER; note = Each t is m1f
  source 1..5785: mol_type = other RNA

SEQ ID NO: 14937 - RNA, 5785 nt, synthetic construct; identical to SEQ ID NO: 13340
  modified_base 1..5785: mod_base = OTHER; note = Each t is m1f
  source 1..5785: mol_type = other RNA

SEQ ID NO: 14938 - RNA, 5785 nt, synthetic construct; identical to SEQ ID NO: 13341
  modified_base 1..5785: mod_base = OTHER; note = Each t is m1f
  source 1..5785: mol_type = other RNA

SEQ ID NO: 14939 - RNA, 5785 nt, synthetic construct; identical to SEQ ID NO: 13342
  modified_base 1..5785: mod_base = OTHER; note = Each t is m1f
  source 1..5785: mol_type = other RNA

SEQ ID NO: 14940 - RNA, 5785 nt, synthetic construct; identical to SEQ ID NO: 13343
  modified_base 1..5785: mod_base = OTHER; note = Each t is m1f
  source 1..5785: mol_type = other RNA

SEQ ID NO: 14941 - RNA, 5785 nt, synthetic construct; identical to SEQ ID NO: 13344
  modified_base 1..5785: mod_base = OTHER; note = Each t is m1f
  source 1..5785: mol_type = other RNA

SEQ ID NO: 14942 - RNA, 5785 nt, synthetic construct; identical to SEQ ID NO: 13345
  modified_base 1..5785: mod_base = OTHER; note = Each t is m1f
  source 1..5785: mol_type = other RNA

SEQ ID NO: 14943 - RNA, 5785 nt, synthetic construct; identical to SEQ ID NO: 13346
  modified_base 1..5785: mod_base = OTHER; note = Each t is m1f
  source 1..5785: mol_type = other RNA

SEQ ID NO: 14944 - RNA, 5785 nt, synthetic construct; identical to SEQ ID NO: 13347
  modified_base 1..5785: mod_base = OTHER; note = Each t is m1f
  source 1..5785: mol_type = other RNA

SEQ ID NO: 14945 - RNA, 5785 nt, synthetic construct; identical to SEQ ID NO: 13348
  modified_base 1..5785: mod_base = OTHER; note = Each t is m1f
  source 1..5785: mol_type = other RNA

SEQ ID NO: 14946 - RNA, 5785 nt, synthetic construct; identical to SEQ ID NO: 13349
  modified_base 1..5785: mod_base = OTHER; note = Each t is m1f
  source 1..5785: mol_type = other RNA

SEQ ID NO: 14947 - RNA, 5785 nt, synthetic construct; identical to SEQ ID NO: 13350
  modified_base 1..5785: mod_base = OTHER; note = Each t is m1f
  source 1..5785: mol_type = other RNA

SEQ ID NO: 14948 - RNA, 5785 nt, synthetic construct; identical to SEQ ID NO: 13351
  modified_base 1..5785: mod_base = OTHER; note = Each t is m1f
  source 1..5785: mol_type = other RNA

SEQ ID NO: 14949 - RNA, 5785 nt, synthetic construct; identical to SEQ ID NO: 13352
  modified_base 1..5785: mod_base = OTHER; note = Each t is m1f
  source 1..5785: mol_type = other RNA

SEQ ID NO: 14950 - RNA, 5785 nt, synthetic construct; identical to SEQ ID NO: 13353
  modified_base 1..5785: mod_base = OTHER; note = Each t is m1f
  source 1..5785: mol_type = other RNA

SEQ ID NO: 14951 - RNA, 5785 nt, synthetic construct; identical to SEQ ID NO: 13354
  modified_base 1..5785: mod_base = OTHER; note = Each t is m1f
  source 1..5785: mol_type = other RNA

SEQ ID NO: 14952 - RNA, 5785 nt, synthetic construct; identical to SEQ ID NO: 13355
  modified_base 1..5785: mod_base = OTHER; note = Each t is m1f
  source 1..5785: mol_type = other RNA

SEQ ID NO: 14953 - RNA, 5785 nt, synthetic construct; identical to SEQ ID NO: 13356
  modified_base 1..5785: mod_base = OTHER; note = Each t is m1f
  source 1..5785: mol_type = other RNA

SEQ ID NO: 14954 - RNA, 5785 nt, synthetic construct; identical to SEQ ID NO: 13357
  modified_base 1..5785: mod_base = OTHER; note = Each t is m1f
  source 1..5785: mol_type = other RNA

SEQ ID NO: 14955 - RNA, 5785 nt, synthetic construct; identical to SEQ ID NO: 13358
  modified_base 1..5785: mod_base = OTHER; note = Each t is m1f
  source 1..5785: mol_type = other RNA

SEQ ID NO: 14956 - RNA, 5785 nt, synthetic construct; identical to SEQ ID NO: 13359
  modified_base 1..5785: mod_base = OTHER; note = Each t is m1f
  source 1..5785: mol_type = other RNA

SEQ ID NO: 14957 - RNA, 5785 nt, synthetic construct; identical to SEQ ID NO: 13360
  modified_base 1..5785: mod_base = OTHER; note = Each t is m1f
  source 1..5785: mol_type = other RNA

SEQ ID NO: 14958 - RNA, 5785 nt, synthetic construct; identical to SEQ ID NO: 13361
  modified_base 1..5785: mod_base = OTHER; note = Each t is m1f
  source 1..5785: mol_type = other RNA

SEQ ID NO: 14959 - RNA, 5785 nt, synthetic construct; identical to SEQ ID NO: 13362
  modified_base 1..5785: mod_base = OTHER; note = Each t is m1f
  source 1..5785: mol_type = other RNA

SEQ ID NO: 14960 - RNA, 5785 nt, synthetic construct; identical to SEQ ID NO: 13363
  modified_base 1..5785: mod_base = OTHER; note = Each t is m1f
  source 1..5785: mol_type = other RNA

SEQ ID NO: 14961 - RNA, 5785 nt, synthetic construct; identical to SEQ ID NO: 13364
  modified_base 1..5785: mod_base = OTHER; note = Each t is m1f
  source 1..5785: mol_type = other RNA

SEQ ID NO: 14962 - RNA, 5785 nt, synthetic construct; identical to SEQ ID NO: 13365
  modified_base 1..5785: mod_base = OTHER; note = Each t is m1f
  source 1..5785: mol_type = other RNA

SEQ ID NO: 14963 - RNA, 5785 nt, synthetic construct; identical to SEQ ID NO: 13366
  modified_base 1..5785: mod_base = OTHER; note = Each t is m1f
  source 1..5785: mol_type = other RNA

SEQ ID NO: 14964 - RNA, 5785 nt, synthetic construct; identical to SEQ ID NO: 13367
  modified_base 1..5785: mod_base = OTHER; note = Each t is m1f
  source 1..5785: mol_type = other RNA

SEQ ID NO: 14965 - RNA, 5785 nt, synthetic construct; identical to SEQ ID NO: 13368
  modified_base 1..5785: mod_base = OTHER; note = Each t is m1f
  source 1..5785: mol_type = other RNA

SEQ ID NO: 14966 - RNA, 5785 nt, synthetic construct; identical to SEQ ID NO: 13369
  modified_base 1..5785: mod_base = OTHER; note = Each t is m1f
  source 1..5785: mol_type = other RNA

SEQ ID NO: 14967 - RNA, 5785 nt, synthetic construct; identical to SEQ ID NO: 13370
  modified_base 1..5785: mod_base = OTHER; note = Each t is m1f
  source 1..5785: mol_type = other RNA

SEQ ID NO: 14968 - RNA, 5785 nt, synthetic construct; identical to SEQ ID NO: 13371
  modified_base 1..5785: mod_base = OTHER; note = Each t is m1f
  source 1..5785: mol_type = other RNA

SEQ ID NO: 14969 - RNA, 5785 nt, synthetic construct; identical to SEQ ID NO: 13372
  modified_base 1..5785: mod_base = OTHER; note = Each t is m1f
  source 1..5785: mol_type = other RNA

SEQ ID NO: 14970 - RNA, 5785 nt, synthetic construct; identical to SEQ ID NO: 13373
  modified_base 1..5785: mod_base = OTHER; note = Each t is m1f
  source 1..5785: mol_type = other RNA

SEQ ID NO: 14971 - RNA, 5785 nt, synthetic construct; identical to SEQ ID NO: 13374
  modified_base 1..5785: mod_base = OTHER; note = Each t is m1f
  source 1..5785: mol_type = other RNA

SEQ ID NO: 14972 - RNA, 5785 nt, synthetic construct; identical to SEQ ID NO: 13375
  modified_base 1..5785: mod_base = OTHER; note = Each t is m1f
  source 1..5785: mol_type = other RNA

SEQ ID NO: 14973 - RNA, 5785 nt, synthetic construct; identical to SEQ ID NO: 13376
  modified_base 1..5785: mod_base = OTHER; note = Each t is m1f
  source 1..5785: mol_type = other RNA

SEQ ID NO: 14974 - RNA, 5785 nt, synthetic construct; identical to SEQ ID NO: 13377
  modified_base 1..5785: mod_base = OTHER; note = Each t is m1f
  source 1..5785: mol_type = other RNA

SEQ ID NO: 14975 - RNA, 5785 nt, synthetic construct; identical to SEQ ID NO: 13378
  modified_base 1..5785: mod_base = OTHER; note = Each t is m1f
  source 1..5785: mol_type = other RNA

SEQ ID NO: 14976 - RNA, 5785 nt, synthetic construct; identical to SEQ ID NO: 13379
  modified_base 1..5785: mod_base = OTHER; note = Each t is m1f
  source 1..5785: mol_type = other RNA

SEQ ID NO: 14977 - RNA, 5785 nt, synthetic construct; identical to SEQ ID NO: 13380
  modified_base 1..5785: mod_base = OTHER; note = Each t is m1f
  source 1..5785: mol_type = other RNA

SEQ ID NO: 14978 - RNA, 5782 nt, synthetic construct; identical to SEQ ID NO: 13381
  modified_base 1..5782: mod_base = OTHER; note = Each t is m1f
  source 1..5782: mol_type = other RNA

SEQ ID NO: 14979 - RNA, 5785 nt, synthetic construct; identical to SEQ ID NO: 13382
  modified_base 1..5785: mod_base = OTHER; note = Each t is m1f
  source 1..5785: mol_type = other RNA

SEQ ID NO: 14980 - RNA, 5785 nt, synthetic construct; identical to SEQ ID NO: 13383
  modified_base 1..5785: mod_base = OTHER; note = Each t is m1f
  source 1..5785: mol_type = other RNA

SEQ ID NO: 14981 - RNA, 5785 nt, synthetic construct; identical to SEQ ID NO: 13384
  modified_base 1..5785: mod_base = OTHER; note = Each t is m1f
  source 1..5785: mol_type = other RNA

SEQ ID NO: 14982 - RNA, 5785 nt, synthetic construct; identical to SEQ ID NO: 13385
  modified_base 1..5785: mod_base = OTHER; note = Each t is m1f
  source 1..5785: mol_type = other RNA

SEQ ID NO: 14983 - RNA, 5785 nt, synthetic construct; identical to SEQ ID NO: 13386
  modified_base 1..5785: mod_base = OTHER; note = Each t is m1f
  source 1..5785: mol_type = other RNA

SEQ ID NO: 14984 - RNA, 5785 nt, synthetic construct; identical to SEQ ID NO: 13387
  modified_base 1..5785: mod_base = OTHER; note = Each t is m1f
  source 1..5785: mol_type = other RNA

SEQ ID NO: 14985 - RNA, 5785 nt, synthetic construct; identical to SEQ ID NO: 13388
  modified_base 1..5785: mod_base = OTHER; note = Each t is m1f
  source 1..5785: mol_type = other RNA

SEQ ID NO: 14986 - RNA, 5785 nt, synthetic construct; identical to SEQ ID NO: 13389
  modified_base 1..5785: mod_base = OTHER; note = Each t is m1f
  source 1..5785: mol_type = other RNA

SEQ ID NO: 14987 - RNA, 5785 nt, synthetic construct; identical to SEQ ID NO: 13390
  modified_base 1..5785: mod_base = OTHER; note = Each t is m1f
  source 1..5785: mol_type = other RNA

SEQ ID NO: 14988 - RNA, 5785 nt, synthetic construct; identical to SEQ ID NO: 13391
  modified_base 1..5785: mod_base = OTHER; note = Each t is m1f
  source 1..5785: mol_type = other RNA

SEQ ID NO: 14989 - RNA, 5785 nt, synthetic construct; identical to SEQ ID NO: 13392
  modified_base 1..5785: mod_base = OTHER; note = Each t is m1f
  source 1..5785: mol_type = other RNA

SEQ ID NO: 14990 - RNA, 5785 nt, synthetic construct; identical to SEQ ID NO: 13393
  modified_base 1..5785: mod_base = OTHER; note = Each t is m1f
  source 1..5785: mol_type = other RNA

SEQ ID NO: 14991 - RNA, 5785 nt, synthetic construct; identical to SEQ ID NO: 13394
  modified_base 1..5785: mod_base = OTHER; note = Each t is m1f
  source 1..5785: mol_type = other RNA

SEQ ID NO: 14992 - RNA, 5785 nt, synthetic construct; identical to SEQ ID NO: 13395
  modified_base 1..5785: mod_base = OTHER; note = Each t is m1f
  source 1..5785: mol_type = other RNA

SEQ ID NO: 14993 - RNA, 5785 nt, synthetic construct; identical to SEQ ID NO: 13396
  modified_base 1..5785: mod_base = OTHER; note = Each t is m1f
  source 1..5785: mol_type = other RNA

SEQ ID NO: 14994 - RNA, 5785 nt, synthetic construct; identical to SEQ ID NO: 13397
  modified_base 1..5785: mod_base = OTHER; note = Each t is m1f
  source 1..5785: mol_type = other RNA

SEQ ID NO: 14995 - RNA, 5785 nt, synthetic construct; identical to SEQ ID NO: 13398
  modified_base 1..5785: mod_base = OTHER; note = Each t is m1f
  source 1..5785: mol_type = other RNA

SEQ ID NO: 14996 - RNA, 5785 nt, synthetic construct; identical to SEQ ID NO: 13399
  modified_base 1..5785: mod_base = OTHER; note = Each t is m1f
  source 1..5785: mol_type = other RNA

SEQ ID NO: 14997 - RNA, 5785 nt, synthetic construct; identical to SEQ ID NO: 13400
  modified_base 1..5785: mod_base = OTHER; note = Each t is m1f
  source 1..5785: mol_type = other RNA

SEQ ID NO: 14998 - RNA, 5785 nt, synthetic construct; identical to SEQ ID NO: 13401
  modified_base 1..5785: mod_base = OTHER; note = Each t is m1f
  source 1..5785: mol_type = other RNA

SEQ ID NO: 14999 - RNA, 5785 nt, synthetic construct; identical to SEQ ID NO: 13402
  modified_base 1..5785: mod_base = OTHER; note = Each t is m1f
  source 1..5785: mol_type = other RNA

SEQ ID NO: 15000 - RNA, 5785 nt, synthetic construct; identical to SEQ ID NO: 13403
  modified_base 1..5785: mod_base = OTHER; note = Each t is m1f
  source 1..5785: mol_type = other RNA

SEQ ID NO: 15001 - RNA, 5785 nt, synthetic construct; identical to SEQ ID NO: 13404
  modified_base 1..5785: mod_base = OTHER; note = Each t is m1f
  source 1..5785: mol_type = other RNA

SEQ ID NO: 15002 - RNA, 5785 nt, synthetic construct; identical to SEQ ID NO: 13405
  modified_base 1..5785: mod_base = OTHER; note = Each t is m1f
  source 1..5785: mol_type = other RNA

SEQ ID NO: 15003 - RNA, 5785 nt, synthetic construct; identical to SEQ ID NO: 13406
  modified_base 1..5785: mod_base = OTHER; note = Each t is m1f
  source 1..5785: mol_type = other RNA

SEQ ID NO: 15004 - RNA, 5785 nt, synthetic construct; identical to SEQ ID NO: 13407
  modified_base 1..5785: mod_base = OTHER; note = Each t is m1f
  source 1..5785: mol_type = other RNA

SEQ ID NO: 15005 - RNA, 5785 nt, synthetic construct; identical to SEQ ID NO: 13408
  modified_base 1..5785: mod_base = OTHER; note = Each t is m1f
  source 1..5785: mol_type = other RNA

SEQ ID NO: 15006 - RNA, 5785 nt, synthetic construct; identical to SEQ ID NO: 13409
  modified_base 1..5785: mod_base = OTHER; note = Each t is m1f
  source 1..5785: mol_type = other RNA

SEQ ID NO: 15007 - RNA, 5785 nt, synthetic construct; identical to SEQ ID NO: 13410
  modified_base 1..5785: mod_base = OTHER; note = Each t is m1f
  source 1..5785: mol_type = other RNA

SEQ ID NO: 15008 - RNA, 5785 nt, synthetic construct; identical to SEQ ID NO: 13411
  modified_base 1..5785: mod_base = OTHER; note = Each t is m1f
  source 1..5785: mol_type = other RNA

SEQ ID NO: 15009 - RNA, 5785 nt, synthetic construct; identical to SEQ ID NO: 13412
  modified_base 1..5785: mod_base = OTHER; note = Each t is m1f
  source 1..5785: mol_type = other RNA

SEQ ID NO: 15010 - RNA, 5785 nt, synthetic construct; identical to SEQ ID NO: 13413
  modified_base 1..5785: mod_base = OTHER; note = Each t is m1f
  source 1..5785: mol_type = other RNA

SEQ ID NO: 15011 - RNA, 5785 nt, synthetic construct; identical to SEQ ID NO: 13414
  modified_base 1..5785: mod_base = OTHER; note = Each t is m1f
  source 1..5785: mol_type = other RNA

SEQ ID NO: 15012 - RNA, 5785 nt, synthetic construct; identical to SEQ ID NO: 13415
  modified_base 1..5785: mod_base = OTHER; note = Each t is m1f
  source 1..5785: mol_type = other RNA

SEQ ID NO: 15013 - RNA, 5785 nt, synthetic construct; identical to SEQ ID NO: 13416
  modified_base 1..5785: mod_base = OTHER; note = Each t is m1f
  source 1..5785: mol_type = other RNA

SEQ ID NO: 15014 - RNA, 5785 nt, synthetic construct; identical to SEQ ID NO: 13417
  modified_base 1..5785: mod_base = OTHER; note = Each t is m1f
  source 1..5785: mol_type = other RNA

SEQ ID NO: 15015 - RNA, 5785 nt, synthetic construct; identical to SEQ ID NO: 13418
  modified_base 1..5785: mod_base = OTHER; note = Each t is m1f
  source 1..5785: mol_type = other RNA

SEQ ID NO: 15016 - RNA, 5785 nt, synthetic construct; identical to SEQ ID NO: 13419
  modified_base 1..5785: mod_base = OTHER; note = Each t is m1f
  source 1..5785: mol_type = other RNA

SEQ ID NO: 15017 - RNA, 5791 nt, synthetic construct; identical to SEQ ID NO: 13420
  modified_base 1..5791: mod_base = OTHER; note = Each t is m1f
  source 1..5791: mol_type = other RNA

SEQ ID NO: 15018 - RNA, 5785 nt, synthetic construct; identical to SEQ ID NO: 13421
  modified_base 1..5785: mod_base = OTHER; note = Each t is m1f
  source 1..5785: mol_type = other RNA

SEQ ID NO: 15019 - RNA, 5785 nt, synthetic construct; identical to SEQ ID NO: 13422
  modified_base 1..5785: mod_base = OTHER; note = Each t is m1f
  source 1..5785: mol_type = other RNA

SEQ ID NO: 15020 - RNA, 5785 nt, synthetic construct; identical to SEQ ID NO: 13423
  modified_base 1..5785: mod_base = OTHER; note = Each t is m1f
  source 1..5785: mol_type = other RNA

SEQ ID NO: 15021 - RNA, 5785 nt, synthetic construct; identical to SEQ ID NO: 13424
  modified_base 1..5785: mod_base = OTHER; note = Each t is m1f
  source 1..5785: mol_type = other RNA

SEQ ID NO: 15022 - RNA, 5785 nt, synthetic construct; identical to SEQ ID NO: 13425
  modified_base 1..5785: mod_base = OTHER; note = Each t is m1f
  source 1..5785: mol_type = other RNA

SEQ ID NO: 15023 - RNA, 5785 nt, synthetic construct; identical to SEQ ID NO: 13426
  modified_base 1..5785: mod_base = OTHER; note = Each t is m1f
  source 1..5785: mol_type = other RNA

SEQ ID NO: 15024 - RNA, 5785 nt, synthetic construct; identical to SEQ ID NO: 13427
  modified_base 1..5785: mod_base = OTHER; note = Each t is m1f
  source 1..5785: mol_type = other RNA

SEQ ID NO: 15025 - RNA, 5785 nt, synthetic construct; identical to SEQ ID NO: 13428
  modified_base 1..5785: mod_base = OTHER; note = Each t is m1f
  source 1..5785: mol_type = other RNA

SEQ ID NO: 15026 - RNA, 5785 nt, synthetic construct; identical to SEQ ID NO: 13429
  modified_base 1..5785: mod_base = OTHER; note = Each t is m1f
  source 1..5785: mol_type = other RNA

SEQ ID NO: 15027 - RNA, 5785 nt, synthetic construct; identical to SEQ ID NO: 13430
  modified_base 1..5785: mod_base = OTHER; note = Each t is m1f
  source 1..5785: mol_type = other RNA

SEQ ID NO: 15028 - RNA, 5785 nt, synthetic construct; identical to SEQ ID NO: 13431
  modified_base 1..5785: mod_base = OTHER; note = Each t is m1f
  source 1..5785: mol_type = other RNA

SEQ ID NO: 15029 - RNA, 5785 nt, synthetic construct; identical to SEQ ID NO: 13432
  modified_base 1..5785: mod_base = OTHER; note = Each t is m1f
  source 1..5785: mol_type = other RNA

SEQ ID NO: 15030 - RNA, 5785 nt, synthetic construct; identical to SEQ ID NO: 13433
  modified_base 1..5785: mod_base = OTHER; note = Each t is m1f
  source 1..5785: mol_type = other RNA

SEQ ID NO: 15031 - RNA, 5785 nt, synthetic construct; identical to SEQ ID NO: 13434
  modified_base 1..5785: mod_base = OTHER; note = Each t is m1f
  source 1..5785: mol_type = other RNA

SEQ ID NO: 15032 - RNA, 5785 nt, synthetic construct; identical to SEQ ID NO: 13435
  modified_base 1..5785: mod_base = OTHER; note = Each t is m1f
  source 1..5785: mol_type = other RNA

SEQ ID NO: 15033 - RNA, 5782 nt, synthetic construct; identical to SEQ ID NO: 13436
  modified_base 1..5782: mod_base = OTHER; note = Each t is m1f
  source 1..5782: mol_type = other RNA

SEQ ID NO: 15034 - RNA, 5785 nt, synthetic construct; identical to SEQ ID NO: 13437
  modified_base 1..5785: mod_base = OTHER; note = Each t is m1f
  source 1..5785: mol_type = other RNA

SEQ ID NO: 15035 - RNA, 5785 nt, synthetic construct; identical to SEQ ID NO: 13438
  modified_base 1..5785: mod_base = OTHER; note = Each t is m1f
  source 1..5785: mol_type = other RNA

SEQ ID NO: 15036 - RNA, 5785 nt, synthetic construct; identical to SEQ ID NO: 13439
  modified_base 1..5785: mod_base = OTHER; note = Each t is m1f
  source 1..5785: mol_type = other RNA

SEQ ID NO: 15037 - RNA, 5785 nt, synthetic construct; identical to SEQ ID NO: 13440
  modified_base 1..5785: mod_base = OTHER; note = Each t is m1f
  source 1..5785: mol_type = other RNA

SEQ ID NO: 15038 - RNA, 5785 nt, synthetic construct; identical to SEQ ID NO: 13441
  modified_base 1..5785: mod_base = OTHER; note = Each t is m1f
  source 1..5785: mol_type = other RNA

SEQ ID NO: 15039 - RNA, 5785 nt, synthetic construct; identical to SEQ ID NO: 13442
  modified_base 1..5785: mod_base = OTHER; note = Each t is m1f
  source 1..5785: mol_type = other RNA

SEQ ID NO: 15040 - RNA, 5785 nt, synthetic construct; identical to SEQ ID NO: 13443
  modified_base 1..5785: mod_base = OTHER; note = Each t is m1f
  source 1..5785: mol_type = other RNA

SEQ ID NO: 15041 - RNA, 5785 nt, synthetic construct; identical to SEQ ID NO: 13444
  modified_base 1..5785: mod_base = OTHER; note = Each t is m1f
  source 1..5785: mol_type = other RNA

SEQ ID NO: 15042 - RNA, 5821 nt, synthetic construct; identical to SEQ ID NO: 13445
  modified_base 1..5821: mod_base = OTHER; note = Each t is m1f
  source 1..5821: mol_type = other RNA

SEQ ID NO: 15043 - RNA, 5785 nt, synthetic construct; identical to SEQ ID NO: 13446
  modified_base 1..5785: mod_base = OTHER; note = Each t is m1f
  source 1..5785: mol_type = other RNA

SEQ ID NO: 15044 - RNA, 5785 nt, synthetic construct; identical to SEQ ID NO: 13447
  modified_base 1..5785: mod_base = OTHER; note = Each t is m1f
  source 1..5785: mol_type = other RNA

SEQ ID NO: 15045 - RNA, 5785 nt, synthetic construct; identical to SEQ ID NO: 13448
  modified_base 1..5785: mod_base = OTHER; note = Each t is m1f
  source 1..5785: mol_type = other RNA

SEQ ID NO: 15046 - RNA, 5785 nt, synthetic construct; identical to SEQ ID NO: 13449
  modified_base 1..5785: mod_base = OTHER; note = Each t is m1f
  source 1..5785: mol_type = other RNA

SEQ ID NO: 15047 - RNA, 5785 nt, synthetic construct; identical to SEQ ID NO: 13450
  modified_base 1..5785: mod_base = OTHER; note = Each t is m1f
  source 1..5785: mol_type = other RNA

SEQ ID NO: 15048 - RNA, 5785 nt, synthetic construct; identical to SEQ ID NO: 13451
  modified_base 1..5785: mod_base = OTHER; note = Each t is m1f
  source 1..5785: mol_type = other RNA

SEQ ID NO: 15049 - RNA, 5785 nt, synthetic construct; identical to SEQ ID NO: 13452
  modified_base 1..5785: mod_base = OTHER; note = Each t is m1f
  source 1..5785: mol_type = other RNA

SEQ ID NO: 15050 - RNA, 5785 nt, synthetic construct; identical to SEQ ID NO: 13453
  modified_base 1..5785: mod_base = OTHER; note = Each t is m1f
  source 1..5785: mol_type = other RNA

SEQ ID NO: 15051 - RNA, 5785 nt, synthetic construct; identical to SEQ ID NO: 13454
  modified_base 1..5785: mod_base = OTHER; note = Each t is m1f
  source 1..5785: mol_type = other RNA

SEQ ID NO: 15052 - RNA, 5785 nt, synthetic construct; identical to SEQ ID NO: 13455
  modified_base 1..5785: mod_base = OTHER; note = Each t is m1f
  source 1..5785: mol_type = other RNA

SEQ ID NO: 15053 - RNA, 5884 nt, synthetic construct; identical to SEQ ID NO: 13456
  modified_base 1..5884: mod_base = OTHER; note = Each t is m1f
  source 1..5884: mol_type = other RNA

SEQ ID NO: 15054 - RNA, 5785 nt, synthetic construct; identical to SEQ ID NO: 13457
  modified_base 1..5785: mod_base = OTHER; note = Each t is m1f
  source 1..5785: mol_type = other RNA

SEQ ID NO: 15055 - RNA, 5785 nt, synthetic construct; identical to SEQ ID NO: 13458
  modified_base 1..5785: mod_base = OTHER; note = Each t is m1f
  source 1..5785: mol_type = other RNA

SEQ ID NO: 15056 - RNA, 5785 nt, synthetic construct; identical to SEQ ID NO: 13459
  modified_base 1..5785: mod_base = OTHER; note = Each t is m1f
  source 1..5785: mol_type = other RNA

SEQ ID NO: 15057 - RNA, 5785 nt, synthetic construct; identical to SEQ ID NO: 13460
  modified_base 1..5785: mod_base = OTHER; note = Each t is m1f
  source 1..5785: mol_type = other RNA

SEQ ID NO: 15058 - RNA, 5785 nt, synthetic construct; identical to SEQ ID NO: 13461
  modified_base 1..5785: mod_base = OTHER; note = Each t is m1f
  source 1..5785: mol_type = other RNA

SEQ ID NO: 15059 - RNA, 5785 nt, synthetic construct; identical to SEQ ID NO: 13462
  modified_base 1..5785: mod_base = OTHER; note = Each t is m1f
  source 1..5785: mol_type = other RNA

SEQ ID NO: 15060 - RNA, 5785 nt, synthetic construct; identical to SEQ ID NO: 13463
  modified_base 1..5785: mod_base = OTHER; note = Each t is m1f
  source 1..5785: mol_type = other RNA

SEQ ID NO: 15061 - RNA, 5785 nt, synthetic construct; identical to SEQ ID NO: 13464
  modified_base 1..5785: mod_base = OTHER; note = Each t is m1f
  source 1..5785: mol_type = other RNA

SEQ ID NO: 15062 - RNA, 5785 nt, synthetic construct; identical to SEQ ID NO: 13465
  modified_base 1..5785: mod_base = OTHER; note = Each t is m1f
  source 1..5785: mol_type = other RNA

SEQ ID NO: 15063 - RNA, 5785 nt, synthetic construct; identical to SEQ ID NO: 13466
  modified_base 1..5785: mod_base = OTHER; note = Each t is m1f
  source 1..5785: mol_type = other RNA

SEQ ID NO: 15064 - RNA, 5785 nt, synthetic construct; identical to SEQ ID NO: 13467
  modified_base 1..5785: mod_base = OTHER; note = Each t is m1f
  source 1..5785: mol_type = other RNA

SEQ ID NO: 15065 - RNA, 5785 nt, synthetic construct; identical to SEQ ID NO: 13468
  modified_base 1..5785: mod_base = OTHER; note = Each t is m1f
  source 1..5785: mol_type = other RNA

SEQ ID NO: 15066 - RNA, 5785 nt, synthetic construct; identical to SEQ ID NO: 13469
  modified_base 1..5785: mod_base = OTHER; note = Each t is m1f
  source 1..5785: mol_type = other RNA

SEQ ID NO: 15067 - RNA, 5785 nt, synthetic construct; identical to SEQ ID NO: 13470
  modified_base 1..5785: mod_base = OTHER; note = Each t is m1f
  source 1..5785: mol_type = other RNA

SEQ ID NO: 15068 - RNA, 5785 nt, synthetic construct; identical to SEQ ID NO: 13471
  modified_base 1..5785: mod_base = OTHER; note = Each t is m1f
  source 1..5785: mol_type = other RNA

SEQ ID NO: 15069 - RNA, 5785 nt, synthetic construct; identical to SEQ ID NO: 13472
  modified_base 1..5785: mod_base = OTHER; note = Each t is m1f
  source 1..5785: mol_type = other RNA

SEQ ID NO: 15070 - RNA, 5782 nt, synthetic construct; identical to SEQ ID NO: 13473
  modified_base 1..5782: mod_base = OTHER; note = Each t is m1f
  source 1..5782: mol_type = other RNA

SEQ ID NO: 15071 - RNA, 5785 nt, synthetic construct; identical to SEQ ID NO: 13474
  modified_base 1..5785: mod_base = OTHER; note = Each t is m1f
  source 1..5785: mol_type = other RNA

SEQ ID NO: 15072 - RNA, 5785 nt, synthetic construct; identical to SEQ ID NO: 13475
  modified_base 1..5785: mod_base = OTHER; note = Each t is m1f
  source 1..5785: mol_type = other RNA

SEQ ID NO: 15073 - RNA, 5785 nt, synthetic construct; identical to SEQ ID NO: 13476
  modified_base 1..5785: mod_base = OTHER; note = Each t is m1f
  source 1..5785: mol_type = other RNA

SEQ ID NO: 15074 - RNA, 5785 nt, synthetic construct; identical to SEQ ID NO: 13477
  modified_base 1..5785: mod_base = OTHER; note = Each t is m1f
  source 1..5785: mol_type = other RNA

SEQ ID NO: 15075 - RNA, 5785 nt, synthetic construct; identical to SEQ ID NO: 13478
  modified_base 1..5785: mod_base = OTHER; note = Each t is m1f
  source 1..5785: mol_type = other RNA

SEQ ID NO: 15076 - RNA, 5785 nt, synthetic construct; identical to SEQ ID NO: 13479
  modified_base 1..5785: mod_base = OTHER; note = Each t is m1f
  source 1..5785: mol_type = other RNA

SEQ ID NO: 15077 - RNA, 5785 nt, synthetic construct; identical to SEQ ID NO: 13480
  modified_base 1..5785: mod_base = OTHER; note = Each t is m1f
  source 1..5785: mol_type = other RNA

SEQ ID NO: 15078 - RNA, 5785 nt, synthetic construct; identical to SEQ ID NO: 13481
  modified_base 1..5785: mod_base = OTHER; note = Each t is m1f
  source 1..5785: mol_type = other RNA

SEQ ID NO: 15079 - RNA, 5785 nt, synthetic construct; identical to SEQ ID NO: 13482
  modified_base 1..5785: mod_base = OTHER; note = Each t is m1f
  source 1..5785: mol_type = other RNA

SEQ ID NO: 15080 - RNA, 5785 nt, synthetic construct; identical to SEQ ID NO: 13483
  modified_base 1..5785: mod_base = OTHER; note = Each t is m1f
  source 1..5785: mol_type = other RNA

SEQ ID NO: 15081 - RNA, 5785 nt, synthetic construct; identical to SEQ ID NO: 13484
  modified_base 1..5785: mod_base = OTHER; note = Each t is m1f
  source 1..5785: mol_type = other RNA

SEQ ID NO: 15082 - RNA, 5785 nt, synthetic construct; identical to SEQ ID NO: 13485
  modified_base 1..5785: mod_base = OTHER; note = Each t is m1f
  source 1..5785: mol_type = other RNA

SEQ ID NO: 15083 - RNA, 5785 nt, synthetic construct; identical to SEQ ID NO: 13486
  modified_base 1..5785: mod_base = OTHER; note = Each t is m1f
  source 1..5785: mol_type = other RNA

SEQ ID NO: 15084 - RNA, 5785 nt, synthetic construct; identical to SEQ ID NO: 13487
  modified_base 1..5785: mod_base = OTHER; note = Each t is m1f
  source 1..5785: mol_type = other RNA

SEQ ID NO: 15085 - RNA, 5785 nt, synthetic construct; identical to SEQ ID NO: 13488
  modified_base 1..5785: mod_base = OTHER; note = Each t is m1f
  source 1..5785: mol_type = other RNA

SEQ ID NO: 15086 - RNA, 5785 nt, synthetic construct; identical to SEQ ID NO: 13489
  modified_base 1..5785: mod_base = OTHER; note = Each t is m1f
  source 1..5785: mol_type = other RNA

SEQ ID NO: 15087 - RNA, 5785 nt, synthetic construct; identical to SEQ ID NO: 13490
  modified_base 1..5785: mod_base = OTHER; note = Each t is m1f
  source 1..5785: mol_type = other RNA

SEQ ID NO: 15088 - RNA, 5785 nt, synthetic construct; identical to SEQ ID NO: 13491
  modified_base 1..5785: mod_base = OTHER; note = Each t is m1f
  source 1..5785: mol_type = other RNA

SEQ ID NO: 15089 - RNA, 5785 nt, synthetic construct; identical to SEQ ID NO: 13492
  modified_base 1..5785: mod_base = OTHER; note = Each t is m1f
  source 1..5785: mol_type = other RNA

SEQ ID NO: 15090 - RNA, 5785 nt, synthetic construct; identical to SEQ ID NO: 13493
  modified_base 1..5785: mod_base = OTHER; note = Each t is m1f
  source 1..5785: mol_type = other RNA

SEQ ID NO: 15091 - RNA, 5785 nt, synthetic construct; identical to SEQ ID NO: 13494
  modified_base 1..5785: mod_base = OTHER; note = Each t is m1f
  source 1..5785: mol_type = other RNA

SEQ ID NO: 15092 - RNA, 5785 nt, synthetic construct; identical to SEQ ID NO: 13495
  modified_base 1..5785: mod_base = OTHER; note = Each t is m1f
  source 1..5785: mol_type = other RNA

SEQ ID NO: 15093 - RNA, 5785 nt, synthetic construct; identical to SEQ ID NO: 13496
  modified_base 1..5785: mod_base = OTHER; note = Each t is m1f
  source 1..5785: mol_type = other RNA

SEQ ID NO: 15094 - RNA, 5785 nt, synthetic construct; identical to SEQ ID NO: 13497
  modified_base 1..5785: mod_base = OTHER; note = Each t is m1f
  source 1..5785: mol_type = other RNA

SEQ ID NO: 15095 - RNA, 5785 nt, synthetic construct; identical to SEQ ID NO: 13498
  modified_base 1..5785: mod_base = OTHER; note = Each t is m1f
  source 1..5785: mol_type = other RNA

SEQ ID NO: 15096 - RNA, 5785 nt, synthetic construct; identical to SEQ ID NO: 13499
  modified_base 1..5785: mod_base = OTHER; note = Each t is m1f
  source 1..5785: mol_type = other RNA

SEQ ID NO: 15097 - RNA, 5785 nt, synthetic construct; identical to SEQ ID NO: 13500
  modified_base 1..5785: mod_base = OTHER; note = Each t is m1f
  source 1..5785: mol_type = other RNA

SEQ ID NO: 15098 - RNA, 5785 nt, synthetic construct; identical to SEQ ID NO: 13501
  modified_base 1..5785: mod_base = OTHER; note = Each t is m1f
  source 1..5785: mol_type = other RNA

SEQ ID NO: 15099 - RNA, 5785 nt, synthetic construct; identical to SEQ ID NO: 13502
  modified_base 1..5785: mod_base = OTHER; note = Each t is m1f
  source 1..5785: mol_type = other RNA

SEQ ID NO: 15100 - RNA, 5785 nt, synthetic construct; identical to SEQ ID NO: 13503
  modified_base 1..5785: mod_base = OTHER; note = Each t is m1f
  source 1..5785: mol_type = other RNA

SEQ ID NO: 15101 - RNA, 5785 nt, synthetic construct; identical to SEQ ID NO: 13504
  modified_base 1..5785: mod_base = OTHER; note = Each t is m1f
  source 1..5785: mol_type = other RNA

SEQ ID NO: 15102 - RNA, 5785 nt, synthetic construct; identical to SEQ ID NO: 13505
  modified_base 1..5785: mod_base = OTHER; note = Each t is m1f
  source 1..5785: mol_type = other RNA

SEQ ID NO: 15103 - RNA, 5785 nt, synthetic construct; identical to SEQ ID NO: 13506
  modified_base 1..5785: mod_base = OTHER; note = Each t is m1f
  source 1..5785: mol_type = other RNA

SEQ ID NO: 15104 - RNA, 5785 nt, synthetic construct; identical to SEQ ID NO: 13507
  modified_base 1..5785: mod_base = OTHER; note = Each t is m1f
  source 1..5785: mol_type = other RNA

SEQ ID NO: 15105 - RNA, 5785 nt, synthetic construct; identical to SEQ ID NO: 13508
  modified_base 1..5785: mod_base = OTHER; note = Each t is m1f
  source 1..5785: mol_type = other RNA

SEQ ID NO: 15106 - RNA, 5785 nt, synthetic construct; identical to SEQ ID NO: 13509
  modified_base 1..5785: mod_base = OTHER; note = Each t is m1f
  source 1..5785: mol_type = other RNA

SEQ ID NO: 15107 - RNA, 5785 nt, synthetic construct; identical to SEQ ID NO: 13510
  modified_base 1..5785: mod_base = OTHER; note = Each t is m1f
  source 1..5785: mol_type = other RNA

SEQ ID NO: 15108 - RNA, 5785 nt, synthetic construct; identical to SEQ ID NO: 13511
  modified_base 1..5785: mod_base = OTHER; note = Each t is m1f
  source 1..5785: mol_type = other RNA

SEQ ID NO: 15109 - RNA, 5803 nt, synthetic construct; identical to SEQ ID NO: 13512
  modified_base 1..5803: mod_base = OTHER; note = Each t is m1f
  source 1..5803: mol_type = other RNA

SEQ ID NO: 15110 - RNA, 5785 nt, synthetic construct; identical to SEQ ID NO: 13513
  modified_base 1..5785: mod_base = OTHER; note = Each t is m1f
  source 1..5785: mol_type = other RNA

SEQ ID NO: 15111 - RNA, 5785 nt, synthetic construct; identical to SEQ ID NO: 13514
  modified_base 1..5785: mod_base = OTHER; note = Each t is m1f
  source 1..5785: mol_type = other RNA

SEQ ID NO: 15112 - RNA, 5785 nt, synthetic construct; identical to SEQ ID NO: 13515
  modified_base 1..5785: mod_base = OTHER; note = Each t is m1f
  source 1..5785: mol_type = other RNA

SEQ ID NO: 15113 - RNA, 5785 nt, synthetic construct; identical to SEQ ID NO: 13516
  modified_base 1..5785: mod_base = OTHER; note = Each t is m1f
  source 1..5785: mol_type = other RNA

SEQ ID NO: 15114 - RNA, 5785 nt, synthetic construct; identical to SEQ ID NO: 13517
  modified_base 1..5785: mod_base = OTHER; note = Each t is m1f
  source 1..5785: mol_type = other RNA

SEQ ID NO: 15115 - RNA, 5785 nt, synthetic construct; identical to SEQ ID NO: 13518
  modified_base 1..5785: mod_base = OTHER; note = Each t is m1f
  source 1..5785: mol_type = other RNA

SEQ ID NO: 15116 - RNA, 5782 nt, synthetic construct; identical to SEQ ID NO: 13519
  modified_base 1..5782: mod_base = OTHER; note = Each t is m1f
  source 1..5782: mol_type = other RNA

SEQ ID NO: 15117 - RNA, 5785 nt, synthetic construct; identical to SEQ ID NO: 13520
  modified_base 1..5785: mod_base = OTHER; note = Each t is m1f
  source 1..5785: mol_type = other RNA

SEQ ID NO: 15118 - RNA, 5785 nt, synthetic construct; identical to SEQ ID NO: 13521
  modified_base 1..5785: mod_base = OTHER; note = Each t is m1f
  source 1..5785: mol_type = other RNA

SEQ ID NO: 15119 - RNA, 5785 nt, synthetic construct; identical to SEQ ID NO: 13522
  modified_base 1..5785: mod_base = OTHER; note = Each t is m1f
  source 1..5785: mol_type = other RNA

SEQ ID NO: 15120 - RNA, 5785 nt, synthetic construct; identical to SEQ ID NO: 13523
  modified_base 1..5785: mod_base = OTHER; note = Each t is m1f
  source 1..5785: mol_type = other RNA

SEQ ID NO: 15121 - RNA, 5785 nt, synthetic construct; identical to SEQ ID NO: 13524
  modified_base 1..5785: mod_base = OTHER; note = Each t is m1f
  source 1..5785: mol_type = other RNA

SEQ ID NO: 15122 - RNA, 5785 nt, synthetic construct; identical to SEQ ID NO: 13525
  modified_base 1..5785: mod_base = OTHER; note = Each t is m1f
  source 1..5785: mol_type = other RNA

SEQ ID NO: 15123 - RNA, 5785 nt, synthetic construct; identical to SEQ ID NO: 13526
  modified_base 1..5785: mod_base = OTHER; note = Each t is m1f
  source 1..5785: mol_type = other RNA

SEQ ID NO: 15124 - RNA, 5785 nt, synthetic construct; identical to SEQ ID NO: 13527
  modified_base 1..5785: mod_base = OTHER; note = Each t is m1f
  source 1..5785: mol_type = other RNA

SEQ ID NO: 15125 - RNA, 5782 nt, synthetic construct; identical to SEQ ID NO: 13528
  modified_base 1..5782: mod_base = OTHER; note = Each t is m1f
  source 1..5782: mol_type = other RNA

SEQ ID NO: 15126 - RNA, 5785 nt, synthetic construct; identical to SEQ ID NO: 13529
  modified_base 1..5785: mod_base = OTHER; note = Each t is m1f
  source 1..5785: mol_type = other RNA

SEQ ID NO: 15127 - RNA, 5785 nt, synthetic construct; identical to SEQ ID NO: 13530
  modified_base 1..5785: mod_base = OTHER; note = Each t is m1f
  source 1..5785: mol_type = other RNA

SEQ ID NO: 15128 - RNA, 5794 nt, synthetic construct; identical to SEQ ID NO: 13531
  modified_base 1..5794: mod_base = OTHER; note = Each t is m1f
  source 1..5794: mol_type = other RNA

SEQ ID NO: 15129 - RNA, 5785 nt, synthetic construct; identical to SEQ ID NO: 13532
  modified_base 1..5785: mod_base = OTHER; note = Each t is m1f
  source 1..5785: mol_type = other RNA

SEQ ID NO: 15130 - RNA, 5782 nt, synthetic construct; identical to SEQ ID NO: 13533
  modified_base 1..5782: mod_base = OTHER; note = Each t is m1f
  source 1..5782: mol_type = other RNA

SEQ ID NO: 15131 - RNA, 5785 nt, synthetic construct; identical to SEQ ID NO: 13534
  modified_base 1..5785: mod_base = OTHER; note = Each t is m1f
  source 1..5785: mol_type = other RNA

SEQ ID NO: 15132 - RNA, 5785 nt, synthetic construct; identical to SEQ ID NO: 13535
  modified_base 1..5785: mod_base = OTHER; note = Each t is m1f
  source 1..5785: mol_type = other RNA

SEQ ID NO: 15133 - RNA, 5785 nt, synthetic construct; identical to SEQ ID NO: 13536
  modified_base 1..5785: mod_base = OTHER; note = Each t is m1f
  source 1..5785: mol_type = other RNA

SEQ ID NO: 15134 - RNA, 5785 nt, synthetic construct; identical to SEQ ID NO: 13537
  modified_base 1..5785: mod_base = OTHER; note = Each t is m1f
  source 1..5785: mol_type = other RNA

SEQ ID NO: 15135 - RNA, 5785 nt, synthetic construct; identical to SEQ ID NO: 13538
  modified_base 1..5785: mod_base = OTHER; note = Each t is m1f
  source 1..5785: mol_type = other RNA

SEQ ID NO: 15136 - RNA, 5785 nt, synthetic construct; identical to SEQ ID NO: 13539
  modified_base 1..5785: mod_base = OTHER; note = Each t is m1f
  source 1..5785: mol_type = other RNA

SEQ ID NO: 15137 - RNA, 5785 nt, synthetic construct; identical to SEQ ID NO: 13540
  modified_base 1..5785: mod_base = OTHER; note = Each t is m1f
  source 1..5785: mol_type = other RNA

SEQ ID NO: 15138 - RNA, 5785 nt, synthetic construct; identical to SEQ ID NO: 13541
  modified_base 1..5785: mod_base = OTHER; note = Each t is m1f
  source 1..5785: mol_type = other RNA

SEQ ID NO: 15139 - RNA, 5785 nt, synthetic construct; identical to SEQ ID NO: 13542
  modified_base 1..5785: mod_base = OTHER; note = Each t is m1f
  source 1..5785: mol_type = other RNA

SEQ ID NO: 15140 - RNA, 5785 nt, synthetic construct; identical to SEQ ID NO: 13543
  modified_base 1..5785: mod_base = OTHER; note = Each t is m1f
  source 1..5785: mol_type = other RNA

SEQ ID NO: 15141 - RNA, 5785 nt, synthetic construct; identical to SEQ ID NO: 13544
  modified_base 1..5785: mod_base = OTHER; note = Each t is m1f
  source 1..5785: mol_type = other RNA

SEQ ID NO: 15142 - RNA, 5785 nt, synthetic construct; identical to SEQ ID NO: 13545
  modified_base 1..5785: mod_base = OTHER; note = Each t is m1f
  source 1..5785: mol_type = other RNA

SEQ ID NO: 15143 - RNA, 5785 nt, synthetic construct; identical to SEQ ID NO: 13546
  modified_base 1..5785: mod_base = OTHER; note = Each t is m1f
  source 1..5785: mol_type = other RNA

SEQ ID NO: 15144 - RNA, 5794 nt, synthetic construct; identical to SEQ ID NO: 13547
  modified_base 1..5794: mod_base = OTHER; note = Each t is m1f
  source 1..5794: mol_type = other RNA

SEQ ID NO: 15145 - RNA, 5785 nt, synthetic construct; identical to SEQ ID NO: 13548
  modified_base 1..5785: mod_base = OTHER; note = Each t is m1f
  source 1..5785: mol_type = other RNA

SEQ ID NO: 15146 - RNA, 5785 nt, synthetic construct; identical to SEQ ID NO: 13549
  modified_base 1..5785: mod_base = OTHER; note = Each t is m1f
  source 1..5785: mol_type = other RNA

SEQ ID NO: 15147 - RNA, 5785 nt, synthetic construct; identical to SEQ ID NO: 13550
  modified_base 1..5785: mod_base = OTHER; note = Each t is m1f
  source 1..5785: mol_type = other RNA

SEQ ID NO: 15148 - RNA, 5785 nt, synthetic construct; identical to SEQ ID NO: 13551
  modified_base 1..5785: mod_base = OTHER; note = Each t is m1f
  source 1..5785: mol_type = other RNA

SEQ ID NO: 15149 - RNA, 5785 nt, synthetic construct; identical to SEQ ID NO: 13552
  modified_base 1..5785: mod_base = OTHER; note = Each t is m1f
  source 1..5785: mol_type = other RNA

SEQ ID NO: 15150 - RNA, 5785 nt, synthetic construct; identical to SEQ ID NO: 13553
  modified_base 1..5785: mod_base = OTHER; note = Each t is m1f
  source 1..5785: mol_type = other RNA

SEQ ID NO: 15151 - RNA, 5785 nt, synthetic construct; identical to SEQ ID NO: 13554
  modified_base 1..5785: mod_base = OTHER; note = Each t is m1f
  source 1..5785: mol_type = other RNA

SEQ ID NO: 15152 - RNA, 5785 nt, synthetic construct; identical to SEQ ID NO: 13555
  modified_base 1..5785: mod_base = OTHER; note = Each t is m1f
  source 1..5785: mol_type = other RNA

SEQ ID NO: 15153 - RNA, 5785 nt, synthetic construct; identical to SEQ ID NO: 13556
  modified_base 1..5785: mod_base = OTHER; note = Each t is m1f
  source 1..5785: mol_type = other RNA

SEQ ID NO: 15154 - RNA, 5785 nt, synthetic construct; identical to SEQ ID NO: 13557
  modified_base 1..5785: mod_base = OTHER; note = Each t is m1f
  source 1..5785: mol_type = other RNA

SEQ ID NO: 15155 - RNA, 5785 nt, synthetic construct; identical to SEQ ID NO: 13558
  modified_base 1..5785: mod_base = OTHER; note = Each t is m1f
  source 1..5785: mol_type = other RNA

SEQ ID NO: 15156 - RNA, 5785 nt, synthetic construct; identical to SEQ ID NO: 13559
  modified_base 1..5785: mod_base = OTHER; note = Each t is m1f
  source 1..5785: mol_type = other RNA

SEQ ID NO: 15157 - RNA, 5785 nt, synthetic construct; identical to SEQ ID NO: 13560
  modified_base 1..5785: mod_base = OTHER; note = Each t is m1f
  source 1..5785: mol_type = other RNA

SEQ ID NO: 15158 - RNA, 5785 nt, synthetic construct; identical to SEQ ID NO: 13561
  modified_base 1..5785: mod_base = OTHER; note = Each t is m1f
  source 1..5785: mol_type = other RNA

SEQ ID NO: 15159 - RNA, 5785 nt, synthetic construct; identical to SEQ ID NO: 13562
  modified_base 1..5785: mod_base = OTHER; note = Each t is m1f
  source 1..5785: mol_type = other RNA

SEQ ID NO: 15160 - RNA, 5785 nt, synthetic construct; identical to SEQ ID NO: 13563
  modified_base 1..5785: mod_base = OTHER; note = Each t is m1f
  source 1..5785: mol_type = other RNA

SEQ ID NO: 15161 - RNA, 5785 nt, synthetic construct; identical to SEQ ID NO: 13564
  modified_base 1..5785: mod_base = OTHER; note = Each t is m1f
  source 1..5785: mol_type = other RNA

SEQ ID NO: 15162 - RNA, 5785 nt, synthetic construct; identical to SEQ ID NO: 13565
  modified_base 1..5785: mod_base = OTHER; note = Each t is m1f
  source 1..5785: mol_type = other RNA

SEQ ID NO: 15163 - RNA, 5785 nt, synthetic construct; identical to SEQ ID NO: 13566
  modified_base 1..5785: mod_base = OTHER; note = Each t is m1f
  source 1..5785: mol_type = other RNA

SEQ ID NO: 15164 - RNA, 5785 nt, synthetic construct; identical to SEQ ID NO: 13567
  modified_base 1..5785: mod_base = OTHER; note = Each t is m1f
  source 1..5785: mol_type = other RNA

SEQ ID NO: 15165 - RNA, 5785 nt, synthetic construct; identical to SEQ ID NO: 13568
  modified_base 1..5785: mod_base = OTHER; note = Each t is m1f
  source 1..5785: mol_type = other RNA

SEQ ID NO: 15166 - RNA, 5785 nt, synthetic construct; identical to SEQ ID NO: 13569
  modified_base 1..5785: mod_base = OTHER; note = Each t is m1f
  source 1..5785: mol_type = other RNA

SEQ ID NO: 15167 - RNA, 5785 nt, synthetic construct; identical to SEQ ID NO: 13570
  modified_base 1..5785: mod_base = OTHER; note = Each t is m1f
  source 1..5785: mol_type = other RNA

SEQ ID NO: 15168 - RNA, 5785 nt, synthetic construct; identical to SEQ ID NO: 13571
  modified_base 1..5785: mod_base = OTHER; note = Each t is m1f
  source 1..5785: mol_type = other RNA

SEQ ID NO: 15169 - RNA, 5785 nt, synthetic construct; identical to SEQ ID NO: 13572
  modified_base 1..5785: mod_base = OTHER; note = Each t is m1f
  source 1..5785: mol_type = other RNA

SEQ ID NO: 15170 - RNA, 5785 nt, synthetic construct; identical to SEQ ID NO: 13573
  modified_base 1..5785: mod_base = OTHER; note = Each t is m1f
  source 1..5785: mol_type = other RNA

SEQ ID NO: 15171 - RNA, 5785 nt, synthetic construct; identical to SEQ ID NO: 13574
  modified_base 1..5785: mod_base = OTHER; note = Each t is m1f
  source 1..5785: mol_type = other RNA

SEQ ID NO: 15172 - RNA, 5785 nt, synthetic construct; identical to SEQ ID NO: 13575
  modified_base 1..5785: mod_base = OTHER; note = Each t is m1f
  source 1..5785: mol_type = other RNA

SEQ ID NO: 15173 - RNA, 5785 nt, synthetic construct; identical to SEQ ID NO: 13576
  modified_base 1..5785: mod_base = OTHER; note = Each t is m1f
  source 1..5785: mol_type = other RNA

SEQ ID NO: 15174 - RNA, 5785 nt, synthetic construct; identical to SEQ ID NO: 13577
  modified_base 1..5785: mod_base = OTHER; note = Each t is m1f
  source 1..5785: mol_type = other RNA

SEQ ID NO: 15175 - RNA, 5785 nt, synthetic construct; identical to SEQ ID NO: 13578
  modified_base 1..5785: mod_base = OTHER; note = Each t is m1f
  source 1..5785: mol_type = other RNA

SEQ ID NO: 15176 - RNA, 5785 nt, synthetic construct; identical to SEQ ID NO: 13579
  modified_base 1..5785: mod_base = OTHER; note = Each t is m1f
  source 1..5785: mol_type = other RNA

SEQ ID NO: 15177 - RNA, 5785 nt, synthetic construct; identical to SEQ ID NO: 13580
  modified_base 1..5785: mod_base = OTHER; note = Each t is m1f
  source 1..5785: mol_type = other RNA

SEQ ID NO: 15178 - RNA, 5785 nt, synthetic construct; identical to SEQ ID NO: 13581
  modified_base 1..5785: mod_base = OTHER; note = Each t is m1f
  source 1..5785: mol_type = other RNA

SEQ ID NO: 15179 - RNA, 5785 nt, synthetic construct; identical to SEQ ID NO: 13582
  modified_base 1..5785: mod_base = OTHER; note = Each t is m1f
  source 1..5785: mol_type = other RNA

SEQ ID NO: 15180 - RNA, 5785 nt, synthetic construct; identical to SEQ ID NO: 13583
  modified_base 1..5785: mod_base = OTHER; note = Each t is m1f
  source 1..5785: mol_type = other RNA

SEQ ID NO: 15181 - RNA, 5785 nt, synthetic construct; identical to SEQ ID NO: 13584
  modified_base 1..5785: mod_base = OTHER; note = Each t is m1f
  source 1..5785: mol_type = other RNA

SEQ ID NO: 15182 - RNA, 5785 nt, synthetic construct; identical to SEQ ID NO: 13585
  modified_base 1..5785: mod_base = OTHER; note = Each t is m1f
  source 1..5785: mol_type = other RNA

SEQ ID NO: 15183 - RNA, 5785 nt, synthetic construct; identical to SEQ ID NO: 13586
  modified_base 1..5785: mod_base = OTHER; note = Each t is m1f
  source 1..5785: mol_type = other RNA

SEQ ID NO: 15184 - RNA, 5785 nt, synthetic construct; identical to SEQ ID NO: 13587
  modified_base 1..5785: mod_base = OTHER; note = Each t is m1f
  source 1..5785: mol_type = other RNA

SEQ ID NO: 15185 - RNA, 5785 nt, synthetic construct; identical to SEQ ID NO: 13588
  modified_base 1..5785: mod_base = OTHER; note = Each t is m1f
  source 1..5785: mol_type = other RNA

SEQ ID NO: 15186 - RNA, 5785 nt, synthetic construct; identical to SEQ ID NO: 13589
  modified_base 1..5785: mod_base = OTHER; note = Each t is m1f
  source 1..5785: mol_type = other RNA

SEQ ID NO: 15187 - RNA, 5785 nt, synthetic construct; identical to SEQ ID NO: 13590
  modified_base 1..5785: mod_base = OTHER; note = Each t is m1f
  source 1..5785: mol_type = other RNA

SEQ ID NO: 15188 - RNA, 5785 nt, synthetic construct; identical to SEQ ID NO: 13591
  modified_base 1..5785: mod_base = OTHER; note = Each t is m1f
  source 1..5785: mol_type = other RNA

SEQ ID NO: 15189 - RNA, 5785 nt, synthetic construct; identical to SEQ ID NO: 13592
  modified_base 1..5785: mod_base = OTHER; note = Each t is m1f
  source 1..5785: mol_type = other RNA

SEQ ID NO: 15190 - RNA, 5785 nt, synthetic construct; identical to SEQ ID NO: 13593
  modified_base 1..5785: mod_base = OTHER; note = Each t is m1f
  source 1..5785: mol_type = other RNA

SEQ ID NO: 15191 - RNA, 5785 nt, synthetic construct; identical to SEQ ID NO: 13594
  modified_base 1..5785: mod_base = OTHER; note = Each t is m1f
  source 1..5785: mol_type = other RNA

SEQ ID NO: 15192 - RNA, 5785 nt, synthetic construct; identical to SEQ ID NO: 13595
  modified_base 1..5785: mod_base = OTHER; note = Each t is m1f
  source 1..5785: mol_type = other RNA

SEQ ID NO: 15193 - RNA, 5785 nt, synthetic construct; identical to SEQ ID NO: 13596
  modified_base 1..5785: mod_base = OTHER; note = Each t is m1f
  source 1..5785: mol_type = other RNA

SEQ ID NO: 15194 - RNA, 5785 nt, synthetic construct; identical to SEQ ID NO: 13597
  modified_base 1..5785: mod_base = OTHER; note = Each t is m1f
  source 1..5785: mol_type = other RNA

SEQ ID NO: 15195 - RNA, 5785 nt, synthetic construct; identical to SEQ ID NO: 13598
  modified_base 1..5785: mod_base = OTHER; note = Each t is m1f
  source 1..5785: mol_type = other RNA

SEQ ID NO: 15196 - RNA, 5785 nt, synthetic construct; identical to SEQ ID NO: 13599
  modified_base 1..5785: mod_base = OTHER; note = Each t is m1f
  source 1..5785: mol_type = other RNA

SEQ ID NO: 15197 - RNA, 5785 nt, synthetic construct; identical to SEQ ID NO: 13600
  modified_base 1..5785: mod_base = OTHER; note = Each t is m1f
  source 1..5785: mol_type = other RNA

SEQ ID NO: 15198 - RNA, 5785 nt, synthetic construct; identical to SEQ ID NO: 13601
  modified_base 1..5785: mod_base = OTHER; note = Each t is m1f
  source 1..5785: mol_type = other RNA

SEQ ID NO: 15199 - RNA, 5785 nt, synthetic construct; identical to SEQ ID NO: 13602
  modified_base 1..5785: mod_base = OTHER; note = Each t is m1f
  source 1..5785: mol_type = other RNA

SEQ ID NO: 15200 - RNA, 5785 nt, synthetic construct; identical to SEQ ID NO: 13603
  modified_base 1..5785: mod_base = OTHER; note = Each t is m1f
  source 1..5785: mol_type = other RNA

SEQ ID NO: 15201 - RNA, 5785 nt, synthetic construct; identical to SEQ ID NO: 13604
  modified_base 1..5785: mod_base = OTHER; note = Each t is m1f
  source 1..5785: mol_type = other RNA

SEQ ID NO: 15202 - RNA, 5785 nt, synthetic construct; identical to SEQ ID NO: 13605
  modified_base 1..5785: mod_base = OTHER; note = Each t is m1f
  source 1..5785: mol_type = other RNA

SEQ ID NO: 15203 - RNA, 5785 nt, synthetic construct; identical to SEQ ID NO: 13606
  modified_base 1..5785: mod_base = OTHER; note = Each t is m1f
  source 1..5785: mol_type = other RNA

SEQ ID NO: 15204 - RNA, 5785 nt, synthetic construct; identical to SEQ ID NO: 13607
  modified_base 1..5785: mod_base = OTHER; note = Each t is m1f
  source 1..5785: mol_type = other RNA

SEQ ID NO: 15205 - RNA, 5785 nt, synthetic construct; identical to SEQ ID NO: 13608
  modified_base 1..5785: mod_base = OTHER; note = Each t is m1f
  source 1..5785: mol_type = other RNA

SEQ ID NO: 15206 - RNA, 5785 nt, synthetic construct; identical to SEQ ID NO: 13609
  modified_base 1..5785: mod_base = OTHER; note = Each t is m1f
  source 1..5785: mol_type = other RNA

SEQ ID NO: 15207 - RNA, 5785 nt, synthetic construct; identical to SEQ ID NO: 13610
  modified_base 1..5785: mod_base = OTHER; note = Each t is m1f
  source 1..5785: mol_type = other RNA

SEQ ID NO: 15208 - RNA, 5785 nt, synthetic construct; identical to SEQ ID NO: 13611
  modified_base 1..5785: mod_base = OTHER; note = Each t is m1f
  source 1..5785: mol_type = other RNA

SEQ ID NO: 15209 - RNA, 5785 nt, synthetic construct; identical to SEQ ID NO: 13612
  modified_base 1..5785: mod_base = OTHER; note = Each t is m1f
  source 1..5785: mol_type = other RNA

SEQ ID NO: 15210 - RNA, 5785 nt, synthetic construct; identical to SEQ ID NO: 13613
  modified_base 1..5785: mod_base = OTHER; note = Each t is m1f
  source 1..5785: mol_type = other RNA

SEQ ID NO: 15211 - RNA, 5785 nt, synthetic construct; identical to SEQ ID NO: 13614
  modified_base 1..5785: mod_base = OTHER; note = Each t is m1f
  source 1..5785: mol_type = other RNA

SEQ ID NO: 15212 - RNA, 5785 nt, synthetic construct; identical to SEQ ID NO: 13615
  modified_base 1..5785: mod_base = OTHER; note = Each t is m1f
  source 1..5785: mol_type = other RNA

SEQ ID NO: 15213 - RNA, 5785 nt, synthetic construct; identical to SEQ ID NO: 13616
  modified_base 1..5785: mod_base = OTHER; note = Each t is m1f
  source 1..5785: mol_type = other RNA

SEQ ID NO: 15214 - RNA, 5785 nt, synthetic construct; identical to SEQ ID NO: 13617
  modified_base 1..5785: mod_base = OTHER; note = Each t is m1f
  source 1..5785: mol_type = other RNA

SEQ ID NO: 15215 - RNA, 5785 nt, synthetic construct; identical to SEQ ID NO: 13618
  modified_base 1..5785: mod_base = OTHER; note = Each t is m1f
  source 1..5785: mol_type = other RNA

SEQ ID NO: 15216 - RNA, 5785 nt, synthetic construct; identical to SEQ ID NO: 13619
  modified_base 1..5785: mod_base = OTHER; note = Each t is m1f
  source 1..5785: mol_type = other RNA

SEQ ID NO: 15217 - RNA, 5785 nt, synthetic construct; identical to SEQ ID NO: 13620
  modified_base 1..5785: mod_base = OTHER; note = Each t is m1f
  source 1..5785: mol_type = other RNA

SEQ ID NO: 15218 - RNA, 5785 nt, synthetic construct; identical to SEQ ID NO: 13621
  modified_base 1..5785: mod_base = OTHER; note = Each t is m1f
  source 1..5785: mol_type = other RNA

SEQ ID NO: 15219 - RNA, 5785 nt, synthetic construct; identical to SEQ ID NO: 13622
  modified_base 1..5785: mod_base = OTHER; note = Each t is m1f
  source 1..5785: mol_type = other RNA

SEQ ID NO: 15220 - RNA, 5785 nt, synthetic construct; identical to SEQ ID NO: 13623
  modified_base 1..5785: mod_base = OTHER; note = Each t is m1f
  source 1..5785: mol_type = other RNA

SEQ ID NO: 15221 - RNA, 5785 nt, synthetic construct; identical to SEQ ID NO: 13624
  modified_base 1..5785: mod_base = OTHER; note = Each t is m1f
  source 1..5785: mol_type = other RNA

SEQ ID NO: 15222 - RNA, 5785 nt, synthetic construct; identical to SEQ ID NO: 13625
  modified_base 1..5785: mod_base = OTHER; note = Each t is m1f
  source 1..5785: mol_type = other RNA

SEQ ID NO: 15223 - RNA, 5785 nt, synthetic construct; identical to SEQ ID NO: 13626
  modified_base 1..5785: mod_base = OTHER; note = Each t is m1f
  source 1..5785: mol_type = other RNA

SEQ ID NO: 15224 - RNA, 5785 nt, synthetic construct; identical to SEQ ID NO: 13627
  modified_base 1..5785: mod_base = OTHER; note = Each t is m1f
  source 1..5785: mol_type = other RNA

SEQ ID NO: 15225 - RNA, 5785 nt, synthetic construct; identical to SEQ ID NO: 13628
  modified_base 1..5785: mod_base = OTHER; note = Each t is m1f
  source 1..5785: mol_type = other RNA

SEQ ID NO: 15226 - RNA, 5785 nt, synthetic construct; identical to SEQ ID NO: 13629
  modified_base 1..5785: mod_base = OTHER; note = Each t is m1f
  source 1..5785: mol_type = other RNA

SEQ ID NO: 15227 - RNA, 5785 nt, synthetic construct; identical to SEQ ID NO: 13630
  modified_base 1..5785: mod_base = OTHER; note = Each t is m1f
  source 1..5785: mol_type = other RNA

SEQ ID NO: 15228 - RNA, 5785 nt, synthetic construct; identical to SEQ ID NO: 13631
  modified_base 1..5785: mod_base = OTHER; note = Each t is m1f
  source 1..5785: mol_type = other RNA

SEQ ID NO: 15229 - RNA, 5785 nt, synthetic construct; identical to SEQ ID NO: 13632
  modified_base 1..5785: mod_base = OTHER; note = Each t is m1f
  source 1..5785: mol_type = other RNA

SEQ ID NO: 15230 - RNA, 5785 nt, synthetic construct; identical to SEQ ID NO: 13633
  modified_base 1..5785: mod_base = OTHER; note = Each t is m1f
  source 1..5785: mol_type = other RNA

SEQ ID NO: 15231 - RNA, 5785 nt, synthetic construct; identical to SEQ ID NO: 13634
  modified_base 1..5785: mod_base = OTHER; note = Each t is m1f
  source 1..5785: mol_type = other RNA

SEQ ID NO: 15232 - RNA, 5785 nt, synthetic construct; identical to SEQ ID NO: 13635
  modified_base 1..5785: mod_base = OTHER; note = Each t is m1f
  source 1..5785: mol_type = other RNA

SEQ ID NO: 15233 - RNA, 5785 nt, synthetic construct; identical to SEQ ID NO: 13636
  modified_base 1..5785: mod_base = OTHER; note = Each t is m1f
  source 1..5785: mol_type = other RNA

SEQ ID NO: 15234 - RNA, 5785 nt, synthetic construct; identical to SEQ ID NO: 13637
  modified_base 1..5785: mod_base = OTHER; note = Each t is m1f
  source 1..5785: mol_type = other RNA

SEQ ID NO: 15235 - RNA, 5785 nt, synthetic construct; identical to SEQ ID NO: 13638
  modified_base 1..5785: mod_base = OTHER; note = Each t is m1f
  source 1..5785: mol_type = other RNA

SEQ ID NO: 15236 - RNA, 5785 nt, synthetic construct; identical to SEQ ID NO: 13639
  modified_base 1..5785: mod_base = OTHER; note = Each t is m1f
  source 1..5785: mol_type = other RNA

SEQ ID NO: 15237 - RNA, 5785 nt, synthetic construct; identical to SEQ ID NO: 13640
  modified_base 1..5785: mod_base = OTHER; note = Each t is m1f
  source 1..5785: mol_type = other RNA

SEQ ID NO: 15238 - RNA, 5785 nt, synthetic construct; identical to SEQ ID NO: 13641
  modified_base 1..5785: mod_base = OTHER; note = Each t is m1f
  source 1..5785: mol_type = other RNA

SEQ ID NO: 15239 - RNA, 5785 nt, synthetic construct; identical to SEQ ID NO: 13642
  modified_base 1..5785: mod_base = OTHER; note = Each t is m1f
  source 1..5785: mol_type = other RNA

SEQ ID NO: 15240 - RNA, 5785 nt, synthetic construct; identical to SEQ ID NO: 13643
  modified_base 1..5785: mod_base = OTHER; note = Each t is m1f
  source 1..5785: mol_type = other RNA

SEQ ID NO: 15241 - RNA, 5785 nt, synthetic construct; identical to SEQ ID NO: 13644
  modified_base 1..5785: mod_base = OTHER; note = Each t is m1f
  source 1..5785: mol_type = other RNA

SEQ ID NO: 15242 - RNA, 5785 nt, synthetic construct; identical to SEQ ID NO: 13645
  modified_base 1..5785: mod_base = OTHER; note = Each t is m1f
  source 1..5785: mol_type = other RNA

SEQ ID NO: 15243 - RNA, 5785 nt, synthetic construct; identical to SEQ ID NO: 13646
  modified_base 1..5785: mod_base = OTHER; note = Each t is m1f
  source 1..5785: mol_type = other RNA

SEQ ID NO: 15244 - RNA, 5785 nt, synthetic construct; identical to SEQ ID NO: 13647
  modified_base 1..5785: mod_base = OTHER; note = Each t is m1f
  source 1..5785: mol_type = other RNA

SEQ ID NO: 15245 - RNA, 5785 nt, synthetic construct; identical to SEQ ID NO: 13648
  modified_base 1..5785: mod_base = OTHER; note = Each t is m1f
  source 1..5785: mol_type = other RNA

SEQ ID NO: 15246 - RNA, 5785 nt, synthetic construct; identical to SEQ ID NO: 13649
  modified_base 1..5785: mod_base = OTHER; note = Each t is m1f
  source 1..5785: mol_type = other RNA

SEQ ID NO: 15247 - RNA, 5785 nt, synthetic construct; identical to SEQ ID NO: 13650
  modified_base 1..5785: mod_base = OTHER; note = Each t is m1f
  source 1..5785: mol_type = other RNA

SEQ ID NO: 15248 - RNA, 5785 nt, synthetic construct; identical to SEQ ID NO: 13651
  modified_base 1..5785: mod_base = OTHER; note = Each t is m1f
  source 1..5785: mol_type = other RNA

SEQ ID NO: 15249 - RNA, 5785 nt, synthetic construct; identical to SEQ ID NO: 13652
  modified_base 1..5785: mod_base = OTHER; note = Each t is m1f
  source 1..5785: mol_type = other RNA

SEQ ID NO: 15250 - RNA, 5785 nt, synthetic construct; identical to SEQ ID NO: 13653
  modified_base 1..5785: mod_base = OTHER; note = Each t is m1f
  source 1..5785: mol_type = other RNA

SEQ ID NO: 15251 - RNA, 5785 nt, synthetic construct; identical to SEQ ID NO: 13654
  modified_base 1..5785: mod_base = OTHER; note = Each t is m1f
  source 1..5785: mol_type = other RNA

SEQ ID NO: 15252 - RNA, 5785 nt, synthetic construct; identical to SEQ ID NO: 13655
  modified_base 1..5785: mod_base = OTHER; note = Each t is m1f
  source 1..5785: mol_type = other RNA

SEQ ID NO: 15253 - RNA, 5785 nt, synthetic construct; identical to SEQ ID NO: 13656
  modified_base 1..5785: mod_base = OTHER; note = Each t is m1f
  source 1..5785: mol_type = other RNA

SEQ ID NO: 15254 - RNA, 5785 nt, synthetic construct; identical to SEQ ID NO: 13657
  modified_base 1..5785: mod_base = OTHER; note = Each t is m1f
  source 1..5785: mol_type = other RNA

SEQ ID NO: 15255 - RNA, 5785 nt, synthetic construct; identical to SEQ ID NO: 13658
  modified_base 1..5785: mod_base = OTHER; note = Each t is m1f
  source 1..5785: mol_type = other RNA

SEQ ID NO: 15256 - RNA, 5785 nt, synthetic construct; identical to SEQ ID NO: 13659
  modified_base 1..5785: mod_base = OTHER; note = Each t is m1f
  source 1..5785: mol_type = other RNA

SEQ ID NO: 15257 - RNA, 5785 nt, synthetic construct; identical to SEQ ID NO: 13660
  modified_base 1..5785: mod_base = OTHER; note = Each t is m1f
  source 1..5785: mol_type = other RNA

SEQ ID NO: 15258 - RNA, 5785 nt, synthetic construct; identical to SEQ ID NO: 13661
  modified_base 1..5785: mod_base = OTHER; note = Each t is m1f
  source 1..5785: mol_type = other RNA

SEQ ID NO: 15259 - RNA, 5785 nt, synthetic construct; identical to SEQ ID NO: 13662
  modified_base 1..5785: mod_base = OTHER; note = Each t is m1f
  source 1..5785: mol_type = other RNA

SEQ ID NO: 15260 - RNA, 5785 nt, synthetic construct; identical to SEQ ID NO: 13663
  modified_base 1..5785: mod_base = OTHER; note = Each t is m1f
  source 1..5785: mol_type = other RNA

SEQ ID NO: 15261 - RNA, 5785 nt, synthetic construct; identical to SEQ ID NO: 13664
  modified_base 1..5785: mod_base = OTHER; note = Each t is m1f
  source 1..5785: mol_type = other RNA

SEQ ID NO: 15262 - RNA, 5785 nt, synthetic construct; identical to SEQ ID NO: 13665
  modified_base 1..5785: mod_base = OTHER; note = Each t is m1f
  source 1..5785: mol_type = other RNA

SEQ ID NO: 15263 - RNA, 5785 nt, synthetic construct; identical to SEQ ID NO: 13666
  modified_base 1..5785: mod_base = OTHER; note = Each t is m1f
  source 1..5785: mol_type = other RNA

SEQ ID NO: 15264 - RNA, 5782 nt, synthetic construct; identical to SEQ ID NO: 13667
  modified_base 1..5782: mod_base = OTHER; note = Each t is m1f
  source 1..5782: mol_type = other RNA

SEQ ID NO: 15265 - RNA, 5785 nt, synthetic construct; identical to SEQ ID NO: 13668
  modified_base 1..5785: mod_base = OTHER; note = Each t is m1f
  source 1..5785: mol_type = other RNA

SEQ ID NO: 15266 - RNA, 5785 nt, synthetic construct; identical to SEQ ID NO: 13669
  modified_base 1..5785: mod_base = OTHER; note = Each t is m1f
  source 1..5785: mol_type = other RNA

SEQ ID NO: 15267 - RNA, 5785 nt, synthetic construct; identical to SEQ ID NO: 13670
  modified_base 1..5785: mod_base = OTHER; note = Each t is m1f
  source 1..5785: mol_type = other RNA

SEQ ID NO: 15268 - RNA, 5785 nt, synthetic construct; identical to SEQ ID NO: 13671
  modified_base 1..5785: mod_base = OTHER; note = Each t is m1f
  source 1..5785: mol_type = other RNA

SEQ ID NO: 15269 - RNA, 5785 nt, synthetic construct; identical to SEQ ID NO: 13672
  modified_base 1..5785: mod_base = OTHER; note = Each t is m1f
  source 1..5785: mol_type = other RNA

SEQ ID NO: 15270 - RNA, 5785 nt, synthetic construct; identical to SEQ ID NO: 13673
  modified_base 1..5785: mod_base = OTHER; note = Each t is m1f
  source 1..5785: mol_type = other RNA

SEQ ID NO: 15271 - RNA, 5785 nt, synthetic construct; identical to SEQ ID NO: 13674
  modified_base 1..5785: mod_base = OTHER; note = Each t is m1f
  source 1..5785: mol_type = other RNA

SEQ ID NO: 15272 - RNA, 5785 nt, synthetic construct; identical to SEQ ID NO: 13675
  modified_base 1..5785: mod_base = OTHER; note = Each t is m1f
  source 1..5785: mol_type = other RNA

SEQ ID NO: 15273 - RNA, 5785 nt, synthetic construct; identical to SEQ ID NO: 13676
  modified_base 1..5785: mod_base = OTHER; note = Each t is m1f
  source 1..5785: mol_type = other RNA

SEQ ID NO: 15274 - RNA, 5785 nt, synthetic construct; identical to SEQ ID NO: 13677
  modified_base 1..5785: mod_base = OTHER; note = Each t is m1f
  source 1..5785: mol_type = other RNA

SEQ ID NO: 15275 - RNA, 5785 nt, synthetic construct; identical to SEQ ID NO: 13678
  modified_base 1..5785: mod_base = OTHER; note = Each t is m1f
  source 1..5785: mol_type = other RNA

SEQ ID NO: 15276 - RNA, 5785 nt, synthetic construct; identical to SEQ ID NO: 13679
  modified_base 1..5785: mod_base = OTHER; note = Each t is m1f
  source 1..5785: mol_type = other RNA

SEQ ID NO: 15277 - RNA, 5785 nt, synthetic construct; identical to SEQ ID NO: 13680
  modified_base 1..5785: mod_base = OTHER; note = Each t is m1f
  source 1..5785: mol_type = other RNA

SEQ ID NO: 15278 - RNA, 5785 nt, synthetic construct; identical to SEQ ID NO: 13681
  modified_base 1..5785: mod_base = OTHER; note = Each t is m1f
  source 1..5785: mol_type = other RNA

SEQ ID NO: 15279 - RNA, 5785 nt, synthetic construct; identical to SEQ ID NO: 13682
  modified_base 1..5785: mod_base = OTHER; note = Each t is m1f
  source 1..5785: mol_type = other RNA

SEQ ID NO: 15280 - RNA, 5785 nt, synthetic construct; identical to SEQ ID NO: 13683
  modified_base 1..5785: mod_base = OTHER; note = Each t is m1f
  source 1..5785: mol_type = other RNA

SEQ ID NO: 15281 - RNA, 5785 nt, synthetic construct; identical to SEQ ID NO: 13684
  modified_base 1..5785: mod_base = OTHER; note = Each t is m1f
  source 1..5785: mol_type = other RNA

SEQ ID NO: 15282 - RNA, 5785 nt, synthetic construct; identical to SEQ ID NO: 13685
  modified_base 1..5785: mod_base = OTHER; note = Each t is m1f
  source 1..5785: mol_type = other RNA

SEQ ID NO: 15283 - RNA, 5785 nt, synthetic construct; identical to SEQ ID NO: 13686
  modified_base 1..5785: mod_base = OTHER; note = Each t is m1f
  source 1..5785: mol_type = other RNA

SEQ ID NO: 15284 - RNA, 5785 nt, synthetic construct; identical to SEQ ID NO: 13687
  modified_base 1..5785: mod_base = OTHER; note = Each t is m1f
  source 1..5785: mol_type = other RNA

SEQ ID NO: 15285 - RNA, 5785 nt, synthetic construct; identical to SEQ ID NO: 13688
  modified_base 1..5785: mod_base = OTHER; note = Each t is m1f
  source 1..5785: mol_type = other RNA

SEQ ID NO: 15286 - RNA, 5785 nt, synthetic construct; identical to SEQ ID NO: 13689
  modified_base 1..5785: mod_base = OTHER; note = Each t is m1f
  source 1..5785: mol_type = other RNA

SEQ ID NO: 15287 - RNA, 5785 nt, synthetic construct; identical to SEQ ID NO: 13690
  modified_base 1..5785: mod_base = OTHER; note = Each t is m1f
  source 1..5785: mol_type = other RNA

SEQ ID NO: 15288 - RNA, 5785 nt, synthetic construct; identical to SEQ ID NO: 13691
  modified_base 1..5785: mod_base = OTHER; note = Each t is m1f
  source 1..5785: mol_type = other RNA

SEQ ID NO: 15289 - RNA, 5785 nt, synthetic construct; identical to SEQ ID NO: 13692
  modified_base 1..5785: mod_base = OTHER; note = Each t is m1f
  source 1..5785: mol_type = other RNA

SEQ ID NO: 15290 - RNA, 5803 nt, synthetic construct; identical to SEQ ID NO: 13693
  modified_base 1..5803: mod_base = OTHER; note = Each t is m1f
  source 1..5803: mol_type = other RNA

SEQ ID NO: 15291 - RNA, 5794 nt, synthetic construct; identical to SEQ ID NO: 13694
  modified_base 1..5794: mod_base = OTHER; note = Each t is m1f
  source 1..5794: mol_type = other RNA

SEQ ID NO: 15292 - RNA, 5785 nt, synthetic construct; identical to SEQ ID NO: 13695
  modified_base 1..5785: mod_base = OTHER; note = Each t is m1f
  source 1..5785: mol_type = other RNA

SEQ ID NO: 15293 - RNA, 5785 nt, synthetic construct; identical to SEQ ID NO: 13696
  modified_base 1..5785: mod_base = OTHER; note = Each t is m1f
  source 1..5785: mol_type = other RNA

SEQ ID NO: 15294 - RNA, 5785 nt, synthetic construct; identical to SEQ ID NO: 13697
  modified_base 1..5785: mod_base = OTHER; note = Each t is m1f
  source 1..5785: mol_type = other RNA

SEQ ID NO: 15295 - RNA, 5815 nt, synthetic construct; identical to SEQ ID NO: 13698
  modified_base 1..5815: mod_base = OTHER; note = Each t is m1f
  source 1..5815: mol_type = other RNA

SEQ ID NO: 15296 - RNA, 5833 nt, synthetic construct; identical to SEQ ID NO: 13699
  modified_base 1..5833: mod_base = OTHER; note = Each t is m1f
  source 1..5833: mol_type = other RNA

SEQ ID NO: 15297 - RNA, 9485 nt, synthetic construct
  source 1..9485: mol_type = other RNA
aggaaataagagagaaaagaagagtaagaagaaatataagagccaccatggcccctaagaagaagcgtaaagtgagccggatggaacgcctcgtctacgaggtgcggcagaagtgcagaaacatcgaggacatctgcatctcctgcggatctctgaacgtgaccctggagcacccactgttcatcggcggcatgtgccagaactgtaaaaactgttttctggagtgtgcctatcaatacgacgatgacggctaccagagctactgcaccatctgttgcggcggaagagaggtgctgatgtgtggaaataacaactgctgccggtgcttctgcgtggaatgcgtggacctgctggtgggccccggcgccgcccaggccgctattaaggaagatccttggaactgctacatgtgcggccacaagggcacatacggcctgctgagacggagagaggactggcctagcagactgcagatgttcttcgccaataaccacgaccaggagttcgacccccctaaggtgtaccctcccgtccccgccgagaagagaaagcccatccgggtcctgagcctgttcgatggcatcgccaccggtctgctggtgctgaaggacctgggcatccaggtggataggtacattgcctccgaggtgtgcgaggactccatcaccgtgggaatggtgcgtcatcagggcaagatcatgtacgtgggcgacgtgcggagcgtgacacagaagcatatccaggagtggggccctttcgacctggtgatcggcggcagcccttgcaatgacctgagcatcgtgaacccagcccggaagggcctgtacgagggaaccggcagactgttcttcgagttttacagactgctgcacgacgcccggcctaaggaaggcgacgaccggcccttcttttggctgttcgagaatgtggtggccatgggagtcagcgacaagcgggatattagccggttcctggagagcaaccccgtgatgatcgatgccaaggaagtgagcgccgcccaccgggccagatacttctggggcaatctgcctggcatgaacagacccctggccagcaccgtgaacgacaagctggagctgcaggagtgcctggagcacggccggatcgccaagttcagcaaggtgagaaccatcaccacccgaagcaacagcatcaaacaaggcaaggaccagcactttcctgtgttcatgaacgagaaggaggacatcctgtggtgtaccgagatggagagagtgttcgggttcccagtccactacacagatgtcagcaacatgtctagactggccagacagagactgctgggaagaagctggtccgtccctgtgatcagacacctgttcgcccctctgaaggagtacttcgcctgcgtgagcagcggcaacagcaacgccaacagccggggccccagcttctctagcggcctggtgccactgtccctgagagggagccacatgggccccatggagatctacaaaaccgtgagcgcctggaagcggcagcctgtgcgcgtgctgagcctgtttcggaatatcgataaagtcctgaaaagcctgggattcctggagagcggctctggctccggcggtggcaccctgaagtacgtggaggatgtgacaaacgtggtcagacgggatgtggagaagtggggccccttcgatctggtgtacggcagcacccaacccctgggcagctcttgtgaccggtgccctggctggtacatgtttcagttccaccggatcctgcagtacgccctgccgagacaggagtcccagcggccattcttttggattttcatggacaacttgctgctgaccgaggatgaccaggaaactaccactcggttcctgcagaccgaagccgtgaccctgcaggacgtgagaggccgggactaccagaacgccatgcgggtgtggtccaacatccctggactgaaaagcaagcacgcacctctgacccctaaagaagaggagtacctgcaggcccaggtgcggagcagaagcaagctggacgcccctaaggtggatctgctggtgaagaattgcctcctgcccctgagagagtacttcaagtatttcagccagaatagtctgcccctgggaggcagcggcggcggcgccctggtgacatttgaggacgtcgccgtgcggttcacccaggaggaatgggctctgctggatccttctcagaaaatcctgtaccgggacgtgatgagagagacataccggaatctgacctccgtgggcatcaactgggaatgttgggaccttgaagcctgcttcagaagcctgggaagaaacctgagagtgcaggtggtgaagagaaagtgcgagctgaccaacagcggcccctgcgccgagggcggcccaagcagcggcgcccctcctcccagcggcggcagcccagccggctccccaacctctaccgaggagggcacctctgagtccgccacccccgagagcggccctggcacctccaccgagcccagcgagggcagcgcacccggcagccctgccggcagccccacctccacagaggagggaaccagcaccgagcccagcgaaggcagcgccccaggcaccagcaccgagcctagtgagcaggagattaaacggatcaacaagatcagaagaagacttgtgaaagacagcaacaccaagaaggccggcaagacaggccccatgaaaaccctgctggttagagtgatgacacccgatctgagagagcggctggaaaacctgagaaagaagcctgaaaatatcccccagcccatcagcaatacatctagagccaacctgaataagctgctgaccgattacaccgaaatgaagaaggcgatcctgcatgtgtactgggaagagttccagaaggaccctgtgggcctgatgagccgggtggcccagcctgccagcaagaagatcgatcagaacaagctgaaacctgagatggacgagaagggcaacctgaccaccgccggctttgcctgctctcagtgtggccagcccctgttcgtgtacaagctggagcaggtgtctgagaagggcaaggcttacaccaactacttcggacggtgcaatgtggccgagcacgaaaagctgatcctgctggcccagctgaagcccgagaaggatagcgacgaagccgtgacatatagcctgggaaagtttgggcagagggccctggatttctacagcattcatgtgaccaaggagtccacccaccccgtgaagcccctggcccagatcgccggaaacagatacgcctccggacctgtgggaaaggccctgagcgacgcatgtatgggcacaatcgcctccttcctgtctaagtaccaggacatcatcatcgaacaccagaaggtggtgaagggcaaccagaagagactggagagcctgcgggagctggccggcaaggaaaacctggaataccctagcgtgaccctgccacctcagcctcacaccaaggagggcgttgatgcctacaacgaagtgatcgcccgggtgcgaatgtgggtgaacctgaacctgtggcagaagctgaagctaagcagagatgatgccaagcctctgctgagactgaagggattcccttcctttcctctggtcgagagacaggccaacgaagtggactggtgggacatggtgtgtaacgtgaagaagctgatcaacgagaaaaaggaggatggcaaggtgttttggcagaatctggctggctacaagagacaggaagccctgagaccatacctgagcagcgaggaagatcggaagaagggaaagaaattcgctcggtaccagctgggcgacctgctgctgcacctggaaaagaagcacggcgaggactggggaaaggtgtacgacgaggcctgggagcggattgacaagaaagtggaaggcctgagcaagcacatcaagctggaagaggaacggagaagcgaggacgcccagagcaaggccgccctgaccgactggctgcgggctaaggccagcttcgtgatcgagggcctgaaggaggccgacaaggacgagttctgcagatgcgagctgaagctgcagaagtggtacggggacctgcggggaaagcccttcgccatcgaagccgagaacagcatcctggacatcagcggcttcagcaagcagtacaactgtgccttcatctggcagaaggacggcgtgaagaagctgaacctgtacctgatcatcaactacttcaagggcggcaagctgcggttcaagaagatcaaacctgaagccttcgaagccaacagattctacaccgtgatcaacaaaaagagcggcgagatcgtgcccatggaggtgaacttcaacttcgacgaccccaacctgatcatcctgcctctggcctttggcaagagacagggcagagaattcatctggaacgacctgctgtccctggaaaccggcagcctgaagctggccaacggaagagtgatcgagaagacactgtacaacagaagaacccggcaggatgagcctgccctgttcgtggccctgaccttcgagcggcgggaggtcctggactcctccaatatcaaaccaatgaacctgatcggcgtggcaagaggcgaaaacatccccgccgtgatcgccctgaccgaccccgagggctgcccactgagccggtttaaggatagcctgggaaacccaacccacatcctgagaatcggcgagagctataaggagaagcagcggaccatccaggccaagaaggaggtggagcagcggagagccggcggctacagccggaagtacgccagcaaagccaagaatctggcagacgatatggtgagaaacaccgctagagatctgctgtactacgccgtgacccaggatgccatgctgatcttcgccaacctgagccggggcttcggccggcagggcaagcggaccttcatggccgagagacagtacacacggatggaggactggctgaccgccaagctggcctacgagggcctgagcaagacctacctgtccaagacactggcccagtacacctccaagacatgcagcaactgtgggtttaccatcaccagcgccgactacgacagggtgctggagaagctgaagaagacagcaacaggctggatgaccacaattaacggcaaggagctgaaggtggagggccagattacctactacaacagatacaagagacagaacgtagtcaaggacctgtccgtcgagctggatagactgagcgaagaatctgtgaacaacgacatctcctcctggacaaagggcagaagcggagaagctctgagcctcctgaagaaaagattctcccatagacccgtgcaggagaagttcgtgtgcctgaactgcggcttcgagacacacgcagccgagcaagccgccctgaacatcgccagatcctggctgttcctgcggagccaggagtacaagaaataccagacaaacaagacaaccggcaacaccgataagagagccttcgtcgagacctggcagtccttttaccggaagaagcttaaggaggtgtggaaacctgccgtgcggtctggcggatctggcggaggctccagccagagccccctgaccttcggcgacgtggccgtggagttcagcggcgaggagtgggcctggctggacagcgcccagaggagcctgcacaggagcgtgatgctggagaactacaggaacctggccagcctgggcctgtgcctgagcaagcccgagatgatcagcagcctggagcagaggaaggagccctgggccgtgaagaggaagagcaccaggggcatgcaccccgacagccagaccctgggcggcccaagcagcggcgcccctcctcccagcggcggcagcccagccggctccccaacctctaccgaggagggcacctctgagtccgccacccccgagagcggccctggcacctccaccgagcccagcgagggcagcgcacccggcagccctgccggcagccccacctccacagaggagggaaccagcaccgagcccagcgaaggcagcgccccaggcaccagcaccgagcctagtgagcaggagattaaacggatcaacaagatcagaagaagacttgtgaaagacagcaacaccaagaaggccggcaagacaggccccatgaaaaccctgctggttagagtgatgacacccgatctgagagagcggctggaaaacctgagaaagaagcctgaaaatatcccccagcccatcagcaatacatctagagccaacctgaataagctgctgaccgattacaccgaaatgaagaaggcgatcctgcatgtgtactgggaagagttccagaaggaccctgtgggcctgatgagccgggtggcccagcctgccagcaagaagatcgatcagaacaagctgaaacctgagatggacgagaagggcaacctgaccaccgccggctttgcctgctctcagtgtggccagcccctgttcgtgtacaagctggagcaggtgtctgagaagggcaaggcttacaccaactacttcggacggtgcaatgtggccgagcacgaaaagctgatcctgctggcccagctgaagcccgagaaggatagcgacgaagccgtgacatatagcctgggaaagtttgggcagagggccctggatttctacagcattcatgtgaccaaggagtccacccaccccgtgaagcccctggcccagatcgccggaaacagatacgcctccggacctgtgggaaaggccctgagcgacgcatgtatgggcacaatcgcctccttcctgtctaagtaccaggacatcatcatcgaacaccagaaggtggtgaagggcaaccagaagagactggagagcctgcgggagctggccggcaaggaaaacctggaataccctagcgtgaccctgccacctcagcctcacaccaaggagggcgttgatgcctacaacgaagtgatcgcccgggtgcgaatgtgggtgaacctgaacctgtggcagaagctgaagctaagcagagatgatgccaagcctctgctgagactgaagggattcccttcctttcctctggtcgagagacaggccaacgaagtggactggtgggacatggtgtgtaacgtgaagaagctgatcaacgagaaaaaggaggatggcaaggtgttttggcagaatctggctggctacaagagacaggaagccctgagaccatacctgagcagcgaggaagatcggaagaagggaaagaaattcgctcggtaccagctgggcgacctgctgctgcacctggaaaagaagcacggcgaggactggggaaaggtgtacgacgaggcctgggagcggattgacaagaaagtggaaggcctgagcaagcacatcaagctggaagaggaacggagaagcgaggacgcccagagcaaggccgccctgaccgactggctgcgggctaaggccagcttcgtgatcgagggcctgaaggaggccgacaaggacgagttctgcagatgcgagctgaagctgcagaagtggtacggggacctgcggggaaagcccttcgccatcgaagccgagaacagcatcctggacatcagcggcttcagcaagcagtacaactgtgccttcatctggcagaaggacggcgtgaagaagctgaacctgtacctgatcatcaactacttcaagggcggcaagctgcggttcaagaagatcaaacctgaagccttcgaagccaacagattctacaccgtgatcaacaaaaagagcggcgagatcgtgcccatggaggtgaacttcaacttcgacgaccccaacctgatcatcctgcctctggcctttggcaagagacagggcagagaattcatctggaacgacctgctgtccctggaaaccggcagcctgaagctggccaacggaagagtgatcgagaagacactgtacaacagaagaacccggcaggatgagcctgccctgttcgtggccctgaccttcgagcggcgggaggtcctggactcctccaatatcaaaccaatgaacctgatcggcgtggcaagaggcgaaaacatccccgccgtgatcgccctgaccgaccccgagggctgcccactgagccggtttaaggatagcctgggaaacccaacccacatcctgagaatcggcgagagctataaggagaagcagcggaccatccaggccaagaaggaggtggagcagcggagagccggcggctacagccggaagtacgccagcaaagccaagaatctggcagacgatatggtgagaaacaccgctagagatctgctgtactacgccgtgacccaggatgccatgctgatcttcgccaacctgagccggggcttcggccggcagggcaagcggaccttcatggccgagagacagtacacacggatggaggactggctgaccgccaagctggcctacgagggcctgagcaagacctacctgtccaagacactggcccagtacacctccaagacatgcagcaactgtgggtttaccatcaccagcgccgactacgacagggtgctggagaagctgaagaagacagcaacaggctggatgaccacaattaacggcaaggagctgaaggtggagggccagattacctactacaacagatacaagagacagaacgtagtcaaggacctgtccgtcgagctggatagactgagcgaagaatctgtgaacaacgacatctcctcctggacaaagggcagaagcggagaagctctgagcctcctgaagaaaagattctcccatagacccgtgcaggagaagttcgtgtgcctgaactgcggcttcgagacacacgcagccgagcaagccgccctgaacatcgccagatcctggctgttcctgcggagccaggagtacaagaaataccagacaaacaagacaaccggcaacaccgataagagagccttcgtcgagacctggcagtccttttaccggaagaagcttaaggaggtgtggaaacctgccgtgcggtctggcggatctggcggaggctcctagccagagccccctgaccttcggcgacgtggccgtggagttcagcggcgaggagtgggcctggctggacagcgcccagaggagcctgcacaggagcgtgatgctggagaactacaggaacctggccagcctgggcctgtgcctgagcaagcccgagatgatcagcagcctggagcagaggaaggagccctgggccgtgaagaggaagagcaccaggggcatgcaccccgacagccagaccctgggatctggctccggcagcggccccaagaaaaagagaaaagtctaagctgccttctgcggggcttgccttctggccatgcccttcttctctcccttgcacctgtacctcttggtctttgaataaagcctgagtaggaaggctagcaaaaaaaaaaaaaaaaaaaaaaaaaaaaaaaaaaaaaaaaaaaaaaaaaaaaaaaaaaaaaaaaaaaaaaaaaaaaaaaa

SEQ ID NO: 15298 - RNA, 9485 nt, synthetic construct
  source 1..9485: mol_type = other RNA
aggaaataagagagaaaagaagagtaagaagaaatataagagccaccatggcccctaagaagaagcgtaaagtgagccggatggaacgcctcgtctacgaggtgcggcagaagtgcagaaacatcgaggacatctgcatctcctgcggatctctgaacgtgaccctggagcacccactgttcatcggcggcatgtgccagaactgtaaaaactgttttctggagtgtgcctatcaatacgacgatgacggctaccagagctactgcaccatctgttgcggcggaagagaggtgctgatgtgtggaaataacaactgctgccggtgcttctgcgtggaatgcgtggacctgctggtgggccccggcgccgcccaggccgctattaaggaagatccttggaactgctacatgtgcggccacaagggcacatacggcctgctgagacggagagaggactggcctagcagactgcagatgttcttcgccaataaccacgaccaggagttcgacccccctaaggtgtaccctcccgtccccgccgagaagagaaagcccatccgggtcctgagcctgttcgatggcatcgccaccggtctgctggtgctgaaggacctgggcatccaggtggataggtacattgcctccgaggtgtgcgaggactccatcaccgtgggaatggtgcgtcatcagggcaagatcatgtacgtgggcgacgtgcggagcgtgacacagaagcatatccaggagtggggccctttcgacctggtgatcggcggcagcccttgcaatgacctgagcatcgtgaacccagcccggaagggcctgtacgagggaaccggcagactgttcttcgagttttacagactgctgcacgacgcccggcctaaggaaggcgacgaccggcccttcttttggctgttcgagaatgtggtggccatgggagtcagcgacaagcgggatattagccggttcctggagagcaaccccgtgatgatcgatgccaaggaagtgagcgccgcccaccgggccagatacttctggggcaatctgcctggcatgaacagacccctggccagcaccgtgaacgacaagctggagctgcaggagtgcctggagcacggccggatcgccaagttcagcaaggtgagaaccatcaccacccgaagcaacagcatcaaacaaggcaaggaccagcactttcctgtgttcatgaacgagaaggaggacatcctgtggtgtaccgagatggagagagtgttcgggttcccagtccactacacagatgtcagcaacatgtctagactggccagacagagactgctgggaagaagctggtccgtccctgtgatcagacacctgttcgcccctctgaaggagtacttcgcctgcgtgagcagcggcaacagcaacgccaacagccggggccccagcttctctagcggcctggtgccactgtccctgagagggagccacatgggccccatggagatctacaaaaccgtgagcgcctggaagcggcagcctgtgcgcgtgctgagcctgtttcggaatatcgataaagtcctgaaaagcctgggattcctggagagcggctctggctccggcggtggcaccctgaagtacgtggaggatgtgacaaacgtggtcagacgggatgtggagaagtggggccccttcgatctggtgtacggcagcacccaacccctgggcagctcttgtgaccggtgccctggctggtacatgtttcagttccaccggatcctgcagtacgccctgccgagacaggagtcccagcggccattcttttggattttcatggacaacttgctgctgaccgaggatgaccaggaaactaccactcggttcctgcagaccgaagccgtgaccctgcaggacgtgagaggccgggactaccagaacgccatgcgggtgtggtccaacatccctggactgaaaagcaagcacgcacctctgacccctaaagaagaggagtacctgcaggcccaggtgcggagcagaagcaagctggacgcccctaaggtggatctgctggtgaagaattgcctcctgcccctgagagagtacttcaagtatttcagccagaatagtctgcccctgggaggcagcggcggcggcgccctggtgacatttgaggacgtcgccgtgcggttcacccaggaggaatgggctctgctggatccttctcagaaaatcctgtaccgggacgtgatgagagagacataccggaatctgacctccgtgggcatcaactgggaatgttgggaccttgaagcctgcttcagaagcctgggaagaaacctgagagtgcaggtggtgaagagaaagtgcgagctgaccaacagcggcccctgcgccgagggcggcccaagcagcggcgcccctcctcccagcggcggcagcccagccggctccccaacctctaccgaggagggcacctctgagtccgccacccccgagagcggccctggcacctccaccgagcccagcgagggcagcgcacccggcagccctgccggcagccccacctccacagaggagggaaccagcaccgagcccagcgaaggcagcgccccaggcaccagcaccgagcctagtgagcaggagattaaacggatcaacaagatcagaagaagacttgtgaaagacagcaacaccaagaaggccggcaagacaggccccatgaaaaccctgctggttagagtgatgacacccgatctgagagagcggctggaaaacctgagaaagaagcctgaaaatatcccccagcccatcagcaatacatctagagccaacctgaataagctgctgaccgattacaccgaaatgaagaaggcgatcctgcatgtgtactgggaagagttccagaaggaccctgtgggcctgatgagccgggtggcccagcctgccagcaagaagatcgatcagaacaagctgaaacctgagatggacgagaagggcaacctgaccaccgccggctttgcctgctctcagtgtggccagcccctgttcgtgtacaagctggagcaggtgtctgagaagggcaaggcttacaccaactacttcggacggtgcaatgtggccgagcacgaaaagctgatcctgctggcccagctgaagcccgagaaggatagcgacgaagccgtgacatatagcctgggaaagtttgggcagagggccctggatttctacagcattcatgtgaccaaggagtccacccaccccgtgaagcccctggcccagatcgccggaaacagatacgcctccggacctgtgggaaaggccctgagcgacgcatgtatgggcacaatcgcctccttcctgtctaagtaccaggacatcatcatcgaacaccagaaggtggtgaagggcaaccagaagagactggagagcctgcgggagctggccggcaaggaaaacctggaataccctagcgtgaccctgccacctcagcctcacaccaaggagggcgttgatgcctacaacgaagtgatcgcccgggtgcgaatgtgggtgaacctgaacctgtggcagaagctgaagctaagcagagatgatgccaagcctctgctgagactgaagggattcccttcctttcctctggtcgagagacaggccaacgaagtggactggtgggacatggtgtgtaacgtgaagaagctgatcaacgagaaaaaggaggatggcaaggtgttttggcagaatctggctggctacaagagacaggaagccctgagaccatacctgagcagcgaggaagatcggaagaagggaaagaaattcgctcggtaccagctgggcgacctgctgctgcacctggaaaagaagcacggcgaggactggggaaaggtgtacgacgaggcctgggagcggattgacaagaaagtggaaggcctgagcaagcacatcaagctggaagaggaacggagaagcgaggacgcccagagcaaggccgccctgaccgactggctgcgggctaaggccagcttcgtgatcgagggcctgaaggaggccgacaaggacgagttctgcagatgcgagctgaagctgcagaagtggtacggggacctgcggggaaagcccttcgccatcgaagccgagaacagcatcctggacatcagcggcttcagcaagcagtacaactgtgccttcatctggcagaaggacggcgtgaagaagctgaacctgtacctgatcatcaactacttcaagggcggcaagctgcggttcaagaagatcaaacctgaagccttcgaagccaacagattctacaccgtgatcaacaaaaagagcggcgagatcgtgcccatggaggtgaacttcaacttcgacgaccccaacctgatcatcctgcctctggcctttggcaagagacagggcagagaattcatctggaacgacctgctgtccctggaaaccggcagcctgaagctggccaacggaagagtgatcgagaagacactgtacaacagaagaacccggcaggatgagcctgccctgttcgtggccctgaccttcgagcggcgggaggtcctggactcctccaatatcaaaccaatgaacctgatcggcgtggcaagaggcgaaaacatccccgccgtgatcgccctgaccgaccccgagggctgcccactgagccggtttaaggatagcctgggaaacccaacccacatcctgagaatcggcgagagctataaggagaagcagcggaccatccaggccaagaaggaggtggagcagcggagagccggcggctacagccggaagtacgccagcaaagccaagaatctggcagacgatatggtgagaaacaccgctagagatctgctgtactacgccgtgacccaggatgccatgctgatcttcgccaacctgagccggggcttcggccggcagggcaagcggaccttcatggccgagagacagtacacacggatggaggactggctgaccgccaagctggcctacgagggcctgagcaagacctacctgtccaagacactggcccagtacacctccaagacatgcagcaactgtgggtttaccatcaccagcgccgactacgacagggtgctggagaagctgaagaagacagcaacaggctggatgaccacaattaacggcaaggagctgaaggtggagggccagattacctactacaacagatacaagagacagaacgtagtcaaggacctgtccgtcgagctggatagactgagcgaagaatctgtgaacaacgacatctcctcctggacaaagggcagaagcggagaagctctgagcctcctgaagaaaagattctcccatagacccgtgcaggagaagttcgtgtgcctgaactgcggcttcgagacacacgcagccgagcaagccgccctgaacatcgccagatcctggctgttcctgcggagccaggagtacaagaaataccagacaaacaagacaaccggcaacaccgataagagagccttcgtcgagacctggcagtccttttaccggaagaagcttaaggaggtgtggaaacctgccgtgcggtctggcggatctggcggaggctccagccagagccccctgaccttcggcgacgtggccgtggagttcagcggcgaggagtgggcctggctggacagcgcccagaggagcctgcacaggagcgtgatgctggagaactacaggaacctggccagcctgggcctgtgcctgagcaagcccgagatgatcagcagcctggagcagaggaaggagccctgggccgtgaagaggaagagcaccaggggcatgaggcccgacagccagaccctgggcggcccaagcagcggcgcccctcctcccagcggcggcagcccagccggctccccaacctctaccgaggagggcacctctgagtccgccacccccgagagcggccctggcacctccaccgagcccagcgagggcagcgcacccggcagccctgccggcagccccacctccacagaggagggaaccagcaccgagcccagcgaaggcagcgccccaggcaccagcaccgagcctagtgagcaggagattaaacggatcaacaagatcagaagaagacttgtgaaagacagcaacaccaagaaggccggcaagacaggccccatgaaaaccctgctggttagagtgatgacacccgatctgagagagcggctggaaaacctgagaaagaagcctgaaaatatcccccagcccatcagcaatacatctagagccaacctgaataagctgctgaccgattacaccgaaatgaagaaggcgatcctgcatgtgtactgggaagagttccagaaggaccctgtgggcctgatgagccgggtggcccagcctgccagcaagaagatcgatcagaacaagctgaaacctgagatggacgagaagggcaacctgaccaccgccggctttgcctgctctcagtgtggccagcccctgttcgtgtacaagctggagcaggtgtctgagaagggcaaggcttacaccaactacttcggacggtgcaatgtggccgagcacgaaaagctgatcctgctggcccagctgaagcccgagaaggatagcgacgaagccgtgacatatagcctgggaaagtttgggcagagggccctggatttctacagcattcatgtgaccaaggagtccacccaccccgtgaagcccctggcccagatcgccggaaacagatacgcctccggacctgtgggaaaggccctgagcgacgcatgtatgggcacaatcgcctccttcctgtctaagtaccaggacatcatcatcgaacaccagaaggtggtgaagggcaaccagaagagactggagagcctgcgggagctggccggcaaggaaaacctggaataccctagcgtgaccctgccacctcagcctcacaccaaggagggcgttgatgcctacaacgaagtgatcgcccgggtgcgaatgtgggtgaacctgaacctgtggcagaagctgaagctaagcagagatgatgccaagcctctgctgagactgaagggattcccttcctttcctctggtcgagagacaggccaacgaagtggactggtgggacatggtgtgtaacgtgaagaagctgatcaacgagaaaaaggaggatggcaaggtgttttggcagaatctggctggctacaagagacaggaagccctgagaccatacctgagcagcgaggaagatcggaagaagggaaagaaattcgctcggtaccagctgggcgacctgctgctgcacctggaaaagaagcacggcgaggactggggaaaggtgtacgacgaggcctgggagcggattgacaagaaagtggaaggcctgagcaagcacatcaagctggaagaggaacggagaagcgaggacgcccagagcaaggccgccctgaccgactggctgcgggctaaggccagcttcgtgatcgagggcctgaaggaggccgacaaggacgagttctgcagatgcgagctgaagctgcagaagtggtacggggacctgcggggaaagcccttcgccatcgaagccgagaacagcatcctggacatcagcggcttcagcaagcagtacaactgtgccttcatctggcagaaggacggcgtgaagaagctgaacctgtacctgatcatcaactacttcaagggcggcaagctgcggttcaagaagatcaaacctgaagccttcgaagccaacagattctacaccgtgatcaacaaaaagagcggcgagatcgtgcccatggaggtgaacttcaacttcgacgaccccaacctgatcatcctgcctctggcctttggcaagagacagggcagagaattcatctggaacgacctgctgtccctggaaaccggcagcctgaagctggccaacggaagagtgatcgagaagacactgtacaacagaagaacccggcaggatgagcctgccctgttcgtggccctgaccttcgagcggcgggaggtcctggactcctccaatatcaaaccaatgaacctgatcggcgtggcaagaggcgaaaacatccccgccgtgatcgccctgaccgaccccgagggctgcccactgagccggtttaaggatagcctgggaaacccaacccacatcctgagaatcggcgagagctataaggagaagcagcggaccatccaggccaagaaggaggtggagcagcggagagccggcggctacagccggaagtacgccagcaaagccaagaatctggcagacgatatggtgagaaacaccgctagagatctgctgtactacgccgtgacccaggatgccatgctgatcttcgccaacctgagccggggcttcggccggcagggcaagcggaccttcatggccgagagacagtacacacggatggaggactggctgaccgccaagctggcctacgagggcctgagcaagacctacctgtccaagacactggcccagtacacctccaagacatgcagcaactgtgggtttaccatcaccagcgccgactacgacagggtgctggagaagctgaagaagacagcaacaggctggatgaccacaattaacggcaaggagctgaaggtggagggccagattacctactacaacagatacaagagacagaacgtagtcaaggacctgtccgtcgagctggatagactgagcgaagaatctgtgaacaacgacatctcctcctggacaaagggcagaagcggagaagctctgagcctcctgaagaaaagattctcccatagacccgtgcaggagaagttcgtgtgcctgaactgcggcttcgagacacacgcagccgagcaagccgccctgaacatcgccagatcctggctgttcctgcggagccaggagtacaagaaataccagacaaacaagacaaccggcaacaccgataagagagccttcgtcgagacctggcagtccttttaccggaagaagcttaaggaggtgtggaaacctgccgtgcggtctggcggatctggcggaggctcctagccagagccccctgaccttcggcgacgtggccgtggagttcagcggcgaggagtgggcctggctggacagcgcccagaggagcctgcacaggagcgtgatgctggagaactacaggaacctggccagcctgggcctgtgcctgagcaagcccgagatgatcagcagcctggagcagaggaaggagccctgggccgtgaagaggaagagcaccaggggcatgaggcccgacagccagaccctgggatctggctccggcagcggccccaagaaaaagagaaaagtctaagctgccttctgcggggcttgccttctggccatgcccttcttctctcccttgcacctgtacctcttggtctttgaataaagcctgagtaggaaggctagcaaaaaaaaaaaaaaaaaaaaaaaaaaaaaaaaaaaaaaaaaaaaaaaaaaaaaaaaaaaaaaaaaaaaaaaaaaaaaaaa

SEQ ID NO: 15299 - RNA, 9485 nt, synthetic construct
  source 1..9485: mol_type = other RNA
aggaaataagagagaaaagaagagtaagaagaaatataagagccaccatggcccctaagaagaagcgtaaagtgagccggatggaacgcctcgtctacgaggtgcggcagaagtgcagaaacatcgaggacatctgcatctcctgcggatctctgaacgtgaccctggagcacccactgttcatcggcggcatgtgccagaactgtaaaaactgttttctggagtgtgcctatcaatacgacgatgacggctaccagagctactgcaccatctgttgcggcggaagagaggtgctgatgtgtggaaataacaactgctgccggtgcttctgcgtggaatgcgtggacctgctggtgggccccggcgccgcccaggccgctattaaggaagatccttggaactgctacatgtgcggccacaagggcacatacggcctgctgagacggagagaggactggcctagcagactgcagatgttcttcgccaataaccacgaccaggagttcgacccccctaaggtgtaccctcccgtccccgccgagaagagaaagcccatccgggtcctgagcctgttcgatggcatcgccaccggtctgctggtgctgaaggacctgggcatccaggtggataggtacattgcctccgaggtgtgcgaggactccatcaccgtgggaatggtgcgtcatcagggcaagatcatgtacgtgggcgacgtgcggagcgtgacacagaagcatatccaggagtggggccctttcgacctggtgatcggcggcagcccttgcaatgacctgagcatcgtgaacccagcccggaagggcctgtacgagggaaccggcagactgttcttcgagttttacagactgctgcacgacgcccggcctaaggaaggcgacgaccggcccttcttttggctgttcgagaatgtggtggccatgggagtcagcgacaagcgggatattagccggttcctggagagcaaccccgtgatgatcgatgccaaggaagtgagcgccgcccaccgggccagatacttctggggcaatctgcctggcatgaacagacccctggccagcaccgtgaacgacaagctggagctgcaggagtgcctggagcacggccggatcgccaagttcagcaaggtgagaaccatcaccacccgaagcaacagcatcaaacaaggcaaggaccagcactttcctgtgttcatgaacgagaaggaggacatcctgtggtgtaccgagatggagagagtgttcgggttcccagtccactacacagatgtcagcaacatgtctagactggccagacagagactgctgggaagaagctggtccgtccctgtgatcagacacctgttcgcccctctgaaggagtacttcgcctgcgtgagcagcggcaacagcaacgccaacagccggggccccagcttctctagcggcctggtgccactgtccctgagagggagccacatgggccccatggagatctacaaaaccgtgagcgcctggaagcggcagcctgtgcgcgtgctgagcctgtttcggaatatcgataaagtcctgaaaagcctgggattcctggagagcggctctggctccggcggtggcaccctgaagtacgtggaggatgtgacaaacgtggtcagacgggatgtggagaagtggggccccttcgatctggtgtacggcagcacccaacccctgggcagctcttgtgaccggtgccctggctggtacatgtttcagttccaccggatcctgcagtacgccctgccgagacaggagtcccagcggccattcttttggattttcatggacaacttgctgctgaccgaggatgaccaggaaactaccactcggttcctgcagaccgaagccgtgaccctgcaggacgtgagaggccgggactaccagaacgccatgcgggtgtggtccaacatccctggactgaaaagcaagcacgcacctctgacccctaaagaagaggagtacctgcaggcccaggtgcggagcagaagcaagctggacgcccctaaggtggatctgctggtgaagaattgcctcctgcccctgagagagtacttcaagtatttcagccagaatagtctgcccctgggaggcagcggcggcggcgccctggtgacatttgaggacgtcgccgtgcggttcacccaggaggaatgggctctgctggatccttctcagaaaatcctgtaccgggacgtgatgagagagacataccggaatctgacctccgtgggcatcaactgggaatgttgggaccttgaagcctgcttcagaagcctgggaagaaacctgagagtgcaggtggtgaagagaaagtgcgagctgaccaacagcggcccctgcgccgagggcggcccaagcagcggcgcccctcctcccagcggcggcagcccagccggctccccaacctctaccgaggagggcacctctgagtccgccacccccgagagcggccctggcacctccaccgagcccagcgagggcagcgcacccggcagccctgccggcagccccacctccacagaggagggaaccagcaccgagcccagcgaaggcagcgccccaggcaccagcaccgagcctagtgagcaggagattaaacggatcaacaagatcagaagaagacttgtgaaagacagcaacaccaagaaggccggcaagacaggccccatgaaaaccctgctggttagagtgatgacacccgatctgagagagcggctggaaaacctgagaaagaagcctgaaaatatcccccagcccatcagcaatacatctagagccaacctgaataagctgctgaccgattacaccgaaatgaagaaggcgatcctgcatgtgtactgggaagagttccagaaggaccctgtgggcctgatgagccgggtggcccagcctgccagcaagaagatcgatcagaacaagctgaaacctgagatggacgagaagggcaacctgaccaccgccggctttgcctgctctcagtgtggccagcccctgttcgtgtacaagctggagcaggtgtctgagaagggcaaggcttacaccaactacttcggacggtgcaatgtggccgagcacgaaaagctgatcctgctggcccagctgaagcccgagaaggatagcgacgaagccgtgacatatagcctgggaaagtttgggcagagggccctggatttctacagcattcatgtgaccaaggagtccacccaccccgtgaagcccctggcccagatcgccggaaacagatacgcctccggacctgtgggaaaggccctgagcgacgcatgtatgggcacaatcgcctccttcctgtctaagtaccaggacatcatcatcgaacaccagaaggtggtgaagggcaaccagaagagactggagagcctgcgggagctggccggcaaggaaaacctggaataccctagcgtgaccctgccacctcagcctcacaccaaggagggcgttgatgcctacaacgaagtgatcgcccgggtgcgaatgtgggtgaacctgaacctgtggcagaagctgaagctaagcagagatgatgccaagcctctgctgagactgaagggattcccttcctttcctctggtcgagagacaggccaacgaagtggactggtgggacatggtgtgtaacgtgaagaagctgatcaacgagaaaaaggaggatggcaaggtgttttggcagaatctggctggctacaagagacaggaagccctgagaccatacctgagcagcgaggaagatcggaagaagggaaagaaattcgctcggtaccagctgggcgacctgctgctgcacctggaaaagaagcacggcgaggactggggaaaggtgtacgacgaggcctgggagcggattgacaagaaagtggaaggcctgagcaagcacatcaagctggaagaggaacggagaagcgaggacgcccagagcaaggccgccctgaccgactggctgcgggctaaggccagcttcgtgatcgagggcctgaaggaggccgacaaggacgagttctgcagatgcgagctgaagctgcagaagtggtacggggacctgcggggaaagcccttcgccatcgaagccgagaacagcatcctggacatcagcggcttcagcaagcagtacaactgtgccttcatctggcagaaggacggcgtgaagaagctgaacctgtacctgatcatcaactacttcaagggcggcaagctgcggttcaagaagatcaaacctgaagccttcgaagccaacagattctacaccgtgatcaacaaaaagagcggcgagatcgtgcccatggaggtgaacttcaacttcgacgaccccaacctgatcatcctgcctctggcctttggcaagagacagggcagagaattcatctggaacgacctgctgtccctggaaaccggcagcctgaagctggccaacggaagagtgatcgagaagacactgtacaacagaagaacccggcaggatgagcctgccctgttcgtggccctgaccttcgagcggcgggaggtcctggactcctccaatatcaaaccaatgaacctgatcggcgtggcaagaggcgaaaacatccccgccgtgatcgccctgaccgaccccgagggctgcccactgagccggtttaaggatagcctgggaaacccaacccacatcctgagaatcggcgagagctataaggagaagcagcggaccatccaggccaagaaggaggtggagcagcggagagccggcggctacagccggaagtacgccagcaaagccaagaatctggcagacgatatggtgagaaacaccgctagagatctgctgtactacgccgtgacccaggatgccatgctgatcttcgccaacctgagccggggcttcggccggcagggcaagcggaccttcatggccgagagacagtacacacggatggaggactggctgaccgccaagctggcctacgagggcctgagcaagacctacctgtccaagacactggcccagtacacctccaagacatgcagcaactgtgggtttaccatcaccagcgccgactacgacagggtgctggagaagctgaagaagacagcaacaggctggatgaccacaattaacggcaaggagctgaaggtggagggccagattacctactacaacagatacaagagacagaacgtagtcaaggacctgtccgtcgagctggatagactgagcgaagaatctgtgaacaacgacatctcctcctggacaaagggcagaagcggagaagctctgagcctcctgaagaaaagattctcccatagacccgtgcaggagaagttcgtgtgcctgaactgcggcttcgagacacacgcagccgagcaagccgccctgaacatcgccagatcctggctgttcctgcggagccaggagtacaagaaataccagacaaacaagacaaccggcaacaccgataagagagccttcgtcgagacctggcagtccttttaccggaagaagcttaaggaggtgtggaaacctgccgtgcggtctggcggatctggcggaggctccatggccttcgaggacgtggccgtgtacttcagccaggaggagtggggcctgctggacaccgcccagagggccctgtacaggagggtgatgctggacaacttcgccctggtggccagcctgggcctgagcaccagcaggcccagggtggtgatccagctggagaggggcgaggagccctgggtgcccagcggcaccgacaccaccctgagcaggaccacctacaggaggaggaaccccggcagcggcggcccaagcagcggcgcccctcctcccagcggcggcagcccagccggctccccaacctctaccgaggagggcacctctgagtccgccacccccgagagcggccctggcacctccaccgagcccagcgagggcagcgcacccggcagccctgccggcagccccacctccacagaggagggaaccagcaccgagcccagcgaaggcagcgccccaggcaccagcaccgagcctagtgagcaggagattaaacggatcaacaagatcagaagaagacttgtgaaagacagcaacaccaagaaggccggcaagacaggccccatgaaaaccctgctggttagagtgatgacacccgatctgagagagcggctggaaaacctgagaaagaagcctgaaaatatcccccagcccatcagcaatacatctagagccaacctgaataagctgctgaccgattacaccgaaatgaagaaggcgatcctgcatgtgtactgggaagagttccagaaggaccctgtgggcctgatgagccgggtggcccagcctgccagcaagaagatcgatcagaacaagctgaaacctgagatggacgagaagggcaacctgaccaccgccggctttgcctgctctcagtgtggccagcccctgttcgtgtacaagctggagcaggtgtctgagaagggcaaggcttacaccaactacttcggacggtgcaatgtggccgagcacgaaaagctgatcctgctggcccagctgaagcccgagaaggatagcgacgaagccgtgacatatagcctgggaaagtttgggcagagggccctggatttctacagcattcatgtgaccaaggagtccacccaccccgtgaagcccctggcccagatcgccggaaacagatacgcctccggacctgtgggaaaggccctgagcgacgcatgtatgggcacaatcgcctccttcctgtctaagtaccaggacatcatcatcgaacaccagaaggtggtgaagggcaaccagaagagactggagagcctgcgggagctggccggcaaggaaaacctggaataccctagcgtgaccctgccacctcagcctcacaccaaggagggcgttgatgcctacaacgaagtgatcgcccgggtgcgaatgtgggtgaacctgaacctgtggcagaagctgaagctaagcagagatgatgccaagcctctgctgagactgaagggattcccttcctttcctctggtcgagagacaggccaacgaagtggactggtgggacatggtgtgtaacgtgaagaagctgatcaacgagaaaaaggaggatggcaaggtgttttggcagaatctggctggctacaagagacaggaagccctgagaccatacctgagcagcgaggaagatcggaagaagggaaagaaattcgctcggtaccagctgggcgacctgctgctgcacctggaaaagaagcacggcgaggactggggaaaggtgtacgacgaggcctgggagcggattgacaagaaagtggaaggcctgagcaagcacatcaagctggaagaggaacggagaagcgaggacgcccagagcaaggccgccctgaccgactggctgcgggctaaggccagcttcgtgatcgagggcctgaaggaggccgacaaggacgagttctgcagatgcgagctgaagctgcagaagtggtacggggacctgcggggaaagcccttcgccatcgaagccgagaacagcatcctggacatcagcggcttcagcaagcagtacaactgtgccttcatctggcagaaggacggcgtgaagaagctgaacctgtacctgatcatcaactacttcaagggcggcaagctgcggttcaagaagatcaaacctgaagccttcgaagccaacagattctacaccgtgatcaacaaaaagagcggcgagatcgtgcccatggaggtgaacttcaacttcgacgaccccaacctgatcatcctgcctctggcctttggcaagagacagggcagagaattcatctggaacgacctgctgtccctggaaaccggcagcctgaagctggccaacggaagagtgatcgagaagacactgtacaacagaagaacccggcaggatgagcctgccctgttcgtggccctgaccttcgagcggcgggaggtcctggactcctccaatatcaaaccaatgaacctgatcggcgtggcaagaggcgaaaacatccccgccgtgatcgccctgaccgaccccgagggctgcccactgagccggtttaaggatagcctgggaaacccaacccacatcctgagaatcggcgagagctataaggagaagcagcggaccatccaggccaagaaggaggtggagcagcggagagccggcggctacagccggaagtacgccagcaaagccaagaatctggcagacgatatggtgagaaacaccgctagagatctgctgtactacgccgtgacccaggatgccatgctgatcttcgccaacctgagccggggcttcggccggcagggcaagcggaccttcatggccgagagacagtacacacggatggaggactggctgaccgccaagctggcctacgagggcctgagcaagacctacctgtccaagacactggcccagtacacctccaagacatgcagcaactgtgggtttaccatcaccagcgccgactacgacagggtgctggagaagctgaagaagacagcaacaggctggatgaccacaattaacggcaaggagctgaaggtggagggccagattacctactacaacagatacaagagacagaacgtagtcaaggacctgtccgtcgagctggatagactgagcgaagaatctgtgaacaacgacatctcctcctggacaaagggcagaagcggagaagctctgagcctcctgaagaaaagattctcccatagacccgtgcaggagaagttcgtgtgcctgaactgcggcttcgagacacacgcagccgagcaagccgccctgaacatcgccagatcctggctgttcctgcggagccaggagtacaagaaataccagacaaacaagacaaccggcaacaccgataagagagccttcgtcgagacctggcagtccttttaccggaagaagcttaaggaggtgtggaaacctgccgtgcggtctggcggatctggcggaggctcctatggccttcgaggacgtggccgtgtacttcagccaggaggagtggggcctgctggacaccgcccagagggccctgtacaggagggtgatgctggacaacttcgccctggtggccagcctgggcctgagcaccagcaggcccagggtggtgatccagctggagaggggcgaggagccctgggtgcccagcggcaccgacaccaccctgagcaggaccacctacaggaggaggaaccccggcagcggatctggctccggcagcggccccaagaaaaagagaaaagtctaagctgccttctgcggggcttgccttctggccatgcccttcttctctcccttgcacctgtacctcttggtctttgaataaagcctgagtaggaaggctagcaaaaaaaaaaaaaaaaaaaaaaaaaaaaaaaaaaaaaaaaaaaaaaaaaaaaaaaaaaaaaaaaaaaaaaaaaaaaaaaa

SEQ ID NO: 15300 - RNA, 9485 nt, synthetic construct
  source 1..9485: mol_type = other RNA
aggaaataagagagaaaagaagagtaagaagaaatataagagccaccatggcccctaagaagaagcgtaaagtgagccggatggaacgcctcgtctacgaggtgcggcagaagtgcagaaacatcgaggacatctgcatctcctgcggatctctgaacgtgaccctggagcacccactgttcatcggcggcatgtgccagaactgtaaaaactgttttctggagtgtgcctatcaatacgacgatgacggctaccagagctactgcaccatctgttgcggcggaagagaggtgctgatgtgtggaaataacaactgctgccggtgcttctgcgtggaatgcgtggacctgctggtgggccccggcgccgcccaggccgctattaaggaagatccttggaactgctacatgtgcggccacaagggcacatacggcctgctgagacggagagaggactggcctagcagactgcagatgttcttcgccaataaccacgaccaggagttcgacccccctaaggtgtaccctcccgtccccgccgagaagagaaagcccatccgggtcctgagcctgttcgatggcatcgccaccggtctgctggtgctgaaggacctgggcatccaggtggataggtacattgcctccgaggtgtgcgaggactccatcaccgtgggaatggtgcgtcatcagggcaagatcatgtacgtgggcgacgtgcggagcgtgacacagaagcatatccaggagtggggccctttcgacctggtgatcggcggcagcccttgcaatgacctgagcatcgtgaacccagcccggaagggcctgtacgagggaaccggcagactgttcttcgagttttacagactgctgcacgacgcccggcctaaggaaggcgacgaccggcccttcttttggctgttcgagaatgtggtggccatgggagtcagcgacaagcgggatattagccggttcctggagagcaaccccgtgatgatcgatgccaaggaagtgagcgccgcccaccgggccagatacttctggggcaatctgcctggcatgaacagacccctggccagcaccgtgaacgacaagctggagctgcaggagtgcctggagcacggccggatcgccaagttcagcaaggtgagaaccatcaccacccgaagcaacagcatcaaacaaggcaaggaccagcactttcctgtgttcatgaacgagaaggaggacatcctgtggtgtaccgagatggagagagtgttcgggttcccagtccactacacagatgtcagcaacatgtctagactggccagacagagactgctgggaagaagctggtccgtccctgtgatcagacacctgttcgcccctctgaaggagtacttcgcctgcgtgagcagcggcaacagcaacgccaacagccggggccccagcttctctagcggcctggtgccactgtccctgagagggagccacatgggccccatggagatctacaaaaccgtgagcgcctggaagcggcagcctgtgcgcgtgctgagcctgtttcggaatatcgataaagtcctgaaaagcctgggattcctggagagcggctctggctccggcggtggcaccctgaagtacgtggaggatgtgacaaacgtggtcagacgggatgtggagaagtggggccccttcgatctggtgtacggcagcacccaacccctgggcagctcttgtgaccggtgccctggctggtacatgtttcagttccaccggatcctgcagtacgccctgccgagacaggagtcccagcggccattcttttggattttcatggacaacttgctgctgaccgaggatgaccaggaaactaccactcggttcctgcagaccgaagccgtgaccctgcaggacgtgagaggccgggactaccagaacgccatgcgggtgtggtccaacatccctggactgaaaagcaagcacgcacctctgacccctaaagaagaggagtacctgcaggcccaggtgcggagcagaagcaagctggacgcccctaaggtggatctgctggtgaagaattgcctcctgcccctgagagagtacttcaagtatttcagccagaatagtctgcccctgggaggcagcggcggcggcgccctggtgacatttgaggacgtcgccgtgcggttcacccaggaggaatgggctctgctggatccttctcagaaaatcctgtaccgggacgtgatgagagagacataccggaatctgacctccgtgggcatcaactgggaatgttgggaccttgaagcctgcttcagaagcctgggaagaaacctgagagtgcaggtggtgaagagaaagtgcgagctgaccaacagcggcccctgcgccgagggcggcccaagcagcggcgcccctcctcccagcggcggcagcccagccggctccccaacctctaccgaggagggcacctctgagtccgccacccccgagagcggccctggcacctccaccgagcccagcgagggcagcgcacccggcagccctgccggcagccccacctccacagaggagggaaccagcaccgagcccagcgaaggcagcgccccaggcaccagcaccgagcctagtgagcaggagattaaacggatcaacaagatcagaagaagacttgtgaaagacagcaacaccaagaaggccggcaagacaggccccatgaaaaccctgctggttagagtgatgacacccgatctgagagagcggctggaaaacctgagaaagaagcctgaaaatatcccccagcccatcagcaatacatctagagccaacctgaataagctgctgaccgattacaccgaaatgaagaaggcgatcctgcatgtgtactgggaagagttccagaaggaccctgtgggcctgatgagccgggtggcccagcctgccagcaagaagatcgatcagaacaagctgaaacctgagatggacgagaagggcaacctgaccaccgccggctttgcctgctctcagtgtggccagcccctgttcgtgtacaagctggagcaggtgtctgagaagggcaaggcttacaccaactacttcggacggtgcaatgtggccgagcacgaaaagctgatcctgctggcccagctgaagcccgagaaggatagcgacgaagccgtgacatatagcctgggaaagtttgggcagagggccctggatttctacagcattcatgtgaccaaggagtccacccaccccgtgaagcccctggcccagatcgccggaaacagatacgcctccggacctgtgggaaaggccctgagcgacgcatgtatgggcacaatcgcctccttcctgtctaagtaccaggacatcatcatcgaacaccagaaggtggtgaagggcaaccagaagagactggagagcctgcgggagctggccggcaaggaaaacctggaataccctagcgtgaccctgccacctcagcctcacaccaaggagggcgttgatgcctacaacgaagtgatcgcccgggtgcgaatgtgggtgaacctgaacctgtggcagaagctgaagctaagcagagatgatgccaagcctctgctgagactgaagggattcccttcctttcctctggtcgagagacaggccaacgaagtggactggtgggacatggtgtgtaacgtgaagaagctgatcaacgagaaaaaggaggatggcaaggtgttttggcagaatctggctggctacaagagacaggaagccctgagaccatacctgagcagcgaggaagatcggaagaagggaaagaaattcgctcggtaccagctgggcgacctgctgctgcacctggaaaagaagcacggcgaggactggggaaaggtgtacgacgaggcctgggagcggattgacaagaaagtggaaggcctgagcaagcacatcaagctggaagaggaacggagaagcgaggacgcccagagcaaggccgccctgaccgactggctgcgggctaaggccagcttcgtgatcgagggcctgaaggaggccgacaaggacgagttctgcagatgcgagctgaagctgcagaagtggtacggggacctgcggggaaagcccttcgccatcgaagccgagaacagcatcctggacatcagcggcttcagcaagcagtacaactgtgccttcatctggcagaaggacggcgtgaagaagctgaacctgtacctgatcatcaactacttcaagggcggcaagctgcggttcaagaagatcaaacctgaagccttcgaagccaacagattctacaccgtgatcaacaaaaagagcggcgagatcgtgcccatggaggtgaacttcaacttcgacgaccccaacctgatcatcctgcctctggcctttggcaagagacagggcagagaattcatctggaacgacctgctgtccctggaaaccggcagcctgaagctggccaacggaagagtgatcgagaagacactgtacaacagaagaacccggcaggatgagcctgccctgttcgtggccctgaccttcgagcggcgggaggtcctggactcctccaatatcaaaccaatgaacctgatcggcgtggcaagaggcgaaaacatccccgccgtgatcgccctgaccgaccccgagggctgcccactgagccggtttaaggatagcctgggaaacccaacccacatcctgagaatcggcgagagctataaggagaagcagcggaccatccaggccaagaaggaggtggagcagcggagagccggcggctacagccggaagtacgccagcaaagccaagaatctggcagacgatatggtgagaaacaccgctagagatctgctgtactacgccgtgacccaggatgccatgctgatcttcgccaacctgagccggggcttcggccggcagggcaagcggaccttcatggccgagagacagtacacacggatggaggactggctgaccgccaagctggcctacgagggcctgagcaagacctacctgtccaagacactggcccagtacacctccaagacatgcagcaactgtgggtttaccatcaccagcgccgactacgacagggtgctggagaagctgaagaagacagcaacaggctggatgaccacaattaacggcaaggagctgaaggtggagggccagattacctactacaacagatacaagagacagaacgtagtcaaggacctgtccgtcgagctggatagactgagcgaagaatctgtgaacaacgacatctcctcctggacaaagggcagaagcggagaagctctgagcctcctgaagaaaagattctcccatagacccgtgcaggagaagttcgtgtgcctgaactgcggcttcgagacacacgcagccgagcaagccgccctgaacatcgccagatcctggctgttcctgcggagccaggagtacaagaaataccagacaaacaagacaaccggcaacaccgataagagagccttcgtcgagacctggcagtccttttaccggaagaagcttaaggaggtgtggaaacctgccgtgcggtctggcggatctggcggaggctccagccagagcagcgtgaccttcggcgacgtggccgtggacttcagccaggacgagtgggcctggctggacgccacccagaggagcctgtacaggagcgtgatgctggagaactacaggaacctggtgagcctgggcctgtgcagcagcaagcccgacatgatcagcagcctggagcagaggaaggagccctggaccgtgaagaggaagctgcccggcggcggctgccccgacccccaggccgtgggcggcccaagcagcggcgcccctcctcccagcggcggcagcccagccggctccccaacctctaccgaggagggcacctctgagtccgccacccccgagagcggccctggcacctccaccgagcccagcgagggcagcgcacccggcagccctgccggcagccccacctccacagaggagggaaccagcaccgagcccagcgaaggcagcgccccaggcaccagcaccgagcctagtgagcaggagattaaacggatcaacaagatcagaagaagacttgtgaaagacagcaacaccaagaaggccggcaagacaggccccatgaaaaccctgctggttagagtgatgacacccgatctgagagagcggctggaaaacctgagaaagaagcctgaaaatatcccccagcccatcagcaatacatctagagccaacctgaataagctgctgaccgattacaccgaaatgaagaaggcgatcctgcatgtgtactgggaagagttccagaaggaccctgtgggcctgatgagccgggtggcccagcctgccagcaagaagatcgatcagaacaagctgaaacctgagatggacgagaagggcaacctgaccaccgccggctttgcctgctctcagtgtggccagcccctgttcgtgtacaagctggagcaggtgtctgagaagggcaaggcttacaccaactacttcggacggtgcaatgtggccgagcacgaaaagctgatcctgctggcccagctgaagcccgagaaggatagcgacgaagccgtgacatatagcctgggaaagtttgggcagagggccctggatttctacagcattcatgtgaccaaggagtccacccaccccgtgaagcccctggcccagatcgccggaaacagatacgcctccggacctgtgggaaaggccctgagcgacgcatgtatgggcacaatcgcctccttcctgtctaagtaccaggacatcatcatcgaacaccagaaggtggtgaagggcaaccagaagagactggagagcctgcgggagctggccggcaaggaaaacctggaataccctagcgtgaccctgccacctcagcctcacaccaaggagggcgttgatgcctacaacgaagtgatcgcccgggtgcgaatgtgggtgaacctgaacctgtggcagaagctgaagctaagcagagatgatgccaagcctctgctgagactgaagggattcccttcctttcctctggtcgagagacaggccaacgaagtggactggtgggacatggtgtgtaacgtgaagaagctgatcaacgagaaaaaggaggatggcaaggtgttttggcagaatctggctggctacaagagacaggaagccctgagaccatacctgagcagcgaggaagatcggaagaagggaaagaaattcgctcggtaccagctgggcgacctgctgctgcacctggaaaagaagcacggcgaggactggggaaaggtgtacgacgaggcctgggagcggattgacaagaaagtggaaggcctgagcaagcacatcaagctggaagaggaacggagaagcgaggacgcccagagcaaggccgccctgaccgactggctgcgggctaaggccagcttcgtgatcgagggcctgaaggaggccgacaaggacgagttctgcagatgcgagctgaagctgcagaagtggtacggggacctgcggggaaagcccttcgccatcgaagccgagaacagcatcctggacatcagcggcttcagcaagcagtacaactgtgccttcatctggcagaaggacggcgtgaagaagctgaacctgtacctgatcatcaactacttcaagggcggcaagctgcggttcaagaagatcaaacctgaagccttcgaagccaacagattctacaccgtgatcaacaaaaagagcggcgagatcgtgcccatggaggtgaacttcaacttcgacgaccccaacctgatcatcctgcctctggcctttggcaagagacagggcagagaattcatctggaacgacctgctgtccctggaaaccggcagcctgaagctggccaacggaagagtgatcgagaagacactgtacaacagaagaacccggcaggatgagcctgccctgttcgtggccctgaccttcgagcggcgggaggtcctggactcctccaatatcaaaccaatgaacctgatcggcgtggcaagaggcgaaaacatccccgccgtgatcgccctgaccgaccccgagggctgcccactgagccggtttaaggatagcctgggaaacccaacccacatcctgagaatcggcgagagctataaggagaagcagcggaccatccaggccaagaaggaggtggagcagcggagagccggcggctacagccggaagtacgccagcaaagccaagaatctggcagacgatatggtgagaaacaccgctagagatctgctgtactacgccgtgacccaggatgccatgctgatcttcgccaacctgagccggggcttcggccggcagggcaagcggaccttcatggccgagagacagtacacacggatggaggactggctgaccgccaagctggcctacgagggcctgagcaagacctacctgtccaagacactggcccagtacacctccaagacatgcagcaactgtgggtttaccatcaccagcgccgactacgacagggtgctggagaagctgaagaagacagcaacaggctggatgaccacaattaacggcaaggagctgaaggtggagggccagattacctactacaacagatacaagagacagaacgtagtcaaggacctgtccgtcgagctggatagactgagcgaagaatctgtgaacaacgacatctcctcctggacaaagggcagaagcggagaagctctgagcctcctgaagaaaagattctcccatagacccgtgcaggagaagttcgtgtgcctgaactgcggcttcgagacacacgcagccgagcaagccgccctgaacatcgccagatcctggctgttcctgcggagccaggagtacaagaaataccagacaaacaagacaaccggcaacaccgataagagagccttcgtcgagacctggcagtccttttaccggaagaagcttaaggaggtgtggaaacctgccgtgcggtctggcggatctggcggaggctcctagccagagcagcgtgaccttcggcgacgtggccgtggacttcagccaggacgagtgggcctggctggacgccacccagaggagcctgtacaggagcgtgatgctggagaactacaggaacctggtgagcctgggcctgtgcagcagcaagcccgacatgatcagcagcctggagcagaggaaggagccctggaccgtgaagaggaagctgcccggcggcggctgccccgacccccaggccgtgggatctggctccggcagcggccccaagaaaaagagaaaagtctaagctgccttctgcggggcttgccttctggccatgcccttcttctctcccttgcacctgtacctcttggtctttgaataaagcctgagtaggaaggctagcaaaaaaaaaaaaaaaaaaaaaaaaaaaaaaaaaaaaaaaaaaaaaaaaaaaaaaaaaaaaaaaaaaaaaaaaaaaaaaaa

SEQ ID NO: 15301 - RNA, 9485 nt, synthetic construct
  source 1..9485: mol_type = other RNA
aggaaataagagagaaaagaagagtaagaagaaatataagagccaccatggcccctaagaagaagcgtaaagtgagccggatggaacgcctcgtctacgaggtgcggcagaagtgcagaaacatcgaggacatctgcatctcctgcggatctctgaacgtgaccctggagcacccactgttcatcggcggcatgtgccagaactgtaaaaactgttttctggagtgtgcctatcaatacgacgatgacggctaccagagctactgcaccatctgttgcggcggaagagaggtgctgatgtgtggaaataacaactgctgccggtgcttctgcgtggaatgcgtggacctgctggtgggccccggcgccgcccaggccgctattaaggaagatccttggaactgctacatgtgcggccacaagggcacatacggcctgctgagacggagagaggactggcctagcagactgcagatgttcttcgccaataaccacgaccaggagttcgacccccctaaggtgtaccctcccgtccccgccgagaagagaaagcccatccgggtcctgagcctgttcgatggcatcgccaccggtctgctggtgctgaaggacctgggcatccaggtggataggtacattgcctccgaggtgtgcgaggactccatcaccgtgggaatggtgcgtcatcagggcaagatcatgtacgtgggcgacgtgcggagcgtgacacagaagcatatccaggagtggggccctttcgacctggtgatcggcggcagcccttgcaatgacctgagcatcgtgaacccagcccggaagggcctgtacgagggaaccggcagactgttcttcgagttttacagactgctgcacgacgcccggcctaaggaaggcgacgaccggcccttcttttggctgttcgagaatgtggtggccatgggagtcagcgacaagcgggatattagccggttcctggagagcaaccccgtgatgatcgatgccaaggaagtgagcgccgcccaccgggccagatacttctggggcaatctgcctggcatgaacagacccctggccagcaccgtgaacgacaagctggagctgcaggagtgcctggagcacggccggatcgccaagttcagcaaggtgagaaccatcaccacccgaagcaacagcatcaaacaaggcaaggaccagcactttcctgtgttcatgaacgagaaggaggacatcctgtggtgtaccgagatggagagagtgttcgggttcccagtccactacacagatgtcagcaacatgtctagactggccagacagagactgctgggaagaagctggtccgtccctgtgatcagacacctgttcgcccctctgaaggagtacttcgcctgcgtgagcagcggcaacagcaacgccaacagccggggccccagcttctctagcggcctggtgccactgtccctgagagggagccacatgggccccatggagatctacaaaaccgtgagcgcctggaagcggcagcctgtgcgcgtgctgagcctgtttcggaatatcgataaagtcctgaaaagcctgggattcctggagagcggctctggctccggcggtggcaccctgaagtacgtggaggatgtgacaaacgtggtcagacgggatgtggagaagtggggccccttcgatctggtgtacggcagcacccaacccctgggcagctcttgtgaccggtgccctggctggtacatgtttcagttccaccggatcctgcagtacgccctgccgagacaggagtcccagcggccattcttttggattttcatggacaacttgctgctgaccgaggatgaccaggaaactaccactcggttcctgcagaccgaagccgtgaccctgcaggacgtgagaggccgggactaccagaacgccatgcgggtgtggtccaacatccctggactgaaaagcaagcacgcacctctgacccctaaagaagaggagtacctgcaggcccaggtgcggagcagaagcaagctggacgcccctaaggtggatctgctggtgaagaattgcctcctgcccctgagagagtacttcaagtatttcagccagaatagtctgcccctgggaggcagcggcggcggcgccctggtgacatttgaggacgtcgccgtgcggttcacccaggaggaatgggctctgctggatccttctcagaaaatcctgtaccgggacgtgatgagagagacataccggaatctgacctccgtgggcatcaactgggaatgttgggaccttgaagcctgcttcagaagcctgggaagaaacctgagagtgcaggtggtgaagagaaagtgcgagctgaccaacagcggcccctgcgccgagggcggcccaagcagcggcgcccctcctcccagcggcggcagcccagccggctccccaacctctaccgaggagggcacctctgagtccgccacccccgagagcggccctggcacctccaccgagcccagcgagggcagcgcacccggcagccctgccggcagccccacctccacagaggagggaaccagcaccgagcccagcgaaggcagcgccccaggcaccagcaccgagcctagtgagcaggagattaaacggatcaacaagatcagaagaagacttgtgaaagacagcaacaccaagaaggccggcaagacaggccccatgaaaaccctgctggttagagtgatgacacccgatctgagagagcggctggaaaacctgagaaagaagcctgaaaatatcccccagcccatcagcaatacatctagagccaacctgaataagctgctgaccgattacaccgaaatgaagaaggcgatcctgcatgtgtactgggaagagttccagaaggaccctgtgggcctgatgagccgggtggcccagcctgccagcaagaagatcgatcagaacaagctgaaacctgagatggacgagaagggcaacctgaccaccgccggctttgcctgctctcagtgtggccagcccctgttcgtgtacaagctggagcaggtgtctgagaagggcaaggcttacaccaactacttcggacggtgcaatgtggccgagcacgaaaagctgatcctgctggcccagctgaagcccgagaaggatagcgacgaagccgtgacatatagcctgggaaagtttgggcagagggccctggatttctacagcattcatgtgaccaaggagtccacccaccccgtgaagcccctggcccagatcgccggaaacagatacgcctccggacctgtgggaaaggccctgagcgacgcatgtatgggcacaatcgcctccttcctgtctaagtaccaggacatcatcatcgaacaccagaaggtggtgaagggcaaccagaagagactggagagcctgcgggagctggccggcaaggaaaacctggaataccctagcgtgaccctgccacctcagcctcacaccaaggagggcgttgatgcctacaacgaagtgatcgcccgggtgcgaatgtgggtgaacctgaacctgtggcagaagctgaagctaagcagagatgatgccaagcctctgctgagactgaagggattcccttcctttcctctggtcgagagacaggccaacgaagtggactggtgggacatggtgtgtaacgtgaagaagctgatcaacgagaaaaaggaggatggcaaggtgttttggcagaatctggctggctacaagagacaggaagccctgagaccatacctgagcagcgaggaagatcggaagaagggaaagaaattcgctcggtaccagctgggcgacctgctgctgcacctggaaaagaagcacggcgaggactggggaaaggtgtacgacgaggcctgggagcggattgacaagaaagtggaaggcctgagcaagcacatcaagctggaagaggaacggagaagcgaggacgcccagagcaaggccgccctgaccgactggctgcgggctaaggccagcttcgtgatcgagggcctgaaggaggccgacaaggacgagttctgcagatgcgagctgaagctgcagaagtggtacggggacctgcggggaaagcccttcgccatcgaagccgagaacagcatcctggacatcagcggcttcagcaagcagtacaactgtgccttcatctggcagaaggacggcgtgaagaagctgaacctgtacctgatcatcaactacttcaagggcggcaagctgcggttcaagaagatcaaacctgaagccttcgaagccaacagattctacaccgtgatcaacaaaaagagcggcgagatcgtgcccatggaggtgaacttcaacttcgacgaccccaacctgatcatcctgcctctggcctttggcaagagacagggcagagaattcatctggaacgacctgctgtccctggaaaccggcagcctgaagctggccaacggaagagtgatcgagaagacactgtacaacagaagaacccggcaggatgagcctgccctgttcgtggccctgaccttcgagcggcgggaggtcctggactcctccaatatcaaaccaatgaacctgatcggcgtggcaagaggcgaaaacatccccgccgtgatcgccctgaccgaccccgagggctgcccactgagccggtttaaggatagcctgggaaacccaacccacatcctgagaatcggcgagagctataaggagaagcagcggaccatccaggccaagaaggaggtggagcagcggagagccggcggctacagccggaagtacgccagcaaagccaagaatctggcagacgatatggtgagaaacaccgctagagatctgctgtactacgccgtgacccaggatgccatgctgatcttcgccaacctgagccggggcttcggccggcagggcaagcggaccttcatggccgagagacagtacacacggatggaggactggctgaccgccaagctggcctacgagggcctgagcaagacctacctgtccaagacactggcccagtacacctccaagacatgcagcaactgtgggtttaccatcaccagcgccgactacgacagggtgctggagaagctgaagaagacagcaacaggctggatgaccacaattaacggcaaggagctgaaggtggagggccagattacctactacaacagatacaagagacagaacgtagtcaaggacctgtccgtcgagctggatagactgagcgaagaatctgtgaacaacgacatctcctcctggacaaagggcagaagcggagaagctctgagcctcctgaagaaaagattctcccatagacccgtgcaggagaagttcgtgtgcctgaactgcggcttcgagacacacgcagccgagcaagccgccctgaacatcgccagatcctggctgttcctgcggagccaggagtacaagaaataccagacaaacaagacaaccggcaacaccgataagagagccttcgtcgagacctggcagtccttttaccggaagaagcttaaggaggtgtggaaacctgccgtgcggtctggcggatctggcggaggctccagccagggcagcgtgaccttcagggacgtggccatcgacttcagccaggaggagtggaagtggctgcagcccgcccagagggacctgtacaggagggtgatgctggagaactacggccacctggtgagcctgggcctgagcatcagcaagcccgacgtggtgagcctgctggagcagggcaaggagccctggctgggcaagaggaacgtgaagagggacctgttcagcgccagcgagagcagcggcggcccaagcagcggcgcccctcctcccagcggcggcagcccagccggctccccaacctctaccgaggagggcacctctgagtccgccacccccgagagcggccctggcacctccaccgagcccagcgagggcagcgcacccggcagccctgccggcagccccacctccacagaggagggaaccagcaccgagcccagcgaaggcagcgccccaggcaccagcaccgagcctagtgagcaggagattaaacggatcaacaagatcagaagaagacttgtgaaagacagcaacaccaagaaggccggcaagacaggccccatgaaaaccctgctggttagagtgatgacacccgatctgagagagcggctggaaaacctgagaaagaagcctgaaaatatcccccagcccatcagcaatacatctagagccaacctgaataagctgctgaccgattacaccgaaatgaagaaggcgatcctgcatgtgtactgggaagagttccagaaggaccctgtgggcctgatgagccgggtggcccagcctgccagcaagaagatcgatcagaacaagctgaaacctgagatggacgagaagggcaacctgaccaccgccggctttgcctgctctcagtgtggccagcccctgttcgtgtacaagctggagcaggtgtctgagaagggcaaggcttacaccaactacttcggacggtgcaatgtggccgagcacgaaaagctgatcctgctggcccagctgaagcccgagaaggatagcgacgaagccgtgacatatagcctgggaaagtttgggcagagggccctggatttctacagcattcatgtgaccaaggagtccacccaccccgtgaagcccctggcccagatcgccggaaacagatacgcctccggacctgtgggaaaggccctgagcgacgcatgtatgggcacaatcgcctccttcctgtctaagtaccaggacatcatcatcgaacaccagaaggtggtgaagggcaaccagaagagactggagagcctgcgggagctggccggcaaggaaaacctggaataccctagcgtgaccctgccacctcagcctcacaccaaggagggcgttgatgcctacaacgaagtgatcgcccgggtgcgaatgtgggtgaacctgaacctgtggcagaagctgaagctaagcagagatgatgccaagcctctgctgagactgaagggattcccttcctttcctctggtcgagagacaggccaacgaagtggactggtgggacatggtgtgtaacgtgaagaagctgatcaacgagaaaaaggaggatggcaaggtgttttggcagaatctggctggctacaagagacaggaagccctgagaccatacctgagcagcgaggaagatcggaagaagggaaagaaattcgctcggtaccagctgggcgacctgctgctgcacctggaaaagaagcacggcgaggactggggaaaggtgtacgacgaggcctgggagcggattgacaagaaagtggaaggcctgagcaagcacatcaagctggaagaggaacggagaagcgaggacgcccagagcaaggccgccctgaccgactggctgcgggctaaggccagcttcgtgatcgagggcctgaaggaggccgacaaggacgagttctgcagatgcgagctgaagctgcagaagtggtacggggacctgcggggaaagcccttcgccatcgaagccgagaacagcatcctggacatcagcggcttcagcaagcagtacaactgtgccttcatctggcagaaggacggcgtgaagaagctgaacctgtacctgatcatcaactacttcaagggcggcaagctgcggttcaagaagatcaaacctgaagccttcgaagccaacagattctacaccgtgatcaacaaaaagagcggcgagatcgtgcccatggaggtgaacttcaacttcgacgaccccaacctgatcatcctgcctctggcctttggcaagagacagggcagagaattcatctggaacgacctgctgtccctggaaaccggcagcctgaagctggccaacggaagagtgatcgagaagacactgtacaacagaagaacccggcaggatgagcctgccctgttcgtggccctgaccttcgagcggcgggaggtcctggactcctccaatatcaaaccaatgaacctgatcggcgtggcaagaggcgaaaacatccccgccgtgatcgccctgaccgaccccgagggctgcccactgagccggtttaaggatagcctgggaaacccaacccacatcctgagaatcggcgagagctataaggagaagcagcggaccatccaggccaagaaggaggtggagcagcggagagccggcggctacagccggaagtacgccagcaaagccaagaatctggcagacgatatggtgagaaacaccgctagagatctgctgtactacgccgtgacccaggatgccatgctgatcttcgccaacctgagccggggcttcggccggcagggcaagcggaccttcatggccgagagacagtacacacggatggaggactggctgaccgccaagctggcctacgagggcctgagcaagacctacctgtccaagacactggcccagtacacctccaagacatgcagcaactgtgggtttaccatcaccagcgccgactacgacagggtgctggagaagctgaagaagacagcaacaggctggatgaccacaattaacggcaaggagctgaaggtggagggccagattacctactacaacagatacaagagacagaacgtagtcaaggacctgtccgtcgagctggatagactgagcgaagaatctgtgaacaacgacatctcctcctggacaaagggcagaagcggagaagctctgagcctcctgaagaaaagattctcccatagacccgtgcaggagaagttcgtgtgcctgaactgcggcttcgagacacacgcagccgagcaagccgccctgaacatcgccagatcctggctgttcctgcggagccaggagtacaagaaataccagacaaacaagacaaccggcaacaccgataagagagccttcgtcgagacctggcagtccttttaccggaagaagcttaaggaggtgtggaaacctgccgtgcggtctggcggatctggcggaggctcctagccagggcagcgtgaccttcagggacgtggccatcgacttcagccaggaggagtggaagtggctgcagcccgcccagagggacctgtacaggagggtgatgctggagaactacggccacctggtgagcctgggcctgagcatcagcaagcccgacgtggtgagcctgctggagcagggcaaggagccctggctgggcaagaggaacgtgaagagggacctgttcagcgccagcgagagcagcggatctggctccggcagcggccccaagaaaaagagaaaagtctaagctgccttctgcggggcttgccttctggccatgcccttcttctctcccttgcacctgtacctcttggtctttgaataaagcctgagtaggaaggctagcaaaaaaaaaaaaaaaaaaaaaaaaaaaaaaaaaaaaaaaaaaaaaaaaaaaaaaaaaaaaaaaaaaaaaaaaaaaaaaaa

SEQ ID NO: 15302 - RNA, 9485 nt, synthetic construct
  source 1..9485: mol_type = other RNA
aggaaataagagagaaaagaagagtaagaagaaatataagagccaccatggcccctaagaagaagcgtaaagtgagccggatggaacgcctcgtctacgaggtgcggcagaagtgcagaaacatcgaggacatctgcatctcctgcggatctctgaacgtgaccctggagcacccactgttcatcggcggcatgtgccagaactgtaaaaactgttttctggagtgtgcctatcaatacgacgatgacggctaccagagctactgcaccatctgttgcggcggaagagaggtgctgatgtgtggaaataacaactgctgccggtgcttctgcgtggaatgcgtggacctgctggtgggccccggcgccgcccaggccgctattaaggaagatccttggaactgctacatgtgcggccacaagggcacatacggcctgctgagacggagagaggactggcctagcagactgcagatgttcttcgccaataaccacgaccaggagttcgacccccctaaggtgtaccctcccgtccccgccgagaagagaaagcccatccgggtcctgagcctgttcgatggcatcgccaccggtctgctggtgctgaaggacctgggcatccaggtggataggtacattgcctccgaggtgtgcgaggactccatcaccgtgggaatggtgcgtcatcagggcaagatcatgtacgtgggcgacgtgcggagcgtgacacagaagcatatccaggagtggggccctttcgacctggtgatcggcggcagcccttgcaatgacctgagcatcgtgaacccagcccggaagggcctgtacgagggaaccggcagactgttcttcgagttttacagactgctgcacgacgcccggcctaaggaaggcgacgaccggcccttcttttggctgttcgagaatgtggtggccatgggagtcagcgacaagcgggatattagccggttcctggagagcaaccccgtgatgatcgatgccaaggaagtgagcgccgcccaccgggccagatacttctggggcaatctgcctggcatgaacagacccctggccagcaccgtgaacgacaagctggagctgcaggagtgcctggagcacggccggatcgccaagttcagcaaggtgagaaccatcaccacccgaagcaacagcatcaaacaaggcaaggaccagcactttcctgtgttcatgaacgagaaggaggacatcctgtggtgtaccgagatggagagagtgttcgggttcccagtccactacacagatgtcagcaacatgtctagactggccagacagagactgctgggaagaagctggtccgtccctgtgatcagacacctgttcgcccctctgaaggagtacttcgcctgcgtgagcagcggcaacagcaacgccaacagccggggccccagcttctctagcggcctggtgccactgtccctgagagggagccacatgggccccatggagatctacaaaaccgtgagcgcctggaagcggcagcctgtgcgcgtgctgagcctgtttcggaatatcgataaagtcctgaaaagcctgggattcctggagagcggctctggctccggcggtggcaccctgaagtacgtggaggatgtgacaaacgtggtcagacgggatgtggagaagtggggccccttcgatctggtgtacggcagcacccaacccctgggcagctcttgtgaccggtgccctggctggtacatgtttcagttccaccggatcctgcagtacgccctgccgagacaggagtcccagcggccattcttttggattttcatggacaacttgctgctgaccgaggatgaccaggaaactaccactcggttcctgcagaccgaagccgtgaccctgcaggacgtgagaggccgggactaccagaacgccatgcgggtgtggtccaacatccctggactgaaaagcaagcacgcacctctgacccctaaagaagaggagtacctgcaggcccaggtgcggagcagaagcaagctggacgcccctaaggtggatctgctggtgaagaattgcctcctgcccctgagagagtacttcaagtatttcagccagaatagtctgcccctgggaggcagcggcggcggcgccctggtgacatttgaggacgtcgccgtgcggttcacccaggaggaatgggctctgctggatccttctcagaaaatcctgtaccgggacgtgatgagagagacataccggaatctgacctccgtgggcatcaactgggaatgttgggaccttgaagcctgcttcagaagcctgggaagaaacctgagagtgcaggtggtgaagagaaagtgcgagctgaccaacagcggcccctgcgccgagggcggcccaagcagcggcgcccctcctcccagcggcggcagcccagccggctccccaacctctaccgaggagggcacctctgagtccgccacccccgagagcggccctggcacctccaccgagcccagcgagggcagcgcacccggcagccctgccggcagccccacctccacagaggagggaaccagcaccgagcccagcgaaggcagcgccccaggcaccagcaccgagcctagtgagcaggagattaaacggatcaacaagatcagaagaagacttgtgaaagacagcaacaccaagaaggccggcaagacaggccccatgaaaaccctgctggttagagtgatgacacccgatctgagagagcggctggaaaacctgagaaagaagcctgaaaatatcccccagcccatcagcaatacatctagagccaacctgaataagctgctgaccgattacaccgaaatgaagaaggcgatcctgcatgtgtactgggaagagttccagaaggaccctgtgggcctgatgagccgggtggcccagcctgccagcaagaagatcgatcagaacaagctgaaacctgagatggacgagaagggcaacctgaccaccgccggctttgcctgctctcagtgtggccagcccctgttcgtgtacaagctggagcaggtgtctgagaagggcaaggcttacaccaactacttcggacggtgcaatgtggccgagcacgaaaagctgatcctgctggcccagctgaagcccgagaaggatagcgacgaagccgtgacatatagcctgggaaagtttgggcagagggccctggatttctacagcattcatgtgaccaaggagtccacccaccccgtgaagcccctggcccagatcgccggaaacagatacgcctccggacctgtgggaaaggccctgagcgacgcatgtatgggcacaatcgcctccttcctgtctaagtaccaggacatcatcatcgaacaccagaaggtggtgaagggcaaccagaagagactggagagcctgcgggagctggccggcaaggaaaacctggaataccctagcgtgaccctgccacctcagcctcacaccaaggagggcgttgatgcctacaacgaagtgatcgcccgggtgcgaatgtgggtgaacctgaacctgtggcagaagctgaagctaagcagagatgatgccaagcctctgctgagactgaagggattcccttcctttcctctggtcgagagacaggccaacgaagtggactggtgggacatggtgtgtaacgtgaagaagctgatcaacgagaaaaaggaggatggcaaggtgttttggcagaatctggctggctacaagagacaggaagccctgagaccatacctgagcagcgaggaagatcggaagaagggaaagaaattcgctcggtaccagctgggcgacctgctgctgcacctggaaaagaagcacggcgaggactggggaaaggtgtacgacgaggcctgggagcggattgacaagaaagtggaaggcctgagcaagcacatcaagctggaagaggaacggagaagcgaggacgcccagagcaaggccgccctgaccgactggctgcgggctaaggccagcttcgtgatcgagggcctgaaggaggccgacaaggacgagttctgcagatgcgagctgaagctgcagaagtggtacggggacctgcggggaaagcccttcgccatcgaagccgagaacagcatcctggacatcagcggcttcagcaagcagtacaactgtgccttcatctggcagaaggacggcgtgaagaagctgaacctgtacctgatcatcaactacttcaagggcggcaagctgcggttcaagaagatcaaacctgaagccttcgaagccaacagattctacaccgtgatcaacaaaaagagcggcgagatcgtgcccatggaggtgaacttcaacttcgacgaccccaacctgatcatcctgcctctggcctttggcaagagacagggcagagaattcatctggaacgacctgctgtccctggaaaccggcagcctgaagctggccaacggaagagtgatcgagaagacactgtacaacagaagaacccggcaggatgagcctgccctgttcgtggccctgaccttcgagcggcgggaggtcctggactcctccaatatcaaaccaatgaacctgatcggcgtggcaagaggcgaaaacatccccgccgtgatcgccctgaccgaccccgagggctgcccactgagccggtttaaggatagcctgggaaacccaacccacatcctgagaatcggcgagagctataaggagaagcagcggaccatccaggccaagaaggaggtggagcagcggagagccggcggctacagccggaagtacgccagcaaagccaagaatctggcagacgatatggtgagaaacaccgctagagatctgctgtactacgccgtgacccaggatgccatgctgatcttcgccaacctgagccggggcttcggccggcagggcaagcggaccttcatggccgagagacagtacacacggatggaggactggctgaccgccaagctggcctacgagggcctgagcaagacctacctgtccaagacactggcccagtacacctccaagacatgcagcaactgtgggtttaccatcaccagcgccgactacgacagggtgctggagaagctgaagaagacagcaacaggctggatgaccacaattaacggcaaggagctgaaggtggagggccagattacctactacaacagatacaagagacagaacgtagtcaaggacctgtccgtcgagctggatagactgagcgaagaatctgtgaacaacgacatctcctcctggacaaagggcagaagcggagaagctctgagcctcctgaagaaaagattctcccatagacccgtgcaggagaagttcgtgtgcctgaactgcggcttcgagacacacgcagccgagcaagccgccctgaacatcgccagatcctggctgttcctgcggagccaggagtacaagaaataccagacaaacaagacaaccggcaacaccgataagagagccttcgtcgagacctggcagtccttttaccggaagaagcttaaggaggtgtggaaacctgccgtgcggtctggcggatctggcggaggctccatggccttcgaggacgtggccgtgtacttcagccaggaggagtggggcctgctggacaccgcccagagggccctgtacaggagggtgatgctggacaacttcgccctggtggccagcctgggcctgagcaccaccaggcccagggtggtgatccagctggagaggggcgaggagccctgggtgcccagcggcaccgacatgaccatgagcaggaacgcccacaggaggaggaaccccggcagcggcggcccaagcagcggcgcccctcctcccagcggcggcagcccagccggctccccaacctctaccgaggagggcacctctgagtccgccacccccgagagcggccctggcacctccaccgagcccagcgagggcagcgcacccggcagccctgccggcagccccacctccacagaggagggaaccagcaccgagcccagcgaaggcagcgccccaggcaccagcaccgagcctagtgagcaggagattaaacggatcaacaagatcagaagaagacttgtgaaagacagcaacaccaagaaggccggcaagacaggccccatgaaaaccctgctggttagagtgatgacacccgatctgagagagcggctggaaaacctgagaaagaagcctgaaaatatcccccagcccatcagcaatacatctagagccaacctgaataagctgctgaccgattacaccgaaatgaagaaggcgatcctgcatgtgtactgggaagagttccagaaggaccctgtgggcctgatgagccgggtggcccagcctgccagcaagaagatcgatcagaacaagctgaaacctgagatggacgagaagggcaacctgaccaccgccggctttgcctgctctcagtgtggccagcccctgttcgtgtacaagctggagcaggtgtctgagaagggcaaggcttacaccaactacttcggacggtgcaatgtggccgagcacgaaaagctgatcctgctggcccagctgaagcccgagaaggatagcgacgaagccgtgacatatagcctgggaaagtttgggcagagggccctggatttctacagcattcatgtgaccaaggagtccacccaccccgtgaagcccctggcccagatcgccggaaacagatacgcctccggacctgtgggaaaggccctgagcgacgcatgtatgggcacaatcgcctccttcctgtctaagtaccaggacatcatcatcgaacaccagaaggtggtgaagggcaaccagaagagactggagagcctgcgggagctggccggcaaggaaaacctggaataccctagcgtgaccctgccacctcagcctcacaccaaggagggcgttgatgcctacaacgaagtgatcgcccgggtgcgaatgtgggtgaacctgaacctgtggcagaagctgaagctaagcagagatgatgccaagcctctgctgagactgaagggattcccttcctttcctctggtcgagagacaggccaacgaagtggactggtgggacatggtgtgtaacgtgaagaagctgatcaacgagaaaaaggaggatggcaaggtgttttggcagaatctggctggctacaagagacaggaagccctgagaccatacctgagcagcgaggaagatcggaagaagggaaagaaattcgctcggtaccagctgggcgacctgctgctgcacctggaaaagaagcacggcgaggactggggaaaggtgtacgacgaggcctgggagcggattgacaagaaagtggaaggcctgagcaagcacatcaagctggaagaggaacggagaagcgaggacgcccagagcaaggccgccctgaccgactggctgcgggctaaggccagcttcgtgatcgagggcctgaaggaggccgacaaggacgagttctgcagatgcgagctgaagctgcagaagtggtacggggacctgcggggaaagcccttcgccatcgaagccgagaacagcatcctggacatcagcggcttcagcaagcagtacaactgtgccttcatctggcagaaggacggcgtgaagaagctgaacctgtacctgatcatcaactacttcaagggcggcaagctgcggttcaagaagatcaaacctgaagccttcgaagccaacagattctacaccgtgatcaacaaaaagagcggcgagatcgtgcccatggaggtgaacttcaacttcgacgaccccaacctgatcatcctgcctctggcctttggcaagagacagggcagagaattcatctggaacgacctgctgtccctggaaaccggcagcctgaagctggccaacggaagagtgatcgagaagacactgtacaacagaagaacccggcaggatgagcctgccctgttcgtggccctgaccttcgagcggcgggaggtcctggactcctccaatatcaaaccaatgaacctgatcggcgtggcaagaggcgaaaacatccccgccgtgatcgccctgaccgaccccgagggctgcccactgagccggtttaaggatagcctgggaaacccaacccacatcctgagaatcggcgagagctataaggagaagcagcggaccatccaggccaagaaggaggtggagcagcggagagccggcggctacagccggaagtacgccagcaaagccaagaatctggcagacgatatggtgagaaacaccgctagagatctgctgtactacgccgtgacccaggatgccatgctgatcttcgccaacctgagccggggcttcggccggcagggcaagcggaccttcatggccgagagacagtacacacggatggaggactggctgaccgccaagctggcctacgagggcctgagcaagacctacctgtccaagacactggcccagtacacctccaagacatgcagcaactgtgggtttaccatcaccagcgccgactacgacagggtgctggagaagctgaagaagacagcaacaggctggatgaccacaattaacggcaaggagctgaaggtggagggccagattacctactacaacagatacaagagacagaacgtagtcaaggacctgtccgtcgagctggatagactgagcgaagaatctgtgaacaacgacatctcctcctggacaaagggcagaagcggagaagctctgagcctcctgaagaaaagattctcccatagacccgtgcaggagaagttcgtgtgcctgaactgcggcttcgagacacacgcagccgagcaagccgccctgaacatcgccagatcctggctgttcctgcggagccaggagtacaagaaataccagacaaacaagacaaccggcaacaccgataagagagccttcgtcgagacctggcagtccttttaccggaagaagcttaaggaggtgtggaaacctgccgtgcggtctggcggatctggcggaggctcctatggccttcgaggacgtggccgtgtacttcagccaggaggagtggggcctgctggacaccgcccagagggccctgtacaggagggtgatgctggacaacttcgccctggtggccagcctgggcctgagcaccaccaggcccagggtggtgatccagctggagaggggcgaggagccctgggtgcccagcggcaccgacatgaccatgagcaggaacgcccacaggaggaggaaccccggcagcggatctggctccggcagcggccccaagaaaaagagaaaagtctaagctgccttctgcggggcttgccttctggccatgcccttcttctctcccttgcacctgtacctcttggtctttgaataaagcctgagtaggaaggctagcaaaaaaaaaaaaaaaaaaaaaaaaaaaaaaaaaaaaaaaaaaaaaaaaaaaaaaaaaaaaaaaaaaaaaaaaaaaaaaaa

SEQ ID NO: 15303 - RNA, 9485 nt, synthetic construct
  source 1..9485: mol_type = other RNA
aggaaataagagagaaaagaagagtaagaagaaatataagagccaccatggcccctaagaagaagcgtaaagtgagccggatggaacgcctcgtctacgaggtgcggcagaagtgcagaaacatcgaggacatctgcatctcctgcggatctctgaacgtgaccctggagcacccactgttcatcggcggcatgtgccagaactgtaaaaactgttttctggagtgtgcctatcaatacgacgatgacggctaccagagctactgcaccatctgttgcggcggaagagaggtgctgatgtgtggaaataacaactgctgccggtgcttctgcgtggaatgcgtggacctgctggtgggccccggcgccgcccaggccgctattaaggaagatccttggaactgctacatgtgcggccacaagggcacatacggcctgctgagacggagagaggactggcctagcagactgcagatgttcttcgccaataaccacgaccaggagttcgacccccctaaggtgtaccctcccgtccccgccgagaagagaaagcccatccgggtcctgagcctgttcgatggcatcgccaccggtctgctggtgctgaaggacctgggcatccaggtggataggtacattgcctccgaggtgtgcgaggactccatcaccgtgggaatggtgcgtcatcagggcaagatcatgtacgtgggcgacgtgcggagcgtgacacagaagcatatccaggagtggggccctttcgacctggtgatcggcggcagcccttgcaatgacctgagcatcgtgaacccagcccggaagggcctgtacgagggaaccggcagactgttcttcgagttttacagactgctgcacgacgcccggcctaaggaaggcgacgaccggcccttcttttggctgttcgagaatgtggtggccatgggagtcagcgacaagcgggatattagccggttcctggagagcaaccccgtgatgatcgatgccaaggaagtgagcgccgcccaccgggccagatacttctggggcaatctgcctggcatgaacagacccctggccagcaccgtgaacgacaagctggagctgcaggagtgcctggagcacggccggatcgccaagttcagcaaggtgagaaccatcaccacccgaagcaacagcatcaaacaaggcaaggaccagcactttcctgtgttcatgaacgagaaggaggacatcctgtggtgtaccgagatggagagagtgttcgggttcccagtccactacacagatgtcagcaacatgtctagactggccagacagagactgctgggaagaagctggtccgtccctgtgatcagacacctgttcgcccctctgaaggagtacttcgcctgcgtgagcagcggcaacagcaacgccaacagccggggccccagcttctctagcggcctggtgccactgtccctgagagggagccacatgggccccatggagatctacaaaaccgtgagcgcctggaagcggcagcctgtgcgcgtgctgagcctgtttcggaatatcgataaagtcctgaaaagcctgggattcctggagagcggctctggctccggcggtggcaccctgaagtacgtggaggatgtgacaaacgtggtcagacgggatgtggagaagtggggccccttcgatctggtgtacggcagcacccaacccctgggcagctcttgtgaccggtgccctggctggtacatgtttcagttccaccggatcctgcagtacgccctgccgagacaggagtcccagcggccattcttttggattttcatggacaacttgctgctgaccgaggatgaccaggaaactaccactcggttcctgcagaccgaagccgtgaccctgcaggacgtgagaggccgggactaccagaacgccatgcgggtgtggtccaacatccctggactgaaaagcaagcacgcacctctgacccctaaagaagaggagtacctgcaggcccaggtgcggagcagaagcaagctggacgcccctaaggtggatctgctggtgaagaattgcctcctgcccctgagagagtacttcaagtatttcagccagaatagtctgcccctgggaggcagcggcggcggcgccctggtgacatttgaggacgtcgccgtgcggttcacccaggaggaatgggctctgctggatccttctcagaaaatcctgtaccgggacgtgatgagagagacataccggaatctgacctccgtgggcatcaactgggaatgttgggaccttgaagcctgcttcagaagcctgggaagaaacctgagagtgcaggtggtgaagagaaagtgcgagctgaccaacagcggcccctgcgccgagggcggcccaagcagcggcgcccctcctcccagcggcggcagcccagccggctccccaacctctaccgaggagggcacctctgagtccgccacccccgagagcggccctggcacctccaccgagcccagcgagggcagcgcacccggcagccctgccggcagccccacctccacagaggagggaaccagcaccgagcccagcgaaggcagcgccccaggcaccagcaccgagcctagtgagcaggagattaaacggatcaacaagatcagaagaagacttgtgaaagacagcaacaccaagaaggccggcaagacaggccccatgaaaaccctgctggttagagtgatgacacccgatctgagagagcggctggaaaacctgagaaagaagcctgaaaatatcccccagcccatcagcaatacatctagagccaacctgaataagctgctgaccgattacaccgaaatgaagaaggcgatcctgcatgtgtactgggaagagttccagaaggaccctgtgggcctgatgagccgggtggcccagcctgccagcaagaagatcgatcagaacaagctgaaacctgagatggacgagaagggcaacctgaccaccgccggctttgcctgctctcagtgtggccagcccctgttcgtgtacaagctggagcaggtgtctgagaagggcaaggcttacaccaactacttcggacggtgcaatgtggccgagcacgaaaagctgatcctgctggcccagctgaagcccgagaaggatagcgacgaagccgtgacatatagcctgggaaagtttgggcagagggccctggatttctacagcattcatgtgaccaaggagtccacccaccccgtgaagcccctggcccagatcgccggaaacagatacgcctccggacctgtgggaaaggccctgagcgacgcatgtatgggcacaatcgcctccttcctgtctaagtaccaggacatcatcatcgaacaccagaaggtggtgaagggcaaccagaagagactggagagcctgcgggagctggccggcaaggaaaacctggaataccctagcgtgaccctgccacctcagcctcacaccaaggagggcgttgatgcctacaacgaagtgatcgcccgggtgcgaatgtgggtgaacctgaacctgtggcagaagctgaagctaagcagagatgatgccaagcctctgctgagactgaagggattcccttcctttcctctggtcgagagacaggccaacgaagtggactggtgggacatggtgtgtaacgtgaagaagctgatcaacgagaaaaaggaggatggcaaggtgttttggcagaatctggctggctacaagagacaggaagccctgagaccatacctgagcagcgaggaagatcggaagaagggaaagaaattcgctcggtaccagctgggcgacctgctgctgcacctggaaaagaagcacggcgaggactggggaaaggtgtacgacgaggcctgggagcggattgacaagaaagtggaaggcctgagcaagcacatcaagctggaagaggaacggagaagcgaggacgcccagagcaaggccgccctgaccgactggctgcgggctaaggccagcttcgtgatcgagggcctgaaggaggccgacaaggacgagttctgcagatgcgagctgaagctgcagaagtggtacggggacctgcggggaaagcccttcgccatcgaagccgagaacagcatcctggacatcagcggcttcagcaagcagtacaactgtgccttcatctggcagaaggacggcgtgaagaagctgaacctgtacctgatcatcaactacttcaagggcggcaagctgcggttcaagaagatcaaacctgaagccttcgaagccaacagattctacaccgtgatcaacaaaaagagcggcgagatcgtgcccatggaggtgaacttcaacttcgacgaccccaacctgatcatcctgcctctggcctttggcaagagacagggcagagaattcatctggaacgacctgctgtccctggaaaccggcagcctgaagctggccaacggaagagtgatcgagaagacactgtacaacagaagaacccggcaggatgagcctgccctgttcgtggccctgaccttcgagcggcgggaggtcctggactcctccaatatcaaaccaatgaacctgatcggcgtggcaagaggcgaaaacatccccgccgtgatcgccctgaccgaccccgagggctgcccactgagccggtttaaggatagcctgggaaacccaacccacatcctgagaatcggcgagagctataaggagaagcagcggaccatccaggccaagaaggaggtggagcagcggagagccggcggctacagccggaagtacgccagcaaagccaagaatctggcagacgatatggtgagaaacaccgctagagatctgctgtactacgccgtgacccaggatgccatgctgatcttcgccaacctgagccggggcttcggccggcagggcaagcggaccttcatggccgagagacagtacacacggatggaggactggctgaccgccaagctggcctacgagggcctgagcaagacctacctgtccaagacactggcccagtacacctccaagacatgcagcaactgtgggtttaccatcaccagcgccgactacgacagggtgctggagaagctgaagaagacagcaacaggctggatgaccacaattaacggcaaggagctgaaggtggagggccagattacctactacaacagatacaagagacagaacgtagtcaaggacctgtccgtcgagctggatagactgagcgaagaatctgtgaacaacgacatctcctcctggacaaagggcagaagcggagaagctctgagcctcctgaagaaaagattctcccatagacccgtgcaggagaagttcgtgtgcctgaactgcggcttcgagacacacgcagccgagcaagccgccctgaacatcgccagatcctggctgttcctgcggagccaggagtacaagaaataccagacaaacaagacaaccggcaacaccgataagagagccttcgtcgagacctggcagtccttttaccggaagaagcttaaggaggtgtggaaacctgccgtgcggtctggcggatctggcggaggctccaagcccggcgccgtgagcttcgccgacgtggccgtgtacttcagccccgaggagtggggctgcctgaggcccgcccagagggccctgtacagggacgtgatgagggagacctacggccacctgggcgccctgggcttccccggccccaagcccgccctgatcagctggatggagcaggagagcgaggcctggagcagcgccgcccaggaccccgagaagggcgagaacctgggcggcgccaggggcggcccaagcagcggcgcccctcctcccagcggcggcagcccagccggctccccaacctctaccgaggagggcacctctgagtccgccacccccgagagcggccctggcacctccaccgagcccagcgagggcagcgcacccggcagccctgccggcagccccacctccacagaggagggaaccagcaccgagcccagcgaaggcagcgccccaggcaccagcaccgagcctagtgagcaggagattaaacggatcaacaagatcagaagaagacttgtgaaagacagcaacaccaagaaggccggcaagacaggccccatgaaaaccctgctggttagagtgatgacacccgatctgagagagcggctggaaaacctgagaaagaagcctgaaaatatcccccagcccatcagcaatacatctagagccaacctgaataagctgctgaccgattacaccgaaatgaagaaggcgatcctgcatgtgtactgggaagagttccagaaggaccctgtgggcctgatgagccgggtggcccagcctgccagcaagaagatcgatcagaacaagctgaaacctgagatggacgagaagggcaacctgaccaccgccggctttgcctgctctcagtgtggccagcccctgttcgtgtacaagctggagcaggtgtctgagaagggcaaggcttacaccaactacttcggacggtgcaatgtggccgagcacgaaaagctgatcctgctggcccagctgaagcccgagaaggatagcgacgaagccgtgacatatagcctgggaaagtttgggcagagggccctggatttctacagcattcatgtgaccaaggagtccacccaccccgtgaagcccctggcccagatcgccggaaacagatacgcctccggacctgtgggaaaggccctgagcgacgcatgtatgggcacaatcgcctccttcctgtctaagtaccaggacatcatcatcgaacaccagaaggtggtgaagggcaaccagaagagactggagagcctgcgggagctggccggcaaggaaaacctggaataccctagcgtgaccctgccacctcagcctcacaccaaggagggcgttgatgcctacaacgaagtgatcgcccgggtgcgaatgtgggtgaacctgaacctgtggcagaagctgaagctaagcagagatgatgccaagcctctgctgagactgaagggattcccttcctttcctctggtcgagagacaggccaacgaagtggactggtgggacatggtgtgtaacgtgaagaagctgatcaacgagaaaaaggaggatggcaaggtgttttggcagaatctggctggctacaagagacaggaagccctgagaccatacctgagcagcgaggaagatcggaagaagggaaagaaattcgctcggtaccagctgggcgacctgctgctgcacctggaaaagaagcacggcgaggactggggaaaggtgtacgacgaggcctgggagcggattgacaagaaagtggaaggcctgagcaagcacatcaagctggaagaggaacggagaagcgaggacgcccagagcaaggccgccctgaccgactggctgcgggctaaggccagcttcgtgatcgagggcctgaaggaggccgacaaggacgagttctgcagatgcgagctgaagctgcagaagtggtacggggacctgcggggaaagcccttcgccatcgaagccgagaacagcatcctggacatcagcggcttcagcaagcagtacaactgtgccttcatctggcagaaggacggcgtgaagaagctgaacctgtacctgatcatcaactacttcaagggcggcaagctgcggttcaagaagatcaaacctgaagccttcgaagccaacagattctacaccgtgatcaacaaaaagagcggcgagatcgtgcccatggaggtgaacttcaacttcgacgaccccaacctgatcatcctgcctctggcctttggcaagagacagggcagagaattcatctggaacgacctgctgtccctggaaaccggcagcctgaagctggccaacggaagagtgatcgagaagacactgtacaacagaagaacccggcaggatgagcctgccctgttcgtggccctgaccttcgagcggcgggaggtcctggactcctccaatatcaaaccaatgaacctgatcggcgtggcaagaggcgaaaacatccccgccgtgatcgccctgaccgaccccgagggctgcccactgagccggtttaaggatagcctgggaaacccaacccacatcctgagaatcggcgagagctataaggagaagcagcggaccatccaggccaagaaggaggtggagcagcggagagccggcggctacagccggaagtacgccagcaaagccaagaatctggcagacgatatggtgagaaacaccgctagagatctgctgtactacgccgtgacccaggatgccatgctgatcttcgccaacctgagccggggcttcggccggcagggcaagcggaccttcatggccgagagacagtacacacggatggaggactggctgaccgccaagctggcctacgagggcctgagcaagacctacctgtccaagacactggcccagtacacctccaagacatgcagcaactgtgggtttaccatcaccagcgccgactacgacagggtgctggagaagctgaagaagacagcaacaggctggatgaccacaattaacggcaaggagctgaaggtggagggccagattacctactacaacagatacaagagacagaacgtagtcaaggacctgtccgtcgagctggatagactgagcgaagaatctgtgaacaacgacatctcctcctggacaaagggcagaagcggagaagctctgagcctcctgaagaaaagattctcccatagacccgtgcaggagaagttcgtgtgcctgaactgcggcttcgagacacacgcagccgagcaagccgccctgaacatcgccagatcctggctgttcctgcggagccaggagtacaagaaataccagacaaacaagacaaccggcaacaccgataagagagccttcgtcgagacctggcagtccttttaccggaagaagcttaaggaggtgtggaaacctgccgtgcggtctggcggatctggcggaggctcctaagcccggcgccgtgagcttcgccgacgtggccgtgtacttcagccccgaggagtggggctgcctgaggcccgcccagagggccctgtacagggacgtgatgagggagacctacggccacctgggcgccctgggcttccccggccccaagcccgccctgatcagctggatggagcaggagagcgaggcctggagcagcgccgcccaggaccccgagaagggcgagaacctgggcggcgccaggggatctggctccggcagcggccccaagaaaaagagaaaagtctaagctgccttctgcggggcttgccttctggccatgcccttcttctctcccttgcacctgtacctcttggtctttgaataaagcctgagtaggaaggctagcaaaaaaaaaaaaaaaaaaaaaaaaaaaaaaaaaaaaaaaaaaaaaaaaaaaaaaaaaaaaaaaaaaaaaaaaaaaaaaaa

SEQ ID NO: 15304 - RNA, 9485 nt, synthetic construct
  source 1..9485: mol_type = other RNA
aggaaataagagagaaaagaagagtaagaagaaatataagagccaccatggcccctaagaagaagcgtaaagtgagccggatggaacgcctcgtctacgaggtgcggcagaagtgcagaaacatcgaggacatctgcatctcctgcggatctctgaacgtgaccctggagcacccactgttcatcggcggcatgtgccagaactgtaaaaactgttttctggagtgtgcctatcaatacgacgatgacggctaccagagctactgcaccatctgttgcggcggaagagaggtgctgatgtgtggaaataacaactgctgccggtgcttctgcgtggaatgcgtggacctgctggtgggccccggcgccgcccaggccgctattaaggaagatccttggaactgctacatgtgcggccacaagggcacatacggcctgctgagacggagagaggactggcctagcagactgcagatgttcttcgccaataaccacgaccaggagttcgacccccctaaggtgtaccctcccgtccccgccgagaagagaaagcccatccgggtcctgagcctgttcgatggcatcgccaccggtctgctggtgctgaaggacctgggcatccaggtggataggtacattgcctccgaggtgtgcgaggactccatcaccgtgggaatggtgcgtcatcagggcaagatcatgtacgtgggcgacgtgcggagcgtgacacagaagcatatccaggagtggggccctttcgacctggtgatcggcggcagcccttgcaatgacctgagcatcgtgaacccagcccggaagggcctgtacgagggaaccggcagactgttcttcgagttttacagactgctgcacgacgcccggcctaaggaaggcgacgaccggcccttcttttggctgttcgagaatgtggtggccatgggagtcagcgacaagcgggatattagccggttcctggagagcaaccccgtgatgatcgatgccaaggaagtgagcgccgcccaccgggccagatacttctggggcaatctgcctggcatgaacagacccctggccagcaccgtgaacgacaagctggagctgcaggagtgcctggagcacggccggatcgccaagttcagcaaggtgagaaccatcaccacccgaagcaacagcatcaaacaaggcaaggaccagcactttcctgtgttcatgaacgagaaggaggacatcctgtggtgtaccgagatggagagagtgttcgggttcccagtccactacacagatgtcagcaacatgtctagactggccagacagagactgctgggaagaagctggtccgtccctgtgatcagacacctgttcgcccctctgaaggagtacttcgcctgcgtgagcagcggcaacagcaacgccaacagccggggccccagcttctctagcggcctggtgccactgtccctgagagggagccacatgggccccatggagatctacaaaaccgtgagcgcctggaagcggcagcctgtgcgcgtgctgagcctgtttcggaatatcgataaagtcctgaaaagcctgggattcctggagagcggctctggctccggcggtggcaccctgaagtacgtggaggatgtgacaaacgtggtcagacgggatgtggagaagtggggccccttcgatctggtgtacggcagcacccaacccctgggcagctcttgtgaccggtgccctggctggtacatgtttcagttccaccggatcctgcagtacgccctgccgagacaggagtcccagcggccattcttttggattttcatggacaacttgctgctgaccgaggatgaccaggaaactaccactcggttcctgcagaccgaagccgtgaccctgcaggacgtgagaggccgggactaccagaacgccatgcgggtgtggtccaacatccctggactgaaaagcaagcacgcacctctgacccctaaagaagaggagtacctgcaggcccaggtgcggagcagaagcaagctggacgcccctaaggtggatctgctggtgaagaattgcctcctgcccctgagagagtacttcaagtatttcagccagaatagtctgcccctgggaggcagcggcggcggcgccctggtgacatttgaggacgtcgccgtgcggttcacccaggaggaatgggctctgctggatccttctcagaaaatcctgtaccgggacgtgatgagagagacataccggaatctgacctccgtgggcatcaactgggaatgttgggaccttgaagcctgcttcagaagcctgggaagaaacctgagagtgcaggtggtgaagagaaagtgcgagctgaccaacagcggcccctgcgccgagggcggcccaagcagcggcgcccctcctcccagcggcggcagcccagccggctccccaacctctaccgaggagggcacctctgagtccgccacccccgagagcggccctggcacctccaccgagcccagcgagggcagcgcacccggcagccctgccggcagccccacctccacagaggagggaaccagcaccgagcccagcgaaggcagcgccccaggcaccagcaccgagcctagtgagcaggagattaaacggatcaacaagatcagaagaagacttgtgaaagacagcaacaccaagaaggccggcaagacaggccccatgaaaaccctgctggttagagtgatgacacccgatctgagagagcggctggaaaacctgagaaagaagcctgaaaatatcccccagcccatcagcaatacatctagagccaacctgaataagctgctgaccgattacaccgaaatgaagaaggcgatcctgcatgtgtactgggaagagttccagaaggaccctgtgggcctgatgagccgggtggcccagcctgccagcaagaagatcgatcagaacaagctgaaacctgagatggacgagaagggcaacctgaccaccgccggctttgcctgctctcagtgtggccagcccctgttcgtgtacaagctggagcaggtgtctgagaagggcaaggcttacaccaactacttcggacggtgcaatgtggccgagcacgaaaagctgatcctgctggcccagctgaagcccgagaaggatagcgacgaagccgtgacatatagcctgggaaagtttgggcagagggccctggatttctacagcattcatgtgaccaaggagtccacccaccccgtgaagcccctggcccagatcgccggaaacagatacgcctccggacctgtgggaaaggccctgagcgacgcatgtatgggcacaatcgcctccttcctgtctaagtaccaggacatcatcatcgaacaccagaaggtggtgaagggcaaccagaagagactggagagcctgcgggagctggccggcaaggaaaacctggaataccctagcgtgaccctgccacctcagcctcacaccaaggagggcgttgatgcctacaacgaagtgatcgcccgggtgcgaatgtgggtgaacctgaacctgtggcagaagctgaagctaagcagagatgatgccaagcctctgctgagactgaagggattcccttcctttcctctggtcgagagacaggccaacgaagtggactggtgggacatggtgtgtaacgtgaagaagctgatcaacgagaaaaaggaggatggcaaggtgttttggcagaatctggctggctacaagagacaggaagccctgagaccatacctgagcagcgaggaagatcggaagaagggaaagaaattcgctcggtaccagctgggcgacctgctgctgcacctggaaaagaagcacggcgaggactggggaaaggtgtacgacgaggcctgggagcggattgacaagaaagtggaaggcctgagcaagcacatcaagctggaagaggaacggagaagcgaggacgcccagagcaaggccgccctgaccgactggctgcgggctaaggccagcttcgtgatcgagggcctgaaggaggccgacaaggacgagttctgcagatgcgagctgaagctgcagaagtggtacggggacctgcggggaaagcccttcgccatcgaagccgagaacagcatcctggacatcagcggcttcagcaagcagtacaactgtgccttcatctggcagaaggacggcgtgaagaagctgaacctgtacctgatcatcaactacttcaagggcggcaagctgcggttcaagaagatcaaacctgaagccttcgaagccaacagattctacaccgtgatcaacaaaaagagcggcgagatcgtgcccatggaggtgaacttcaacttcgacgaccccaacctgatcatcctgcctctggcctttggcaagagacagggcagagaattcatctggaacgacctgctgtccctggaaaccggcagcctgaagctggccaacggaagagtgatcgagaagacactgtacaacagaagaacccggcaggatgagcctgccctgttcgtggccctgaccttcgagcggcgggaggtcctggactcctccaatatcaaaccaatgaacctgatcggcgtggcaagaggcgaaaacatccccgccgtgatcgccctgaccgaccccgagggctgcccactgagccggtttaaggatagcctgggaaacccaacccacatcctgagaatcggcgagagctataaggagaagcagcggaccatccaggccaagaaggaggtggagcagcggagagccggcggctacagccggaagtacgccagcaaagccaagaatctggcagacgatatggtgagaaacaccgctagagatctgctgtactacgccgtgacccaggatgccatgctgatcttcgccaacctgagccggggcttcggccggcagggcaagcggaccttcatggccgagagacagtacacacggatggaggactggctgaccgccaagctggcctacgagggcctgagcaagacctacctgtccaagacactggcccagtacacctccaagacatgcagcaactgtgggtttaccatcaccagcgccgactacgacagggtgctggagaagctgaagaagacagcaacaggctggatgaccacaattaacggcaaggagctgaaggtggagggccagattacctactacaacagatacaagagacagaacgtagtcaaggacctgtccgtcgagctggatagactgagcgaagaatctgtgaacaacgacatctcctcctggacaaagggcagaagcggagaagctctgagcctcctgaagaaaagattctcccatagacccgtgcaggagaagttcgtgtgcctgaactgcggcttcgagacacacgcagccgagcaagccgccctgaacatcgccagatcctggctgttcctgcggagccaggagtacaagaaataccagacaaacaagacaaccggcaacaccgataagagagccttcgtcgagacctggcagtccttttaccggaagaagcttaaggaggtgtggaaacctgccgtgcggtctggcggatctggcggaggctccaagcccggcgccgtgagcttcgccgacgtggccgtgtacttcagccccgaggagtggggctgcctgaggcccgcccagagggccctgtacagggacgtgatgagggagacctacggccacctgggcgccctgggcttccccggccccaagcccgccctgatcagctggatggagcaggagagcgaggcctggagccccgccgcccaggaccccgagaagggcgagaggctgggcggcgccaggggcggcccaagcagcggcgcccctcctcccagcggcggcagcccagccggctccccaacctctaccgaggagggcacctctgagtccgccacccccgagagcggccctggcacctccaccgagcccagcgagggcagcgcacccggcagccctgccggcagccccacctccacagaggagggaaccagcaccgagcccagcgaaggcagcgccccaggcaccagcaccgagcctagtgagcaggagattaaacggatcaacaagatcagaagaagacttgtgaaagacagcaacaccaagaaggccggcaagacaggccccatgaaaaccctgctggttagagtgatgacacccgatctgagagagcggctggaaaacctgagaaagaagcctgaaaatatcccccagcccatcagcaatacatctagagccaacctgaataagctgctgaccgattacaccgaaatgaagaaggcgatcctgcatgtgtactgggaagagttccagaaggaccctgtgggcctgatgagccgggtggcccagcctgccagcaagaagatcgatcagaacaagctgaaacctgagatggacgagaagggcaacctgaccaccgccggctttgcctgctctcagtgtggccagcccctgttcgtgtacaagctggagcaggtgtctgagaagggcaaggcttacaccaactacttcggacggtgcaatgtggccgagcacgaaaagctgatcctgctggcccagctgaagcccgagaaggatagcgacgaagccgtgacatatagcctgggaaagtttgggcagagggccctggatttctacagcattcatgtgaccaaggagtccacccaccccgtgaagcccctggcccagatcgccggaaacagatacgcctccggacctgtgggaaaggccctgagcgacgcatgtatgggcacaatcgcctccttcctgtctaagtaccaggacatcatcatcgaacaccagaaggtggtgaagggcaaccagaagagactggagagcctgcgggagctggccggcaaggaaaacctggaataccctagcgtgaccctgccacctcagcctcacaccaaggagggcgttgatgcctacaacgaagtgatcgcccgggtgcgaatgtgggtgaacctgaacctgtggcagaagctgaagctaagcagagatgatgccaagcctctgctgagactgaagggattcccttcctttcctctggtcgagagacaggccaacgaagtggactggtgggacatggtgtgtaacgtgaagaagctgatcaacgagaaaaaggaggatggcaaggtgttttggcagaatctggctggctacaagagacaggaagccctgagaccatacctgagcagcgaggaagatcggaagaagggaaagaaattcgctcggtaccagctgggcgacctgctgctgcacctggaaaagaagcacggcgaggactggggaaaggtgtacgacgaggcctgggagcggattgacaagaaagtggaaggcctgagcaagcacatcaagctggaagaggaacggagaagcgaggacgcccagagcaaggccgccctgaccgactggctgcgggctaaggccagcttcgtgatcgagggcctgaaggaggccgacaaggacgagttctgcagatgcgagctgaagctgcagaagtggtacggggacctgcggggaaagcccttcgccatcgaagccgagaacagcatcctggacatcagcggcttcagcaagcagtacaactgtgccttcatctggcagaaggacggcgtgaagaagctgaacctgtacctgatcatcaactacttcaagggcggcaagctgcggttcaagaagatcaaacctgaagccttcgaagccaacagattctacaccgtgatcaacaaaaagagcggcgagatcgtgcccatggaggtgaacttcaacttcgacgaccccaacctgatcatcctgcctctggcctttggcaagagacagggcagagaattcatctggaacgacctgctgtccctggaaaccggcagcctgaagctggccaacggaagagtgatcgagaagacactgtacaacagaagaacccggcaggatgagcctgccctgttcgtggccctgaccttcgagcggcgggaggtcctggactcctccaatatcaaaccaatgaacctgatcggcgtggcaagaggcgaaaacatccccgccgtgatcgccctgaccgaccccgagggctgcccactgagccggtttaaggatagcctgggaaacccaacccacatcctgagaatcggcgagagctataaggagaagcagcggaccatccaggccaagaaggaggtggagcagcggagagccggcggctacagccggaagtacgccagcaaagccaagaatctggcagacgatatggtgagaaacaccgctagagatctgctgtactacgccgtgacccaggatgccatgctgatcttcgccaacctgagccggggcttcggccggcagggcaagcggaccttcatggccgagagacagtacacacggatggaggactggctgaccgccaagctggcctacgagggcctgagcaagacctacctgtccaagacactggcccagtacacctccaagacatgcagcaactgtgggtttaccatcaccagcgccgactacgacagggtgctggagaagctgaagaagacagcaacaggctggatgaccacaattaacggcaaggagctgaaggtggagggccagattacctactacaacagatacaagagacagaacgtagtcaaggacctgtccgtcgagctggatagactgagcgaagaatctgtgaacaacgacatctcctcctggacaaagggcagaagcggagaagctctgagcctcctgaagaaaagattctcccatagacccgtgcaggagaagttcgtgtgcctgaactgcggcttcgagacacacgcagccgagcaagccgccctgaacatcgccagatcctggctgttcctgcggagccaggagtacaagaaataccagacaaacaagacaaccggcaacaccgataagagagccttcgtcgagacctggcagtccttttaccggaagaagcttaaggaggtgtggaaacctgccgtgcggtctggcggatctggcggaggctcctaagcccggcgccgtgagcttcgccgacgtggccgtgtacttcagccccgaggagtggggctgcctgaggcccgcccagagggccctgtacagggacgtgatgagggagacctacggccacctgggcgccctgggcttccccggccccaagcccgccctgatcagctggatggagcaggagagcgaggcctggagccccgccgcccaggaccccgagaagggcgagaggctgggcggcgccaggggatctggctccggcagcggccccaagaaaaagagaaaagtctaagctgccttctgcggggcttgccttctggccatgcccttcttctctcccttgcacctgtacctcttggtctttgaataaagcctgagtaggaaggctagcaaaaaaaaaaaaaaaaaaaaaaaaaaaaaaaaaaaaaaaaaaaaaaaaaaaaaaaaaaaaaaaaaaaaaaaaaaaaaaaa

SEQ ID NO: 15305 - RNA, 9485 nt, synthetic construct
  source 1..9485: mol_type = other RNA
aggaaataagagagaaaagaagagtaagaagaaatataagagccaccatggcccctaagaagaagcgtaaagtgagccggatggaacgcctcgtctacgaggtgcggcagaagtgcagaaacatcgaggacatctgcatctcctgcggatctctgaacgtgaccctggagcacccactgttcatcggcggcatgtgccagaactgtaaaaactgttttctggagtgtgcctatcaatacgacgatgacggctaccagagctactgcaccatctgttgcggcggaagagaggtgctgatgtgtggaaataacaactgctgccggtgcttctgcgtggaatgcgtggacctgctggtgggccccggcgccgcccaggccgctattaaggaagatccttggaactgctacatgtgcggccacaagggcacatacggcctgctgagacggagagaggactggcctagcagactgcagatgttcttcgccaataaccacgaccaggagttcgacccccctaaggtgtaccctcccgtccccgccgagaagagaaagcccatccgggtcctgagcctgttcgatggcatcgccaccggtctgctggtgctgaaggacctgggcatccaggtggataggtacattgcctccgaggtgtgcgaggactccatcaccgtgggaatggtgcgtcatcagggcaagatcatgtacgtgggcgacgtgcggagcgtgacacagaagcatatccaggagtggggccctttcgacctggtgatcggcggcagcccttgcaatgacctgagcatcgtgaacccagcccggaagggcctgtacgagggaaccggcagactgttcttcgagttttacagactgctgcacgacgcccggcctaaggaaggcgacgaccggcccttcttttggctgttcgagaatgtggtggccatgggagtcagcgacaagcgggatattagccggttcctggagagcaaccccgtgatgatcgatgccaaggaagtgagcgccgcccaccgggccagatacttctggggcaatctgcctggcatgaacagacccctggccagcaccgtgaacgacaagctggagctgcaggagtgcctggagcacggccggatcgccaagttcagcaaggtgagaaccatcaccacccgaagcaacagcatcaaacaaggcaaggaccagcactttcctgtgttcatgaacgagaaggaggacatcctgtggtgtaccgagatggagagagtgttcgggttcccagtccactacacagatgtcagcaacatgtctagactggccagacagagactgctgggaagaagctggtccgtccctgtgatcagacacctgttcgcccctctgaaggagtacttcgcctgcgtgagcagcggcaacagcaacgccaacagccggggccccagcttctctagcggcctggtgccactgtccctgagagggagccacatgggccccatggagatctacaaaaccgtgagcgcctggaagcggcagcctgtgcgcgtgctgagcctgtttcggaatatcgataaagtcctgaaaagcctgggattcctggagagcggctctggctccggcggtggcaccctgaagtacgtggaggatgtgacaaacgtggtcagacgggatgtggagaagtggggccccttcgatctggtgtacggcagcacccaacccctgggcagctcttgtgaccggtgccctggctggtacatgtttcagttccaccggatcctgcagtacgccctgccgagacaggagtcccagcggccattcttttggattttcatggacaacttgctgctgaccgaggatgaccaggaaactaccactcggttcctgcagaccgaagccgtgaccctgcaggacgtgagaggccgggactaccagaacgccatgcgggtgtggtccaacatccctggactgaaaagcaagcacgcacctctgacccctaaagaagaggagtacctgcaggcccaggtgcggagcagaagcaagctggacgcccctaaggtggatctgctggtgaagaattgcctcctgcccctgagagagtacttcaagtatttcagccagaatagtctgcccctgggaggcagcggcggcggcgccctggtgacatttgaggacgtcgccgtgcggttcacccaggaggaatgggctctgctggatccttctcagaaaatcctgtaccgggacgtgatgagagagacataccggaatctgacctccgtgggcatcaactgggaatgttgggaccttgaagcctgcttcagaagcctgggaagaaacctgagagtgcaggtggtgaagagaaagtgcgagctgaccaacagcggcccctgcgccgagggcggcccaagcagcggcgcccctcctcccagcggcggcagcccagccggctccccaacctctaccgaggagggcacctctgagtccgccacccccgagagcggccctggcacctccaccgagcccagcgagggcagcgcacccggcagccctgccggcagccccacctccacagaggagggaaccagcaccgagcccagcgaaggcagcgccccaggcaccagcaccgagcctagtgagcaggagattaaacggatcaacaagatcagaagaagacttgtgaaagacagcaacaccaagaaggccggcaagacaggccccatgaaaaccctgctggttagagtgatgacacccgatctgagagagcggctggaaaacctgagaaagaagcctgaaaatatcccccagcccatcagcaatacatctagagccaacctgaataagctgctgaccgattacaccgaaatgaagaaggcgatcctgcatgtgtactgggaagagttccagaaggaccctgtgggcctgatgagccgggtggcccagcctgccagcaagaagatcgatcagaacaagctgaaacctgagatggacgagaagggcaacctgaccaccgccggctttgcctgctctcagtgtggccagcccctgttcgtgtacaagctggagcaggtgtctgagaagggcaaggcttacaccaactacttcggacggtgcaatgtggccgagcacgaaaagctgatcctgctggcccagctgaagcccgagaaggatagcgacgaagccgtgacatatagcctgggaaagtttgggcagagggccctggatttctacagcattcatgtgaccaaggagtccacccaccccgtgaagcccctggcccagatcgccggaaacagatacgcctccggacctgtgggaaaggccctgagcgacgcatgtatgggcacaatcgcctccttcctgtctaagtaccaggacatcatcatcgaacaccagaaggtggtgaagggcaaccagaagagactggagagcctgcgggagctggccggcaaggaaaacctggaataccctagcgtgaccctgccacctcagcctcacaccaaggagggcgttgatgcctacaacgaagtgatcgcccgggtgcgaatgtgggtgaacctgaacctgtggcagaagctgaagctaagcagagatgatgccaagcctctgctgagactgaagggattcccttcctttcctctggtcgagagacaggccaacgaagtggactggtgggacatggtgtgtaacgtgaagaagctgatcaacgagaaaaaggaggatggcaaggtgttttggcagaatctggctggctacaagagacaggaagccctgagaccatacctgagcagcgaggaagatcggaagaagggaaagaaattcgctcggtaccagctgggcgacctgctgctgcacctggaaaagaagcacggcgaggactggggaaaggtgtacgacgaggcctgggagcggattgacaagaaagtggaaggcctgagcaagcacatcaagctggaagaggaacggagaagcgaggacgcccagagcaaggccgccctgaccgactggctgcgggctaaggccagcttcgtgatcgagggcctgaaggaggccgacaaggacgagttctgcagatgcgagctgaagctgcagaagtggtacggggacctgcggggaaagcccttcgccatcgaagccgagaacagcatcctggacatcagcggcttcagcaagcagtacaactgtgccttcatctggcagaaggacggcgtgaagaagctgaacctgtacctgatcatcaactacttcaagggcggcaagctgcggttcaagaagatcaaacctgaagccttcgaagccaacagattctacaccgtgatcaacaaaaagagcggcgagatcgtgcccatggaggtgaacttcaacttcgacgaccccaacctgatcatcctgcctctggcctttggcaagagacagggcagagaattcatctggaacgacctgctgtccctggaaaccggcagcctgaagctggccaacggaagagtgatcgagaagacactgtacaacagaagaacccggcaggatgagcctgccctgttcgtggccctgaccttcgagcggcgggaggtcctggactcctccaatatcaaaccaatgaacctgatcggcgtggcaagaggcgaaaacatccccgccgtgatcgccctgaccgaccccgagggctgcccactgagccggtttaaggatagcctgggaaacccaacccacatcctgagaatcggcgagagctataaggagaagcagcggaccatccaggccaagaaggaggtggagcagcggagagccggcggctacagccggaagtacgccagcaaagccaagaatctggcagacgatatggtgagaaacaccgctagagatctgctgtactacgccgtgacccaggatgccatgctgatcttcgccaacctgagccggggcttcggccggcagggcaagcggaccttcatggccgagagacagtacacacggatggaggactggctgaccgccaagctggcctacgagggcctgagcaagacctacctgtccaagacactggcccagtacacctccaagacatgcagcaactgtgggtttaccatcaccagcgccgactacgacagggtgctggagaagctgaagaagacagcaacaggctggatgaccacaattaacggcaaggagctgaaggtggagggccagattacctactacaacagatacaagagacagaacgtagtcaaggacctgtccgtcgagctggatagactgagcgaagaatctgtgaacaacgacatctcctcctggacaaagggcagaagcggagaagctctgagcctcctgaagaaaagattctcccatagacccgtgcaggagaagttcgtgtgcctgaactgcggcttcgagacacacgcagccgagcaagccgccctgaacatcgccagatcctggctgttcctgcggagccaggagtacaagaaataccagacaaacaagacaaccggcaacaccgataagagagccttcgtcgagacctggcagtccttttaccggaagaagcttaaggaggtgtggaaacctgccgtgcggtctggcggatctggcggaggctccatggtgagcttcgaggacgtggccgtgctgctgagccaggaggagtgggactgcctgatccccgcccagaggggcctgtacagggacgtgatgctggagacctacggcaacctggtgagcctgggcctgcaggccagcaagcccgacgtgatcagcaggctggagcagggcgacgagccctggaccacccacaccctgaggatgcagggcagctggagctggaggcacaagagggagggctgcggcggcccaagcagcggcgcccctcctcccagcggcggcagcccagccggctccccaacctctaccgaggagggcacctctgagtccgccacccccgagagcggccctggcacctccaccgagcccagcgagggcagcgcacccggcagccctgccggcagccccacctccacagaggagggaaccagcaccgagcccagcgaaggcagcgccccaggcaccagcaccgagcctagtgagcaggagattaaacggatcaacaagatcagaagaagacttgtgaaagacagcaacaccaagaaggccggcaagacaggccccatgaaaaccctgctggttagagtgatgacacccgatctgagagagcggctggaaaacctgagaaagaagcctgaaaatatcccccagcccatcagcaatacatctagagccaacctgaataagctgctgaccgattacaccgaaatgaagaaggcgatcctgcatgtgtactgggaagagttccagaaggaccctgtgggcctgatgagccgggtggcccagcctgccagcaagaagatcgatcagaacaagctgaaacctgagatggacgagaagggcaacctgaccaccgccggctttgcctgctctcagtgtggccagcccctgttcgtgtacaagctggagcaggtgtctgagaagggcaaggcttacaccaactacttcggacggtgcaatgtggccgagcacgaaaagctgatcctgctggcccagctgaagcccgagaaggatagcgacgaagccgtgacatatagcctgggaaagtttgggcagagggccctggatttctacagcattcatgtgaccaaggagtccacccaccccgtgaagcccctggcccagatcgccggaaacagatacgcctccggacctgtgggaaaggccctgagcgacgcatgtatgggcacaatcgcctccttcctgtctaagtaccaggacatcatcatcgaacaccagaaggtggtgaagggcaaccagaagagactggagagcctgcgggagctggccggcaaggaaaacctggaataccctagcgtgaccctgccacctcagcctcacaccaaggagggcgttgatgcctacaacgaagtgatcgcccgggtgcgaatgtgggtgaacctgaacctgtggcagaagctgaagctaagcagagatgatgccaagcctctgctgagactgaagggattcccttcctttcctctggtcgagagacaggccaacgaagtggactggtgggacatggtgtgtaacgtgaagaagctgatcaacgagaaaaaggaggatggcaaggtgttttggcagaatctggctggctacaagagacaggaagccctgagaccatacctgagcagcgaggaagatcggaagaagggaaagaaattcgctcggtaccagctgggcgacctgctgctgcacctggaaaagaagcacggcgaggactggggaaaggtgtacgacgaggcctgggagcggattgacaagaaagtggaaggcctgagcaagcacatcaagctggaagaggaacggagaagcgaggacgcccagagcaaggccgccctgaccgactggctgcgggctaaggccagcttcgtgatcgagggcctgaaggaggccgacaaggacgagttctgcagatgcgagctgaagctgcagaagtggtacggggacctgcggggaaagcccttcgccatcgaagccgagaacagcatcctggacatcagcggcttcagcaagcagtacaactgtgccttcatctggcagaaggacggcgtgaagaagctgaacctgtacctgatcatcaactacttcaagggcggcaagctgcggttcaagaagatcaaacctgaagccttcgaagccaacagattctacaccgtgatcaacaaaaagagcggcgagatcgtgcccatggaggtgaacttcaacttcgacgaccccaacctgatcatcctgcctctggcctttggcaagagacagggcagagaattcatctggaacgacctgctgtccctggaaaccggcagcctgaagctggccaacggaagagtgatcgagaagacactgtacaacagaagaacccggcaggatgagcctgccctgttcgtggccctgaccttcgagcggcgggaggtcctggactcctccaatatcaaaccaatgaacctgatcggcgtggcaagaggcgaaaacatccccgccgtgatcgccctgaccgaccccgagggctgcccactgagccggtttaaggatagcctgggaaacccaacccacatcctgagaatcggcgagagctataaggagaagcagcggaccatccaggccaagaaggaggtggagcagcggagagccggcggctacagccggaagtacgccagcaaagccaagaatctggcagacgatatggtgagaaacaccgctagagatctgctgtactacgccgtgacccaggatgccatgctgatcttcgccaacctgagccggggcttcggccggcagggcaagcggaccttcatggccgagagacagtacacacggatggaggactggctgaccgccaagctggcctacgagggcctgagcaagacctacctgtccaagacactggcccagtacacctccaagacatgcagcaactgtgggtttaccatcaccagcgccgactacgacagggtgctggagaagctgaagaagacagcaacaggctggatgaccacaattaacggcaaggagctgaaggtggagggccagattacctactacaacagatacaagagacagaacgtagtcaaggacctgtccgtcgagctggatagactgagcgaagaatctgtgaacaacgacatctcctcctggacaaagggcagaagcggagaagctctgagcctcctgaagaaaagattctcccatagacccgtgcaggagaagttcgtgtgcctgaactgcggcttcgagacacacgcagccgagcaagccgccctgaacatcgccagatcctggctgttcctgcggagccaggagtacaagaaataccagacaaacaagacaaccggcaacaccgataagagagccttcgtcgagacctggcagtccttttaccggaagaagcttaaggaggtgtggaaacctgccgtgcggtctggcggatctggcggaggctcctatggtgagcttcgaggacgtggccgtgctgctgagccaggaggagtgggactgcctgatccccgcccagaggggcctgtacagggacgtgatgctggagacctacggcaacctggtgagcctgggcctgcaggccagcaagcccgacgtgatcagcaggctggagcagggcgacgagccctggaccacccacaccctgaggatgcagggcagctggagctggaggcacaagagggagggctgcggatctggctccggcagcggccccaagaaaaagagaaaagtctaagctgccttctgcggggcttgccttctggccatgcccttcttctctcccttgcacctgtacctcttggtctttgaataaagcctgagtaggaaggctagcaaaaaaaaaaaaaaaaaaaaaaaaaaaaaaaaaaaaaaaaaaaaaaaaaaaaaaaaaaaaaaaaaaaaaaaaaaaaaaaa

SEQ ID NO: 15306 - RNA, 9485 nt, synthetic construct
  source 1..9485: mol_type = other RNA
aggaaataagagagaaaagaagagtaagaagaaatataagagccaccatggcccctaagaagaagcgtaaagtgagccggatggaacgcctcgtctacgaggtgcggcagaagtgcagaaacatcgaggacatctgcatctcctgcggatctctgaacgtgaccctggagcacccactgttcatcggcggcatgtgccagaactgtaaaaactgttttctggagtgtgcctatcaatacgacgatgacggctaccagagctactgcaccatctgttgcggcggaagagaggtgctgatgtgtggaaataacaactgctgccggtgcttctgcgtggaatgcgtggacctgctggtgggccccggcgccgcccaggccgctattaaggaagatccttggaactgctacatgtgcggccacaagggcacatacggcctgctgagacggagagaggactggcctagcagactgcagatgttcttcgccaataaccacgaccaggagttcgacccccctaaggtgtaccctcccgtccccgccgagaagagaaagcccatccgggtcctgagcctgttcgatggcatcgccaccggtctgctggtgctgaaggacctgggcatccaggtggataggtacattgcctccgaggtgtgcgaggactccatcaccgtgggaatggtgcgtcatcagggcaagatcatgtacgtgggcgacgtgcggagcgtgacacagaagcatatccaggagtggggccctttcgacctggtgatcggcggcagcccttgcaatgacctgagcatcgtgaacccagcccggaagggcctgtacgagggaaccggcagactgttcttcgagttttacagactgctgcacgacgcccggcctaaggaaggcgacgaccggcccttcttttggctgttcgagaatgtggtggccatgggagtcagcgacaagcgggatattagccggttcctggagagcaaccccgtgatgatcgatgccaaggaagtgagcgccgcccaccgggccagatacttctggggcaatctgcctggcatgaacagacccctggccagcaccgtgaacgacaagctggagctgcaggagtgcctggagcacggccggatcgccaagttcagcaaggtgagaaccatcaccacccgaagcaacagcatcaaacaaggcaaggaccagcactttcctgtgttcatgaacgagaaggaggacatcctgtggtgtaccgagatggagagagtgttcgggttcccagtccactacacagatgtcagcaacatgtctagactggccagacagagactgctgggaagaagctggtccgtccctgtgatcagacacctgttcgcccctctgaaggagtacttcgcctgcgtgagcagcggcaacagcaacgccaacagccggggccccagcttctctagcggcctggtgccactgtccctgagagggagccacatgggccccatggagatctacaaaaccgtgagcgcctggaagcggcagcctgtgcgcgtgctgagcctgtttcggaatatcgataaagtcctgaaaagcctgggattcctggagagcggctctggctccggcggtggcaccctgaagtacgtggaggatgtgacaaacgtggtcagacgggatgtggagaagtggggccccttcgatctggtgtacggcagcacccaacccctgggcagctcttgtgaccggtgccctggctggtacatgtttcagttccaccggatcctgcagtacgccctgccgagacaggagtcccagcggccattcttttggattttcatggacaacttgctgctgaccgaggatgaccaggaaactaccactcggttcctgcagaccgaagccgtgaccctgcaggacgtgagaggccgggactaccagaacgccatgcgggtgtggtccaacatccctggactgaaaagcaagcacgcacctctgacccctaaagaagaggagtacctgcaggcccaggtgcggagcagaagcaagctggacgcccctaaggtggatctgctggtgaagaattgcctcctgcccctgagagagtacttcaagtatttcagccagaatagtctgcccctgggaggcagcggcggcggcgccctggtgacatttgaggacgtcgccgtgcggttcacccaggaggaatgggctctgctggatccttctcagaaaatcctgtaccgggacgtgatgagagagacataccggaatctgacctccgtgggcatcaactgggaatgttgggaccttgaagcctgcttcagaagcctgggaagaaacctgagagtgcaggtggtgaagagaaagtgcgagctgaccaacagcggcccctgcgccgagggcggcccaagcagcggcgcccctcctcccagcggcggcagcccagccggctccccaacctctaccgaggagggcacctctgagtccgccacccccgagagcggccctggcacctccaccgagcccagcgagggcagcgcacccggcagccctgccggcagccccacctccacagaggagggaaccagcaccgagcccagcgaaggcagcgccccaggcaccagcaccgagcctagtgagcaggagattaaacggatcaacaagatcagaagaagacttgtgaaagacagcaacaccaagaaggccggcaagacaggccccatgaaaaccctgctggttagagtgatgacacccgatctgagagagcggctggaaaacctgagaaagaagcctgaaaatatcccccagcccatcagcaatacatctagagccaacctgaataagctgctgaccgattacaccgaaatgaagaaggcgatcctgcatgtgtactgggaagagttccagaaggaccctgtgggcctgatgagccgggtggcccagcctgccagcaagaagatcgatcagaacaagctgaaacctgagatggacgagaagggcaacctgaccaccgccggctttgcctgctctcagtgtggccagcccctgttcgtgtacaagctggagcaggtgtctgagaagggcaaggcttacaccaactacttcggacggtgcaatgtggccgagcacgaaaagctgatcctgctggcccagctgaagcccgagaaggatagcgacgaagccgtgacatatagcctgggaaagtttgggcagagggccctggatttctacagcattcatgtgaccaaggagtccacccaccccgtgaagcccctggcccagatcgccggaaacagatacgcctccggacctgtgggaaaggccctgagcgacgcatgtatgggcacaatcgcctccttcctgtctaagtaccaggacatcatcatcgaacaccagaaggtggtgaagggcaaccagaagagactggagagcctgcgggagctggccggcaaggaaaacctggaataccctagcgtgaccctgccacctcagcctcacaccaaggagggcgttgatgcctacaacgaagtgatcgcccgggtgcgaatgtgggtgaacctgaacctgtggcagaagctgaagctaagcagagatgatgccaagcctctgctgagactgaagggattcccttcctttcctctggtcgagagacaggccaacgaagtggactggtgggacatggtgtgtaacgtgaagaagctgatcaacgagaaaaaggaggatggcaaggtgttttggcagaatctggctggctacaagagacaggaagccctgagaccatacctgagcagcgaggaagatcggaagaagggaaagaaattcgctcggtaccagctgggcgacctgctgctgcacctggaaaagaagcacggcgaggactggggaaaggtgtacgacgaggcctgggagcggattgacaagaaagtggaaggcctgagcaagcacatcaagctggaagaggaacggagaagcgaggacgcccagagcaaggccgccctgaccgactggctgcgggctaaggccagcttcgtgatcgagggcctgaaggaggccgacaaggacgagttctgcagatgcgagctgaagctgcagaagtggtacggggacctgcggggaaagcccttcgccatcgaagccgagaacagcatcctggacatcagcggcttcagcaagcagtacaactgtgccttcatctggcagaaggacggcgtgaagaagctgaacctgtacctgatcatcaactacttcaagggcggcaagctgcggttcaagaagatcaaacctgaagccttcgaagccaacagattctacaccgtgatcaacaaaaagagcggcgagatcgtgcccatggaggtgaacttcaacttcgacgaccccaacctgatcatcctgcctctggcctttggcaagagacagggcagagaattcatctggaacgacctgctgtccctggaaaccggcagcctgaagctggccaacggaagagtgatcgagaagacactgtacaacagaagaacccggcaggatgagcctgccctgttcgtggccctgaccttcgagcggcgggaggtcctggactcctccaatatcaaaccaatgaacctgatcggcgtggcaagaggcgaaaacatccccgccgtgatcgccctgaccgaccccgagggctgcccactgagccggtttaaggatagcctgggaaacccaacccacatcctgagaatcggcgagagctataaggagaagcagcggaccatccaggccaagaaggaggtggagcagcggagagccggcggctacagccggaagtacgccagcaaagccaagaatctggcagacgatatggtgagaaacaccgctagagatctgctgtactacgccgtgacccaggatgccatgctgatcttcgccaacctgagccggggcttcggccggcagggcaagcggaccttcatggccgagagacagtacacacggatggaggactggctgaccgccaagctggcctacgagggcctgagcaagacctacctgtccaagacactggcccagtacacctccaagacatgcagcaactgtgggtttaccatcaccagcgccgactacgacagggtgctggagaagctgaagaagacagcaacaggctggatgaccacaattaacggcaaggagctgaaggtggagggccagattacctactacaacagatacaagagacagaacgtagtcaaggacctgtccgtcgagctggatagactgagcgaagaatctgtgaacaacgacatctcctcctggacaaagggcagaagcggagaagctctgagcctcctgaagaaaagattctcccatagacccgtgcaggagaagttcgtgtgcctgaactgcggcttcgagacacacgcagccgagcaagccgccctgaacatcgccagatcctggctgttcctgcggagccaggagtacaagaaataccagacaaacaagacaaccggcaacaccgataagagagccttcgtcgagacctggcagtccttttaccggaagaagcttaaggaggtgtggaaacctgccgtgcggtctggcggatctggcggaggctcccaggccgaggtgaccttcgaggacgtggccgtgctgttcagcagggaggagtggggcaggctgggccccgcccagaggggcctgtacagggacgtgatgctggagacctacaggaacctggtgagcctgggcgccggccccgccggccccaagcccggcgtgatcacccagctggagaggggcgacgagccctgggtgctggacgcccagggcgccaagggcaaggagaggctgagggtgagcggcggcccaagcagcggcgcccctcctcccagcggcggcagcccagccggctccccaacctctaccgaggagggcacctctgagtccgccacccccgagagcggccctggcacctccaccgagcccagcgagggcagcgcacccggcagccctgccggcagccccacctccacagaggagggaaccagcaccgagcccagcgaaggcagcgccccaggcaccagcaccgagcctagtgagcaggagattaaacggatcaacaagatcagaagaagacttgtgaaagacagcaacaccaagaaggccggcaagacaggccccatgaaaaccctgctggttagagtgatgacacccgatctgagagagcggctggaaaacctgagaaagaagcctgaaaatatcccccagcccatcagcaatacatctagagccaacctgaataagctgctgaccgattacaccgaaatgaagaaggcgatcctgcatgtgtactgggaagagttccagaaggaccctgtgggcctgatgagccgggtggcccagcctgccagcaagaagatcgatcagaacaagctgaaacctgagatggacgagaagggcaacctgaccaccgccggctttgcctgctctcagtgtggccagcccctgttcgtgtacaagctggagcaggtgtctgagaagggcaaggcttacaccaactacttcggacggtgcaatgtggccgagcacgaaaagctgatcctgctggcccagctgaagcccgagaaggatagcgacgaagccgtgacatatagcctgggaaagtttgggcagagggccctggatttctacagcattcatgtgaccaaggagtccacccaccccgtgaagcccctggcccagatcgccggaaacagatacgcctccggacctgtgggaaaggccctgagcgacgcatgtatgggcacaatcgcctccttcctgtctaagtaccaggacatcatcatcgaacaccagaaggtggtgaagggcaaccagaagagactggagagcctgcgggagctggccggcaaggaaaacctggaataccctagcgtgaccctgccacctcagcctcacaccaaggagggcgttgatgcctacaacgaagtgatcgcccgggtgcgaatgtgggtgaacctgaacctgtggcagaagctgaagctaagcagagatgatgccaagcctctgctgagactgaagggattcccttcctttcctctggtcgagagacaggccaacgaagtggactggtgggacatggtgtgtaacgtgaagaagctgatcaacgagaaaaaggaggatggcaaggtgttttggcagaatctggctggctacaagagacaggaagccctgagaccatacctgagcagcgaggaagatcggaagaagggaaagaaattcgctcggtaccagctgggcgacctgctgctgcacctggaaaagaagcacggcgaggactggggaaaggtgtacgacgaggcctgggagcggattgacaagaaagtggaaggcctgagcaagcacatcaagctggaagaggaacggagaagcgaggacgcccagagcaaggccgccctgaccgactggctgcgggctaaggccagcttcgtgatcgagggcctgaaggaggccgacaaggacgagttctgcagatgcgagctgaagctgcagaagtggtacggggacctgcggggaaagcccttcgccatcgaagccgagaacagcatcctggacatcagcggcttcagcaagcagtacaactgtgccttcatctggcagaaggacggcgtgaagaagctgaacctgtacctgatcatcaactacttcaagggcggcaagctgcggttcaagaagatcaaacctgaagccttcgaagccaacagattctacaccgtgatcaacaaaaagagcggcgagatcgtgcccatggaggtgaacttcaacttcgacgaccccaacctgatcatcctgcctctggcctttggcaagagacagggcagagaattcatctggaacgacctgctgtccctggaaaccggcagcctgaagctggccaacggaagagtgatcgagaagacactgtacaacagaagaacccggcaggatgagcctgccctgttcgtggccctgaccttcgagcggcgggaggtcctggactcctccaatatcaaaccaatgaacctgatcggcgtggcaagaggcgaaaacatccccgccgtgatcgccctgaccgaccccgagggctgcccactgagccggtttaaggatagcctgggaaacccaacccacatcctgagaatcggcgagagctataaggagaagcagcggaccatccaggccaagaaggaggtggagcagcggagagccggcggctacagccggaagtacgccagcaaagccaagaatctggcagacgatatggtgagaaacaccgctagagatctgctgtactacgccgtgacccaggatgccatgctgatcttcgccaacctgagccggggcttcggccggcagggcaagcggaccttcatggccgagagacagtacacacggatggaggactggctgaccgccaagctggcctacgagggcctgagcaagacctacctgtccaagacactggcccagtacacctccaagacatgcagcaactgtgggtttaccatcaccagcgccgactacgacagggtgctggagaagctgaagaagacagcaacaggctggatgaccacaattaacggcaaggagctgaaggtggagggccagattacctactacaacagatacaagagacagaacgtagtcaaggacctgtccgtcgagctggatagactgagcgaagaatctgtgaacaacgacatctcctcctggacaaagggcagaagcggagaagctctgagcctcctgaagaaaagattctcccatagacccgtgcaggagaagttcgtgtgcctgaactgcggcttcgagacacacgcagccgagcaagccgccctgaacatcgccagatcctggctgttcctgcggagccaggagtacaagaaataccagacaaacaagacaaccggcaacaccgataagagagccttcgtcgagacctggcagtccttttaccggaagaagcttaaggaggtgtggaaacctgccgtgcggtctggcggatctggcggaggctcctcaggccgaggtgaccttcgaggacgtggccgtgctgttcagcagggaggagtggggcaggctgggccccgcccagaggggcctgtacagggacgtgatgctggagacctacaggaacctggtgagcctgggcgccggccccgccggccccaagcccggcgtgatcacccagctggagaggggcgacgagccctgggtgctggacgcccagggcgccaagggcaaggagaggctgagggtgagcggatctggctccggcagcggccccaagaaaaagagaaaagtctaagctgccttctgcggggcttgccttctggccatgcccttcttctctcccttgcacctgtacctcttggtctttgaataaagcctgagtaggaaggctagcaaaaaaaaaaaaaaaaaaaaaaaaaaaaaaaaaaaaaaaaaaaaaaaaaaaaaaaaaaaaaaaaaaaaaaaaaaaaaaaa

SEQ ID NO: 15307 - RNA, 9485 nt, synthetic construct
  source 1..9485: mol_type = other RNA
aggaaataagagagaaaagaagagtaagaagaaatataagagccaccatggcccctaagaagaagcgtaaagtgagccggatggaacgcctcgtctacgaggtgcggcagaagtgcagaaacatcgaggacatctgcatctcctgcggatctctgaacgtgaccctggagcacccactgttcatcggcggcatgtgccagaactgtaaaaactgttttctggagtgtgcctatcaatacgacgatgacggctaccagagctactgcaccatctgttgcggcggaagagaggtgctgatgtgtggaaataacaactgctgccggtgcttctgcgtggaatgcgtggacctgctggtgggccccggcgccgcccaggccgctattaaggaagatccttggaactgctacatgtgcggccacaagggcacatacggcctgctgagacggagagaggactggcctagcagactgcagatgttcttcgccaataaccacgaccaggagttcgacccccctaaggtgtaccctcccgtccccgccgagaagagaaagcccatccgggtcctgagcctgttcgatggcatcgccaccggtctgctggtgctgaaggacctgggcatccaggtggataggtacattgcctccgaggtgtgcgaggactccatcaccgtgggaatggtgcgtcatcagggcaagatcatgtacgtgggcgacgtgcggagcgtgacacagaagcatatccaggagtggggccctttcgacctggtgatcggcggcagcccttgcaatgacctgagcatcgtgaacccagcccggaagggcctgtacgagggaaccggcagactgttcttcgagttttacagactgctgcacgacgcccggcctaaggaaggcgacgaccggcccttcttttggctgttcgagaatgtggtggccatgggagtcagcgacaagcgggatattagccggttcctggagagcaaccccgtgatgatcgatgccaaggaagtgagcgccgcccaccgggccagatacttctggggcaatctgcctggcatgaacagacccctggccagcaccgtgaacgacaagctggagctgcaggagtgcctggagcacggccggatcgccaagttcagcaaggtgagaaccatcaccacccgaagcaacagcatcaaacaaggcaaggaccagcactttcctgtgttcatgaacgagaaggaggacatcctgtggtgtaccgagatggagagagtgttcgggttcccagtccactacacagatgtcagcaacatgtctagactggccagacagagactgctgggaagaagctggtccgtccctgtgatcagacacctgttcgcccctctgaaggagtacttcgcctgcgtgagcagcggcaacagcaacgccaacagccggggccccagcttctctagcggcctggtgccactgtccctgagagggagccacatgggccccatggagatctacaaaaccgtgagcgcctggaagcggcagcctgtgcgcgtgctgagcctgtttcggaatatcgataaagtcctgaaaagcctgggattcctggagagcggctctggctccggcggtggcaccctgaagtacgtggaggatgtgacaaacgtggtcagacgggatgtggagaagtggggccccttcgatctggtgtacggcagcacccaacccctgggcagctcttgtgaccggtgccctggctggtacatgtttcagttccaccggatcctgcagtacgccctgccgagacaggagtcccagcggccattcttttggattttcatggacaacttgctgctgaccgaggatgaccaggaaactaccactcggttcctgcagaccgaagccgtgaccctgcaggacgtgagaggccgggactaccagaacgccatgcgggtgtggtccaacatccctggactgaaaagcaagcacgcacctctgacccctaaagaagaggagtacctgcaggcccaggtgcggagcagaagcaagctggacgcccctaaggtggatctgctggtgaagaattgcctcctgcccctgagagagtacttcaagtatttcagccagaatagtctgcccctgggaggcagcggcggcggcgccctggtgacatttgaggacgtcgccgtgcggttcacccaggaggaatgggctctgctggatccttctcagaaaatcctgtaccgggacgtgatgagagagacataccggaatctgacctccgtgggcatcaactgggaatgttgggaccttgaagcctgcttcagaagcctgggaagaaacctgagagtgcaggtggtgaagagaaagtgcgagctgaccaacagcggcccctgcgccgagggcggcccaagcagcggcgcccctcctcccagcggcggcagcccagccggctccccaacctctaccgaggagggcacctctgagtccgccacccccgagagcggccctggcacctccaccgagcccagcgagggcagcgcacccggcagccctgccggcagccccacctccacagaggagggaaccagcaccgagcccagcgaaggcagcgccccaggcaccagcaccgagcctagtgagcaggagattaaacggatcaacaagatcagaagaagacttgtgaaagacagcaacaccaagaaggccggcaagacaggccccatgaaaaccctgctggttagagtgatgacacccgatctgagagagcggctggaaaacctgagaaagaagcctgaaaatatcccccagcccatcagcaatacatctagagccaacctgaataagctgctgaccgattacaccgaaatgaagaaggcgatcctgcatgtgtactgggaagagttccagaaggaccctgtgggcctgatgagccgggtggcccagcctgccagcaagaagatcgatcagaacaagctgaaacctgagatggacgagaagggcaacctgaccaccgccggctttgcctgctctcagtgtggccagcccctgttcgtgtacaagctggagcaggtgtctgagaagggcaaggcttacaccaactacttcggacggtgcaatgtggccgagcacgaaaagctgatcctgctggcccagctgaagcccgagaaggatagcgacgaagccgtgacatatagcctgggaaagtttgggcagagggccctggatttctacagcattcatgtgaccaaggagtccacccaccccgtgaagcccctggcccagatcgccggaaacagatacgcctccggacctgtgggaaaggccctgagcgacgcatgtatgggcacaatcgcctccttcctgtctaagtaccaggacatcatcatcgaacaccagaaggtggtgaagggcaaccagaagagactggagagcctgcgggagctggccggcaaggaaaacctggaataccctagcgtgaccctgccacctcagcctcacaccaaggagggcgttgatgcctacaacgaagtgatcgcccgggtgcgaatgtgggtgaacctgaacctgtggcagaagctgaagctaagcagagatgatgccaagcctctgctgagactgaagggattcccttcctttcctctggtcgagagacaggccaacgaagtggactggtgggacatggtgtgtaacgtgaagaagctgatcaacgagaaaaaggaggatggcaaggtgttttggcagaatctggctggctacaagagacaggaagccctgagaccatacctgagcagcgaggaagatcggaagaagggaaagaaattcgctcggtaccagctgggcgacctgctgctgcacctggaaaagaagcacggcgaggactggggaaaggtgtacgacgaggcctgggagcggattgacaagaaagtggaaggcctgagcaagcacatcaagctggaagaggaacggagaagcgaggacgcccagagcaaggccgccctgaccgactggctgcgggctaaggccagcttcgtgatcgagggcctgaaggaggccgacaaggacgagttctgcagatgcgagctgaagctgcagaagtggtacggggacctgcggggaaagcccttcgccatcgaagccgagaacagcatcctggacatcagcggcttcagcaagcagtacaactgtgccttcatctggcagaaggacggcgtgaagaagctgaacctgtacctgatcatcaactacttcaagggcggcaagctgcggttcaagaagatcaaacctgaagccttcgaagccaacagattctacaccgtgatcaacaaaaagagcggcgagatcgtgcccatggaggtgaacttcaacttcgacgaccccaacctgatcatcctgcctctggcctttggcaagagacagggcagagaattcatctggaacgacctgctgtccctggaaaccggcagcctgaagctggccaacggaagagtgatcgagaagacactgtacaacagaagaacccggcaggatgagcctgccctgttcgtggccctgaccttcgagcggcgggaggtcctggactcctccaatatcaaaccaatgaacctgatcggcgtggcaagaggcgaaaacatccccgccgtgatcgccctgaccgaccccgagggctgcccactgagccggtttaaggatagcctgggaaacccaacccacatcctgagaatcggcgagagctataaggagaagcagcggaccatccaggccaagaaggaggtggagcagcggagagccggcggctacagccggaagtacgccagcaaagccaagaatctggcagacgatatggtgagaaacaccgctagagatctgctgtactacgccgtgacccaggatgccatgctgatcttcgccaacctgagccggggcttcggccggcagggcaagcggaccttcatggccgagagacagtacacacggatggaggactggctgaccgccaagctggcctacgagggcctgagcaagacctacctgtccaagacactggcccagtacacctccaagacatgcagcaactgtgggtttaccatcaccagcgccgactacgacagggtgctggagaagctgaagaagacagcaacaggctggatgaccacaattaacggcaaggagctgaaggtggagggccagattacctactacaacagatacaagagacagaacgtagtcaaggacctgtccgtcgagctggatagactgagcgaagaatctgtgaacaacgacatctcctcctggacaaagggcagaagcggagaagctctgagcctcctgaagaaaagattctcccatagacccgtgcaggagaagttcgtgtgcctgaactgcggcttcgagacacacgcagccgagcaagccgccctgaacatcgccagatcctggctgttcctgcggagccaggagtacaagaaataccagacaaacaagacaaccggcaacaccgataagagagccttcgtcgagacctggcagtccttttaccggaagaagcttaaggaggtgtggaaacctgccgtgcggtctggcggatctggcggaggctccagccaggagagcgtggccttcgaggacgtggccgtgtacttcaccaccaaggagtgggccatcatggtgcccgccgagagggccctgtacagggacgtgatgctggagaactacgaggccgtggccttcgtggtgccccccaccagcaagcccgccctggtgagccacctggagcagggcaaggagagctgcttcatcaggccccagggcgtgctgagcaggagcgactggagggccggcctgggcggcccaagcagcggcgcccctcctcccagcggcggcagcccagccggctccccaacctctaccgaggagggcacctctgagtccgccacccccgagagcggccctggcacctccaccgagcccagcgagggcagcgcacccggcagccctgccggcagccccacctccacagaggagggaaccagcaccgagcccagcgaaggcagcgccccaggcaccagcaccgagcctagtgagcaggagattaaacggatcaacaagatcagaagaagacttgtgaaagacagcaacaccaagaaggccggcaagacaggccccatgaaaaccctgctggttagagtgatgacacccgatctgagagagcggctggaaaacctgagaaagaagcctgaaaatatcccccagcccatcagcaatacatctagagccaacctgaataagctgctgaccgattacaccgaaatgaagaaggcgatcctgcatgtgtactgggaagagttccagaaggaccctgtgggcctgatgagccgggtggcccagcctgccagcaagaagatcgatcagaacaagctgaaacctgagatggacgagaagggcaacctgaccaccgccggctttgcctgctctcagtgtggccagcccctgttcgtgtacaagctggagcaggtgtctgagaagggcaaggcttacaccaactacttcggacggtgcaatgtggccgagcacgaaaagctgatcctgctggcccagctgaagcccgagaaggatagcgacgaagccgtgacatatagcctgggaaagtttgggcagagggccctggatttctacagcattcatgtgaccaaggagtccacccaccccgtgaagcccctggcccagatcgccggaaacagatacgcctccggacctgtgggaaaggccctgagcgacgcatgtatgggcacaatcgcctccttcctgtctaagtaccaggacatcatcatcgaacaccagaaggtggtgaagggcaaccagaagagactggagagcctgcgggagctggccggcaaggaaaacctggaataccctagcgtgaccctgccacctcagcctcacaccaaggagggcgttgatgcctacaacgaagtgatcgcccgggtgcgaatgtgggtgaacctgaacctgtggcagaagctgaagctaagcagagatgatgccaagcctctgctgagactgaagggattcccttcctttcctctggtcgagagacaggccaacgaagtggactggtgggacatggtgtgtaacgtgaagaagctgatcaacgagaaaaaggaggatggcaaggtgttttggcagaatctggctggctacaagagacaggaagccctgagaccatacctgagcagcgaggaagatcggaagaagggaaagaaattcgctcggtaccagctgggcgacctgctgctgcacctggaaaagaagcacggcgaggactggggaaaggtgtacgacgaggcctgggagcggattgacaagaaagtggaaggcctgagcaagcacatcaagctggaagaggaacggagaagcgaggacgcccagagcaaggccgccctgaccgactggctgcgggctaaggccagcttcgtgatcgagggcctgaaggaggccgacaaggacgagttctgcagatgcgagctgaagctgcagaagtggtacggggacctgcggggaaagcccttcgccatcgaagccgagaacagcatcctggacatcagcggcttcagcaagcagtacaactgtgccttcatctggcagaaggacggcgtgaagaagctgaacctgtacctgatcatcaactacttcaagggcggcaagctgcggttcaagaagatcaaacctgaagccttcgaagccaacagattctacaccgtgatcaacaaaaagagcggcgagatcgtgcccatggaggtgaacttcaacttcgacgaccccaacctgatcatcctgcctctggcctttggcaagagacagggcagagaattcatctggaacgacctgctgtccctggaaaccggcagcctgaagctggccaacggaagagtgatcgagaagacactgtacaacagaagaacccggcaggatgagcctgccctgttcgtggccctgaccttcgagcggcgggaggtcctggactcctccaatatcaaaccaatgaacctgatcggcgtggcaagaggcgaaaacatccccgccgtgatcgccctgaccgaccccgagggctgcccactgagccggtttaaggatagcctgggaaacccaacccacatcctgagaatcggcgagagctataaggagaagcagcggaccatccaggccaagaaggaggtggagcagcggagagccggcggctacagccggaagtacgccagcaaagccaagaatctggcagacgatatggtgagaaacaccgctagagatctgctgtactacgccgtgacccaggatgccatgctgatcttcgccaacctgagccggggcttcggccggcagggcaagcggaccttcatggccgagagacagtacacacggatggaggactggctgaccgccaagctggcctacgagggcctgagcaagacctacctgtccaagacactggcccagtacacctccaagacatgcagcaactgtgggtttaccatcaccagcgccgactacgacagggtgctggagaagctgaagaagacagcaacaggctggatgaccacaattaacggcaaggagctgaaggtggagggccagattacctactacaacagatacaagagacagaacgtagtcaaggacctgtccgtcgagctggatagactgagcgaagaatctgtgaacaacgacatctcctcctggacaaagggcagaagcggagaagctctgagcctcctgaagaaaagattctcccatagacccgtgcaggagaagttcgtgtgcctgaactgcggcttcgagacacacgcagccgagcaagccgccctgaacatcgccagatcctggctgttcctgcggagccaggagtacaagaaataccagacaaacaagacaaccggcaacaccgataagagagccttcgtcgagacctggcagtccttttaccggaagaagcttaaggaggtgtggaaacctgccgtgcggtctggcggatctggcggaggctcctagccaggagagcgtggccttcgaggacgtggccgtgtacttcaccaccaaggagtgggccatcatggtgcccgccgagagggccctgtacagggacgtgatgctggagaactacgaggccgtggccttcgtggtgccccccaccagcaagcccgccctggtgagccacctggagcagggcaaggagagctgcttcatcaggccccagggcgtgctgagcaggagcgactggagggccggcctgggatctggctccggcagcggccccaagaaaaagagaaaagtctaagctgccttctgcggggcttgccttctggccatgcccttcttctctcccttgcacctgtacctcttggtctttgaataaagcctgagtaggaaggctagcaaaaaaaaaaaaaaaaaaaaaaaaaaaaaaaaaaaaaaaaaaaaaaaaaaaaaaaaaaaaaaaaaaaaaaaaaaaaaaaa

SEQ ID NO: 15308 - RNA, 9485 nt, synthetic construct
  source 1..9485: mol_type = other RNA
aggaaataagagagaaaagaagagtaagaagaaatataagagccaccatggcccctaagaagaagcgtaaagtgagccggatggaacgcctcgtctacgaggtgcggcagaagtgcagaaacatcgaggacatctgcatctcctgcggatctctgaacgtgaccctggagcacccactgttcatcggcggcatgtgccagaactgtaaaaactgttttctggagtgtgcctatcaatacgacgatgacggctaccagagctactgcaccatctgttgcggcggaagagaggtgctgatgtgtggaaataacaactgctgccggtgcttctgcgtggaatgcgtggacctgctggtgggccccggcgccgcccaggccgctattaaggaagatccttggaactgctacatgtgcggccacaagggcacatacggcctgctgagacggagagaggactggcctagcagactgcagatgttcttcgccaataaccacgaccaggagttcgacccccctaaggtgtaccctcccgtccccgccgagaagagaaagcccatccgggtcctgagcctgttcgatggcatcgccaccggtctgctggtgctgaaggacctgggcatccaggtggataggtacattgcctccgaggtgtgcgaggactccatcaccgtgggaatggtgcgtcatcagggcaagatcatgtacgtgggcgacgtgcggagcgtgacacagaagcatatccaggagtggggccctttcgacctggtgatcggcggcagcccttgcaatgacctgagcatcgtgaacccagcccggaagggcctgtacgagggaaccggcagactgttcttcgagttttacagactgctgcacgacgcccggcctaaggaaggcgacgaccggcccttcttttggctgttcgagaatgtggtggccatgggagtcagcgacaagcgggatattagccggttcctggagagcaaccccgtgatgatcgatgccaaggaagtgagcgccgcccaccgggccagatacttctggggcaatctgcctggcatgaacagacccctggccagcaccgtgaacgacaagctggagctgcaggagtgcctggagcacggccggatcgccaagttcagcaaggtgagaaccatcaccacccgaagcaacagcatcaaacaaggcaaggaccagcactttcctgtgttcatgaacgagaaggaggacatcctgtggtgtaccgagatggagagagtgttcgggttcccagtccactacacagatgtcagcaacatgtctagactggccagacagagactgctgggaagaagctggtccgtccctgtgatcagacacctgttcgcccctctgaaggagtacttcgcctgcgtgagcagcggcaacagcaacgccaacagccggggccccagcttctctagcggcctggtgccactgtccctgagagggagccacatgggccccatggagatctacaaaaccgtgagcgcctggaagcggcagcctgtgcgcgtgctgagcctgtttcggaatatcgataaagtcctgaaaagcctgggattcctggagagcggctctggctccggcggtggcaccctgaagtacgtggaggatgtgacaaacgtggtcagacgggatgtggagaagtggggccccttcgatctggtgtacggcagcacccaacccctgggcagctcttgtgaccggtgccctggctggtacatgtttcagttccaccggatcctgcagtacgccctgccgagacaggagtcccagcggccattcttttggattttcatggacaacttgctgctgaccgaggatgaccaggaaactaccactcggttcctgcagaccgaagccgtgaccctgcaggacgtgagaggccgggactaccagaacgccatgcgggtgtggtccaacatccctggactgaaaagcaagcacgcacctctgacccctaaagaagaggagtacctgcaggcccaggtgcggagcagaagcaagctggacgcccctaaggtggatctgctggtgaagaattgcctcctgcccctgagagagtacttcaagtatttcagccagaatagtctgcccctgggaggcagcggcggcggcgccctggtgacatttgaggacgtcgccgtgcggttcacccaggaggaatgggctctgctggatccttctcagaaaatcctgtaccgggacgtgatgagagagacataccggaatctgacctccgtgggcatcaactgggaatgttgggaccttgaagcctgcttcagaagcctgggaagaaacctgagagtgcaggtggtgaagagaaagtgcgagctgaccaacagcggcccctgcgccgagggcggcccaagcagcggcgcccctcctcccagcggcggcagcccagccggctccccaacctctaccgaggagggcacctctgagtccgccacccccgagagcggccctggcacctccaccgagcccagcgagggcagcgcacccggcagccctgccggcagccccacctccacagaggagggaaccagcaccgagcccagcgaaggcagcgccccaggcaccagcaccgagcctagtgagcaggagattaaacggatcaacaagatcagaagaagacttgtgaaagacagcaacaccaagaaggccggcaagacaggccccatgaaaaccctgctggttagagtgatgacacccgatctgagagagcggctggaaaacctgagaaagaagcctgaaaatatcccccagcccatcagcaatacatctagagccaacctgaataagctgctgaccgattacaccgaaatgaagaaggcgatcctgcatgtgtactgggaagagttccagaaggaccctgtgggcctgatgagccgggtggcccagcctgccagcaagaagatcgatcagaacaagctgaaacctgagatggacgagaagggcaacctgaccaccgccggctttgcctgctctcagtgtggccagcccctgttcgtgtacaagctggagcaggtgtctgagaagggcaaggcttacaccaactacttcggacggtgcaatgtggccgagcacgaaaagctgatcctgctggcccagctgaagcccgagaaggatagcgacgaagccgtgacatatagcctgggaaagtttgggcagagggccctggatttctacagcattcatgtgaccaaggagtccacccaccccgtgaagcccctggcccagatcgccggaaacagatacgcctccggacctgtgggaaaggccctgagcgacgcatgtatgggcacaatcgcctccttcctgtctaagtaccaggacatcatcatcgaacaccagaaggtggtgaagggcaaccagaagagactggagagcctgcgggagctggccggcaaggaaaacctggaataccctagcgtgaccctgccacctcagcctcacaccaaggagggcgttgatgcctacaacgaagtgatcgcccgggtgcgaatgtgggtgaacctgaacctgtggcagaagctgaagctaagcagagatgatgccaagcctctgctgagactgaagggattcccttcctttcctctggtcgagagacaggccaacgaagtggactggtgggacatggtgtgtaacgtgaagaagctgatcaacgagaaaaaggaggatggcaaggtgttttggcagaatctggctggctacaagagacaggaagccctgagaccatacctgagcagcgaggaagatcggaagaagggaaagaaattcgctcggtaccagctgggcgacctgctgctgcacctggaaaagaagcacggcgaggactggggaaaggtgtacgacgaggcctgggagcggattgacaagaaagtggaaggcctgagcaagcacatcaagctggaagaggaacggagaagcgaggacgcccagagcaaggccgccctgaccgactggctgcgggctaaggccagcttcgtgatcgagggcctgaaggaggccgacaaggacgagttctgcagatgcgagctgaagctgcagaagtggtacggggacctgcggggaaagcccttcgccatcgaagccgagaacagcatcctggacatcagcggcttcagcaagcagtacaactgtgccttcatctggcagaaggacggcgtgaagaagctgaacctgtacctgatcatcaactacttcaagggcggcaagctgcggttcaagaagatcaaacctgaagccttcgaagccaacagattctacaccgtgatcaacaaaaagagcggcgagatcgtgcccatggaggtgaacttcaacttcgacgaccccaacctgatcatcctgcctctggcctttggcaagagacagggcagagaattcatctggaacgacctgctgtccctggaaaccggcagcctgaagctggccaacggaagagtgatcgagaagacactgtacaacagaagaacccggcaggatgagcctgccctgttcgtggccctgaccttcgagcggcgggaggtcctggactcctccaatatcaaaccaatgaacctgatcggcgtggcaagaggcgaaaacatccccgccgtgatcgccctgaccgaccccgagggctgcccactgagccggtttaaggatagcctgggaaacccaacccacatcctgagaatcggcgagagctataaggagaagcagcggaccatccaggccaagaaggaggtggagcagcggagagccggcggctacagccggaagtacgccagcaaagccaagaatctggcagacgatatggtgagaaacaccgctagagatctgctgtactacgccgtgacccaggatgccatgctgatcttcgccaacctgagccggggcttcggccggcagggcaagcggaccttcatggccgagagacagtacacacggatggaggactggctgaccgccaagctggcctacgagggcctgagcaagacctacctgtccaagacactggcccagtacacctccaagacatgcagcaactgtgggtttaccatcaccagcgccgactacgacagggtgctggagaagctgaagaagacagcaacaggctggatgaccacaattaacggcaaggagctgaaggtggagggccagattacctactacaacagatacaagagacagaacgtagtcaaggacctgtccgtcgagctggatagactgagcgaagaatctgtgaacaacgacatctcctcctggacaaagggcagaagcggagaagctctgagcctcctgaagaaaagattctcccatagacccgtgcaggagaagttcgtgtgcctgaactgcggcttcgagacacacgcagccgagcaagccgccctgaacatcgccagatcctggctgttcctgcggagccaggagtacaagaaataccagacaaacaagacaaccggcaacaccgataagagagccttcgtcgagacctggcagtccttttaccggaagaagcttaaggaggtgtggaaacctgccgtgcggtctggcggatctggcggaggctccagcacccccgtgaccttcgaggacgtggtggtgtacttcaccgccgccgagtgggtgcacctgaccaactggcagagggacttctaccaggccgtgatgatggagacctacgagctggtggccagcgtggccggcgacggcgtgcccatggccgaggacgaggagggcggcgtggagaggcccgtgtggcagtacatccccaggggcaagaggaggaggaagaccccccagcccagggccgacggcggcccaagcagcggcgcccctcctcccagcggcggcagcccagccggctccccaacctctaccgaggagggcacctctgagtccgccacccccgagagcggccctggcacctccaccgagcccagcgagggcagcgcacccggcagccctgccggcagccccacctccacagaggagggaaccagcaccgagcccagcgaaggcagcgccccaggcaccagcaccgagcctagtgagcaggagattaaacggatcaacaagatcagaagaagacttgtgaaagacagcaacaccaagaaggccggcaagacaggccccatgaaaaccctgctggttagagtgatgacacccgatctgagagagcggctggaaaacctgagaaagaagcctgaaaatatcccccagcccatcagcaatacatctagagccaacctgaataagctgctgaccgattacaccgaaatgaagaaggcgatcctgcatgtgtactgggaagagttccagaaggaccctgtgggcctgatgagccgggtggcccagcctgccagcaagaagatcgatcagaacaagctgaaacctgagatggacgagaagggcaacctgaccaccgccggctttgcctgctctcagtgtggccagcccctgttcgtgtacaagctggagcaggtgtctgagaagggcaaggcttacaccaactacttcggacggtgcaatgtggccgagcacgaaaagctgatcctgctggcccagctgaagcccgagaaggatagcgacgaagccgtgacatatagcctgggaaagtttgggcagagggccctggatttctacagcattcatgtgaccaaggagtccacccaccccgtgaagcccctggcccagatcgccggaaacagatacgcctccggacctgtgggaaaggccctgagcgacgcatgtatgggcacaatcgcctccttcctgtctaagtaccaggacatcatcatcgaacaccagaaggtggtgaagggcaaccagaagagactggagagcctgcgggagctggccggcaaggaaaacctggaataccctagcgtgaccctgccacctcagcctcacaccaaggagggcgttgatgcctacaacgaagtgatcgcccgggtgcgaatgtgggtgaacctgaacctgtggcagaagctgaagctaagcagagatgatgccaagcctctgctgagactgaagggattcccttcctttcctctggtcgagagacaggccaacgaagtggactggtgggacatggtgtgtaacgtgaagaagctgatcaacgagaaaaaggaggatggcaaggtgttttggcagaatctggctggctacaagagacaggaagccctgagaccatacctgagcagcgaggaagatcggaagaagggaaagaaattcgctcggtaccagctgggcgacctgctgctgcacctggaaaagaagcacggcgaggactggggaaaggtgtacgacgaggcctgggagcggattgacaagaaagtggaaggcctgagcaagcacatcaagctggaagaggaacggagaagcgaggacgcccagagcaaggccgccctgaccgactggctgcgggctaaggccagcttcgtgatcgagggcctgaaggaggccgacaaggacgagttctgcagatgcgagctgaagctgcagaagtggtacggggacctgcggggaaagcccttcgccatcgaagccgagaacagcatcctggacatcagcggcttcagcaagcagtacaactgtgccttcatctggcagaaggacggcgtgaagaagctgaacctgtacctgatcatcaactacttcaagggcggcaagctgcggttcaagaagatcaaacctgaagccttcgaagccaacagattctacaccgtgatcaacaaaaagagcggcgagatcgtgcccatggaggtgaacttcaacttcgacgaccccaacctgatcatcctgcctctggcctttggcaagagacagggcagagaattcatctggaacgacctgctgtccctggaaaccggcagcctgaagctggccaacggaagagtgatcgagaagacactgtacaacagaagaacccggcaggatgagcctgccctgttcgtggccctgaccttcgagcggcgggaggtcctggactcctccaatatcaaaccaatgaacctgatcggcgtggcaagaggcgaaaacatccccgccgtgatcgccctgaccgaccccgagggctgcccactgagccggtttaaggatagcctgggaaacccaacccacatcctgagaatcggcgagagctataaggagaagcagcggaccatccaggccaagaaggaggtggagcagcggagagccggcggctacagccggaagtacgccagcaaagccaagaatctggcagacgatatggtgagaaacaccgctagagatctgctgtactacgccgtgacccaggatgccatgctgatcttcgccaacctgagccggggcttcggccggcagggcaagcggaccttcatggccgagagacagtacacacggatggaggactggctgaccgccaagctggcctacgagggcctgagcaagacctacctgtccaagacactggcccagtacacctccaagacatgcagcaactgtgggtttaccatcaccagcgccgactacgacagggtgctggagaagctgaagaagacagcaacaggctggatgaccacaattaacggcaaggagctgaaggtggagggccagattacctactacaacagatacaagagacagaacgtagtcaaggacctgtccgtcgagctggatagactgagcgaagaatctgtgaacaacgacatctcctcctggacaaagggcagaagcggagaagctctgagcctcctgaagaaaagattctcccatagacccgtgcaggagaagttcgtgtgcctgaactgcggcttcgagacacacgcagccgagcaagccgccctgaacatcgccagatcctggctgttcctgcggagccaggagtacaagaaataccagacaaacaagacaaccggcaacaccgataagagagccttcgtcgagacctggcagtccttttaccggaagaagcttaaggaggtgtggaaacctgccgtgcggtctggcggatctggcggaggctcctagcacccccgtgaccttcgaggacgtggtggtgtacttcaccgccgccgagtgggtgcacctgaccaactggcagagggacttctaccaggccgtgatgatggagacctacgagctggtggccagcgtggccggcgacggcgtgcccatggccgaggacgaggagggcggcgtggagaggcccgtgtggcagtacatccccaggggcaagaggaggaggaagaccccccagcccagggccgacggatctggctccggcagcggccccaagaaaaagagaaaagtctaagctgccttctgcggggcttgccttctggccatgcccttcttctctcccttgcacctgtacctcttggtctttgaataaagcctgagtaggaaggctagcaaaaaaaaaaaaaaaaaaaaaaaaaaaaaaaaaaaaaaaaaaaaaaaaaaaaaaaaaaaaaaaaaaaaaaaaaaaaaaaa

SEQ ID NO: 15309 - RNA, 9485 nt, synthetic construct
  source 1..9485: mol_type = other RNA
aggaaataagagagaaaagaagagtaagaagaaatataagagccaccatggcccctaagaagaagcgtaaagtgagccggatggaacgcctcgtctacgaggtgcggcagaagtgcagaaacatcgaggacatctgcatctcctgcggatctctgaacgtgaccctggagcacccactgttcatcggcggcatgtgccagaactgtaaaaactgttttctggagtgtgcctatcaatacgacgatgacggctaccagagctactgcaccatctgttgcggcggaagagaggtgctgatgtgtggaaataacaactgctgccggtgcttctgcgtggaatgcgtggacctgctggtgggccccggcgccgcccaggccgctattaaggaagatccttggaactgctacatgtgcggccacaagggcacatacggcctgctgagacggagagaggactggcctagcagactgcagatgttcttcgccaataaccacgaccaggagttcgacccccctaaggtgtaccctcccgtccccgccgagaagagaaagcccatccgggtcctgagcctgttcgatggcatcgccaccggtctgctggtgctgaaggacctgggcatccaggtggataggtacattgcctccgaggtgtgcgaggactccatcaccgtgggaatggtgcgtcatcagggcaagatcatgtacgtgggcgacgtgcggagcgtgacacagaagcatatccaggagtggggccctttcgacctggtgatcggcggcagcccttgcaatgacctgagcatcgtgaacccagcccggaagggcctgtacgagggaaccggcagactgttcttcgagttttacagactgctgcacgacgcccggcctaaggaaggcgacgaccggcccttcttttggctgttcgagaatgtggtggccatgggagtcagcgacaagcgggatattagccggttcctggagagcaaccccgtgatgatcgatgccaaggaagtgagcgccgcccaccgggccagatacttctggggcaatctgcctggcatgaacagacccctggccagcaccgtgaacgacaagctggagctgcaggagtgcctggagcacggccggatcgccaagttcagcaaggtgagaaccatcaccacccgaagcaacagcatcaaacaaggcaaggaccagcactttcctgtgttcatgaacgagaaggaggacatcctgtggtgtaccgagatggagagagtgttcgggttcccagtccactacacagatgtcagcaacatgtctagactggccagacagagactgctgggaagaagctggtccgtccctgtgatcagacacctgttcgcccctctgaaggagtacttcgcctgcgtgagcagcggcaacagcaacgccaacagccggggccccagcttctctagcggcctggtgccactgtccctgagagggagccacatgggccccatggagatctacaaaaccgtgagcgcctggaagcggcagcctgtgcgcgtgctgagcctgtttcggaatatcgataaagtcctgaaaagcctgggattcctggagagcggctctggctccggcggtggcaccctgaagtacgtggaggatgtgacaaacgtggtcagacgggatgtggagaagtggggccccttcgatctggtgtacggcagcacccaacccctgggcagctcttgtgaccggtgccctggctggtacatgtttcagttccaccggatcctgcagtacgccctgccgagacaggagtcccagcggccattcttttggattttcatggacaacttgctgctgaccgaggatgaccaggaaactaccactcggttcctgcagaccgaagccgtgaccctgcaggacgtgagaggccgggactaccagaacgccatgcgggtgtggtccaacatccctggactgaaaagcaagcacgcacctctgacccctaaagaagaggagtacctgcaggcccaggtgcggagcagaagcaagctggacgcccctaaggtggatctgctggtgaagaattgcctcctgcccctgagagagtacttcaagtatttcagccagaatagtctgcccctgggaggcagcggcggcggcgccctggtgacatttgaggacgtcgccgtgcggttcacccaggaggaatgggctctgctggatccttctcagaaaatcctgtaccgggacgtgatgagagagacataccggaatctgacctccgtgggcatcaactgggaatgttgggaccttgaagcctgcttcagaagcctgggaagaaacctgagagtgcaggtggtgaagagaaagtgcgagctgaccaacagcggcccctgcgccgagggcggcccaagcagcggcgcccctcctcccagcggcggcagcccagccggctccccaacctctaccgaggagggcacctctgagtccgccacccccgagagcggccctggcacctccaccgagcccagcgagggcagcgcacccggcagccctgccggcagccccacctccacagaggagggaaccagcaccgagcccagcgaaggcagcgccccaggcaccagcaccgagcctagtgagcaggagattaaacggatcaacaagatcagaagaagacttgtgaaagacagcaacaccaagaaggccggcaagacaggccccatgaaaaccctgctggttagagtgatgacacccgatctgagagagcggctggaaaacctgagaaagaagcctgaaaatatcccccagcccatcagcaatacatctagagccaacctgaataagctgctgaccgattacaccgaaatgaagaaggcgatcctgcatgtgtactgggaagagttccagaaggaccctgtgggcctgatgagccgggtggcccagcctgccagcaagaagatcgatcagaacaagctgaaacctgagatggacgagaagggcaacctgaccaccgccggctttgcctgctctcagtgtggccagcccctgttcgtgtacaagctggagcaggtgtctgagaagggcaaggcttacaccaactacttcggacggtgcaatgtggccgagcacgaaaagctgatcctgctggcccagctgaagcccgagaaggatagcgacgaagccgtgacatatagcctgggaaagtttgggcagagggccctggatttctacagcattcatgtgaccaaggagtccacccaccccgtgaagcccctggcccagatcgccggaaacagatacgcctccggacctgtgggaaaggccctgagcgacgcatgtatgggcacaatcgcctccttcctgtctaagtaccaggacatcatcatcgaacaccagaaggtggtgaagggcaaccagaagagactggagagcctgcgggagctggccggcaaggaaaacctggaataccctagcgtgaccctgccacctcagcctcacaccaaggagggcgttgatgcctacaacgaagtgatcgcccgggtgcgaatgtgggtgaacctgaacctgtggcagaagctgaagctaagcagagatgatgccaagcctctgctgagactgaagggattcccttcctttcctctggtcgagagacaggccaacgaagtggactggtgggacatggtgtgtaacgtgaagaagctgatcaacgagaaaaaggaggatggcaaggtgttttggcagaatctggctggctacaagagacaggaagccctgagaccatacctgagcagcgaggaagatcggaagaagggaaagaaattcgctcggtaccagctgggcgacctgctgctgcacctggaaaagaagcacggcgaggactggggaaaggtgtacgacgaggcctgggagcggattgacaagaaagtggaaggcctgagcaagcacatcaagctggaagaggaacggagaagcgaggacgcccagagcaaggccgccctgaccgactggctgcgggctaaggccagcttcgtgatcgagggcctgaaggaggccgacaaggacgagttctgcagatgcgagctgaagctgcagaagtggtacggggacctgcggggaaagcccttcgccatcgaagccgagaacagcatcctggacatcagcggcttcagcaagcagtacaactgtgccttcatctggcagaaggacggcgtgaagaagctgaacctgtacctgatcatcaactacttcaagggcggcaagctgcggttcaagaagatcaaacctgaagccttcgaagccaacagattctacaccgtgatcaacaaaaagagcggcgagatcgtgcccatggaggtgaacttcaacttcgacgaccccaacctgatcatcctgcctctggcctttggcaagagacagggcagagaattcatctggaacgacctgctgtccctggaaaccggcagcctgaagctggccaacggaagagtgatcgagaagacactgtacaacagaagaacccggcaggatgagcctgccctgttcgtggccctgaccttcgagcggcgggaggtcctggactcctccaatatcaaaccaatgaacctgatcggcgtggcaagaggcgaaaacatccccgccgtgatcgccctgaccgaccccgagggctgcccactgagccggtttaaggatagcctgggaaacccaacccacatcctgagaatcggcgagagctataaggagaagcagcggaccatccaggccaagaaggaggtggagcagcggagagccggcggctacagccggaagtacgccagcaaagccaagaatctggcagacgatatggtgagaaacaccgctagagatctgctgtactacgccgtgacccaggatgccatgctgatcttcgccaacctgagccggggcttcggccggcagggcaagcggaccttcatggccgagagacagtacacacggatggaggactggctgaccgccaagctggcctacgagggcctgagcaagacctacctgtccaagacactggcccagtacacctccaagacatgcagcaactgtgggtttaccatcaccagcgccgactacgacagggtgctggagaagctgaagaagacagcaacaggctggatgaccacaattaacggcaaggagctgaaggtggagggccagattacctactacaacagatacaagagacagaacgtagtcaaggacctgtccgtcgagctggatagactgagcgaagaatctgtgaacaacgacatctcctcctggacaaagggcagaagcggagaagctctgagcctcctgaagaaaagattctcccatagacccgtgcaggagaagttcgtgtgcctgaactgcggcttcgagacacacgcagccgagcaagccgccctgaacatcgccagatcctggctgttcctgcggagccaggagtacaagaaataccagacaaacaagacaaccggcaacaccgataagagagccttcgtcgagacctggcagtccttttaccggaagaagcttaaggaggtgtggaaacctgccgtgcggtctggcggatctggcggaggctccaagcccggcgccgtgagcttcgccgacgtggccgtgtacttcagccccgaggagtggggctgcctgaggcccgcccagagggccctgtacagggacgtgatgagggagacctacggccacctgggcgccctgggcttccccggccccaagcccgccctgatcagctggatggagcaggagagcgaggcctggagccccgccgcccaggaccccgaggagggcgagagcctgggcggcgccctgggcggcccaagcagcggcgcccctcctcccagcggcggcagcccagccggctccccaacctctaccgaggagggcacctctgagtccgccacccccgagagcggccctggcacctccaccgagcccagcgagggcagcgcacccggcagccctgccggcagccccacctccacagaggagggaaccagcaccgagcccagcgaaggcagcgccccaggcaccagcaccgagcctagtgagcaggagattaaacggatcaacaagatcagaagaagacttgtgaaagacagcaacaccaagaaggccggcaagacaggccccatgaaaaccctgctggttagagtgatgacacccgatctgagagagcggctggaaaacctgagaaagaagcctgaaaatatcccccagcccatcagcaatacatctagagccaacctgaataagctgctgaccgattacaccgaaatgaagaaggcgatcctgcatgtgtactgggaagagttccagaaggaccctgtgggcctgatgagccgggtggcccagcctgccagcaagaagatcgatcagaacaagctgaaacctgagatggacgagaagggcaacctgaccaccgccggctttgcctgctctcagtgtggccagcccctgttcgtgtacaagctggagcaggtgtctgagaagggcaaggcttacaccaactacttcggacggtgcaatgtggccgagcacgaaaagctgatcctgctggcccagctgaagcccgagaaggatagcgacgaagccgtgacatatagcctgggaaagtttgggcagagggccctggatttctacagcattcatgtgaccaaggagtccacccaccccgtgaagcccctggcccagatcgccggaaacagatacgcctccggacctgtgggaaaggccctgagcgacgcatgtatgggcacaatcgcctccttcctgtctaagtaccaggacatcatcatcgaacaccagaaggtggtgaagggcaaccagaagagactggagagcctgcgggagctggccggcaaggaaaacctggaataccctagcgtgaccctgccacctcagcctcacaccaaggagggcgttgatgcctacaacgaagtgatcgcccgggtgcgaatgtgggtgaacctgaacctgtggcagaagctgaagctaagcagagatgatgccaagcctctgctgagactgaagggattcccttcctttcctctggtcgagagacaggccaacgaagtggactggtgggacatggtgtgtaacgtgaagaagctgatcaacgagaaaaaggaggatggcaaggtgttttggcagaatctggctggctacaagagacaggaagccctgagaccatacctgagcagcgaggaagatcggaagaagggaaagaaattcgctcggtaccagctgggcgacctgctgctgcacctggaaaagaagcacggcgaggactggggaaaggtgtacgacgaggcctgggagcggattgacaagaaagtggaaggcctgagcaagcacatcaagctggaagaggaacggagaagcgaggacgcccagagcaaggccgccctgaccgactggctgcgggctaaggccagcttcgtgatcgagggcctgaaggaggccgacaaggacgagttctgcagatgcgagctgaagctgcagaagtggtacggggacctgcggggaaagcccttcgccatcgaagccgagaacagcatcctggacatcagcggcttcagcaagcagtacaactgtgccttcatctggcagaaggacggcgtgaagaagctgaacctgtacctgatcatcaactacttcaagggcggcaagctgcggttcaagaagatcaaacctgaagccttcgaagccaacagattctacaccgtgatcaacaaaaagagcggcgagatcgtgcccatggaggtgaacttcaacttcgacgaccccaacctgatcatcctgcctctggcctttggcaagagacagggcagagaattcatctggaacgacctgctgtccctggaaaccggcagcctgaagctggccaacggaagagtgatcgagaagacactgtacaacagaagaacccggcaggatgagcctgccctgttcgtggccctgaccttcgagcggcgggaggtcctggactcctccaatatcaaaccaatgaacctgatcggcgtggcaagaggcgaaaacatccccgccgtgatcgccctgaccgaccccgagggctgcccactgagccggtttaaggatagcctgggaaacccaacccacatcctgagaatcggcgagagctataaggagaagcagcggaccatccaggccaagaaggaggtggagcagcggagagccggcggctacagccggaagtacgccagcaaagccaagaatctggcagacgatatggtgagaaacaccgctagagatctgctgtactacgccgtgacccaggatgccatgctgatcttcgccaacctgagccggggcttcggccggcagggcaagcggaccttcatggccgagagacagtacacacggatggaggactggctgaccgccaagctggcctacgagggcctgagcaagacctacctgtccaagacactggcccagtacacctccaagacatgcagcaactgtgggtttaccatcaccagcgccgactacgacagggtgctggagaagctgaagaagacagcaacaggctggatgaccacaattaacggcaaggagctgaaggtggagggccagattacctactacaacagatacaagagacagaacgtagtcaaggacctgtccgtcgagctggatagactgagcgaagaatctgtgaacaacgacatctcctcctggacaaagggcagaagcggagaagctctgagcctcctgaagaaaagattctcccatagacccgtgcaggagaagttcgtgtgcctgaactgcggcttcgagacacacgcagccgagcaagccgccctgaacatcgccagatcctggctgttcctgcggagccaggagtacaagaaataccagacaaacaagacaaccggcaacaccgataagagagccttcgtcgagacctggcagtccttttaccggaagaagcttaaggaggtgtggaaacctgccgtgcggtctggcggatctggcggaggctcctaagcccggcgccgtgagcttcgccgacgtggccgtgtacttcagccccgaggagtggggctgcctgaggcccgcccagagggccctgtacagggacgtgatgagggagacctacggccacctgggcgccctgggcttccccggccccaagcccgccctgatcagctggatggagcaggagagcgaggcctggagccccgccgcccaggaccccgaggagggcgagagcctgggcggcgccctgggatctggctccggcagcggccccaagaaaaagagaaaagtctaagctgccttctgcggggcttgccttctggccatgcccttcttctctcccttgcacctgtacctcttggtctttgaataaagcctgagtaggaaggctagcaaaaaaaaaaaaaaaaaaaaaaaaaaaaaaaaaaaaaaaaaaaaaaaaaaaaaaaaaaaaaaaaaaaaaaaaaaaaaaaa

SEQ ID NO: 15310 - RNA, 9485 nt, synthetic construct
  source 1..9485: mol_type = other RNA
aggaaataagagagaaaagaagagtaagaagaaatataagagccaccatggcccctaagaagaagcgtaaagtgagccggatggaacgcctcgtctacgaggtgcggcagaagtgcagaaacatcgaggacatctgcatctcctgcggatctctgaacgtgaccctggagcacccactgttcatcggcggcatgtgccagaactgtaaaaactgttttctggagtgtgcctatcaatacgacgatgacggctaccagagctactgcaccatctgttgcggcggaagagaggtgctgatgtgtggaaataacaactgctgccggtgcttctgcgtggaatgcgtggacctgctggtgggccccggcgccgcccaggccgctattaaggaagatccttggaactgctacatgtgcggccacaagggcacatacggcctgctgagacggagagaggactggcctagcagactgcagatgttcttcgccaataaccacgaccaggagttcgacccccctaaggtgtaccctcccgtccccgccgagaagagaaagcccatccgggtcctgagcctgttcgatggcatcgccaccggtctgctggtgctgaaggacctgggcatccaggtggataggtacattgcctccgaggtgtgcgaggactccatcaccgtgggaatggtgcgtcatcagggcaagatcatgtacgtgggcgacgtgcggagcgtgacacagaagcatatccaggagtggggccctttcgacctggtgatcggcggcagcccttgcaatgacctgagcatcgtgaacccagcccggaagggcctgtacgagggaaccggcagactgttcttcgagttttacagactgctgcacgacgcccggcctaaggaaggcgacgaccggcccttcttttggctgttcgagaatgtggtggccatgggagtcagcgacaagcgggatattagccggttcctggagagcaaccccgtgatgatcgatgccaaggaagtgagcgccgcccaccgggccagatacttctggggcaatctgcctggcatgaacagacccctggccagcaccgtgaacgacaagctggagctgcaggagtgcctggagcacggccggatcgccaagttcagcaaggtgagaaccatcaccacccgaagcaacagcatcaaacaaggcaaggaccagcactttcctgtgttcatgaacgagaaggaggacatcctgtggtgtaccgagatggagagagtgttcgggttcccagtccactacacagatgtcagcaacatgtctagactggccagacagagactgctgggaagaagctggtccgtccctgtgatcagacacctgttcgcccctctgaaggagtacttcgcctgcgtgagcagcggcaacagcaacgccaacagccggggccccagcttctctagcggcctggtgccactgtccctgagagggagccacatgggccccatggagatctacaaaaccgtgagcgcctggaagcggcagcctgtgcgcgtgctgagcctgtttcggaatatcgataaagtcctgaaaagcctgggattcctggagagcggctctggctccggcggtggcaccctgaagtacgtggaggatgtgacaaacgtggtcagacgggatgtggagaagtggggccccttcgatctggtgtacggcagcacccaacccctgggcagctcttgtgaccggtgccctggctggtacatgtttcagttccaccggatcctgcagtacgccctgccgagacaggagtcccagcggccattcttttggattttcatggacaacttgctgctgaccgaggatgaccaggaaactaccactcggttcctgcagaccgaagccgtgaccctgcaggacgtgagaggccgggactaccagaacgccatgcgggtgtggtccaacatccctggactgaaaagcaagcacgcacctctgacccctaaagaagaggagtacctgcaggcccaggtgcggagcagaagcaagctggacgcccctaaggtggatctgctggtgaagaattgcctcctgcccctgagagagtacttcaagtatttcagccagaatagtctgcccctgggaggcagcggcggcggcgccctggtgacatttgaggacgtcgccgtgcggttcacccaggaggaatgggctctgctggatccttctcagaaaatcctgtaccgggacgtgatgagagagacataccggaatctgacctccgtgggcatcaactgggaatgttgggaccttgaagcctgcttcagaagcctgggaagaaacctgagagtgcaggtggtgaagagaaagtgcgagctgaccaacagcggcccctgcgccgagggcggcccaagcagcggcgcccctcctcccagcggcggcagcccagccggctccccaacctctaccgaggagggcacctctgagtccgccacccccgagagcggccctggcacctccaccgagcccagcgagggcagcgcacccggcagccctgccggcagccccacctccacagaggagggaaccagcaccgagcccagcgaaggcagcgccccaggcaccagcaccgagcctagtgagcaggagattaaacggatcaacaagatcagaagaagacttgtgaaagacagcaacaccaagaaggccggcaagacaggccccatgaaaaccctgctggttagagtgatgacacccgatctgagagagcggctggaaaacctgagaaagaagcctgaaaatatcccccagcccatcagcaatacatctagagccaacctgaataagctgctgaccgattacaccgaaatgaagaaggcgatcctgcatgtgtactgggaagagttccagaaggaccctgtgggcctgatgagccgggtggcccagcctgccagcaagaagatcgatcagaacaagctgaaacctgagatggacgagaagggcaacctgaccaccgccggctttgcctgctctcagtgtggccagcccctgttcgtgtacaagctggagcaggtgtctgagaagggcaaggcttacaccaactacttcggacggtgcaatgtggccgagcacgaaaagctgatcctgctggcccagctgaagcccgagaaggatagcgacgaagccgtgacatatagcctgggaaagtttgggcagagggccctggatttctacagcattcatgtgaccaaggagtccacccaccccgtgaagcccctggcccagatcgccggaaacagatacgcctccggacctgtgggaaaggccctgagcgacgcatgtatgggcacaatcgcctccttcctgtctaagtaccaggacatcatcatcgaacaccagaaggtggtgaagggcaaccagaagagactggagagcctgcgggagctggccggcaaggaaaacctggaataccctagcgtgaccctgccacctcagcctcacaccaaggagggcgttgatgcctacaacgaagtgatcgcccgggtgcgaatgtgggtgaacctgaacctgtggcagaagctgaagctaagcagagatgatgccaagcctctgctgagactgaagggattcccttcctttcctctggtcgagagacaggccaacgaagtggactggtgggacatggtgtgtaacgtgaagaagctgatcaacgagaaaaaggaggatggcaaggtgttttggcagaatctggctggctacaagagacaggaagccctgagaccatacctgagcagcgaggaagatcggaagaagggaaagaaattcgctcggtaccagctgggcgacctgctgctgcacctggaaaagaagcacggcgaggactggggaaaggtgtacgacgaggcctgggagcggattgacaagaaagtggaaggcctgagcaagcacatcaagctggaagaggaacggagaagcgaggacgcccagagcaaggccgccctgaccgactggctgcgggctaaggccagcttcgtgatcgagggcctgaaggaggccgacaaggacgagttctgcagatgcgagctgaagctgcagaagtggtacggggacctgcggggaaagcccttcgccatcgaagccgagaacagcatcctggacatcagcggcttcagcaagcagtacaactgtgccttcatctggcagaaggacggcgtgaagaagctgaacctgtacctgatcatcaactacttcaagggcggcaagctgcggttcaagaagatcaaacctgaagccttcgaagccaacagattctacaccgtgatcaacaaaaagagcggcgagatcgtgcccatggaggtgaacttcaacttcgacgaccccaacctgatcatcctgcctctggcctttggcaagagacagggcagagaattcatctggaacgacctgctgtccctggaaaccggcagcctgaagctggccaacggaagagtgatcgagaagacactgtacaacagaagaacccggcaggatgagcctgccctgttcgtggccctgaccttcgagcggcgggaggtcctggactcctccaatatcaaaccaatgaacctgatcggcgtggcaagaggcgaaaacatccccgccgtgatcgccctgaccgaccccgagggctgcccactgagccggtttaaggatagcctgggaaacccaacccacatcctgagaatcggcgagagctataaggagaagcagcggaccatccaggccaagaaggaggtggagcagcggagagccggcggctacagccggaagtacgccagcaaagccaagaatctggcagacgatatggtgagaaacaccgctagagatctgctgtactacgccgtgacccaggatgccatgctgatcttcgccaacctgagccggggcttcggccggcagggcaagcggaccttcatggccgagagacagtacacacggatggaggactggctgaccgccaagctggcctacgagggcctgagcaagacctacctgtccaagacactggcccagtacacctccaagacatgcagcaactgtgggtttaccatcaccagcgccgactacgacagggtgctggagaagctgaagaagacagcaacaggctggatgaccacaattaacggcaaggagctgaaggtggagggccagattacctactacaacagatacaagagacagaacgtagtcaaggacctgtccgtcgagctggatagactgagcgaagaatctgtgaacaacgacatctcctcctggacaaagggcagaagcggagaagctctgagcctcctgaagaaaagattctcccatagacccgtgcaggagaagttcgtgtgcctgaactgcggcttcgagacacacgcagccgagcaagccgccctgaacatcgccagatcctggctgttcctgcggagccaggagtacaagaaataccagacaaacaagacaaccggcaacaccgataagagagccttcgtcgagacctggcagtccttttaccggaagaagcttaaggaggtgtggaaacctgccgtgcggtctggcggatctggcggaggctccaagcccggcgccgtgagcttcgccgacgtggccgtgtacttcagccccgaggagtggggctgcctgaggcccgcccagagggccctgtacagggacgtgatgagggagacctacggccacctgggcgccctgggcttccccggccccaagcccgccctgatcagctggatggagcaggagagcgaggcctggagccccgacgcccaggaccccgaggagggcgagagcctgggcggcgccctgggcggcccaagcagcggcgcccctcctcccagcggcggcagcccagccggctccccaacctctaccgaggagggcacctctgagtccgccacccccgagagcggccctggcacctccaccgagcccagcgagggcagcgcacccggcagccctgccggcagccccacctccacagaggagggaaccagcaccgagcccagcgaaggcagcgccccaggcaccagcaccgagcctagtgagcaggagattaaacggatcaacaagatcagaagaagacttgtgaaagacagcaacaccaagaaggccggcaagacaggccccatgaaaaccctgctggttagagtgatgacacccgatctgagagagcggctggaaaacctgagaaagaagcctgaaaatatcccccagcccatcagcaatacatctagagccaacctgaataagctgctgaccgattacaccgaaatgaagaaggcgatcctgcatgtgtactgggaagagttccagaaggaccctgtgggcctgatgagccgggtggcccagcctgccagcaagaagatcgatcagaacaagctgaaacctgagatggacgagaagggcaacctgaccaccgccggctttgcctgctctcagtgtggccagcccctgttcgtgtacaagctggagcaggtgtctgagaagggcaaggcttacaccaactacttcggacggtgcaatgtggccgagcacgaaaagctgatcctgctggcccagctgaagcccgagaaggatagcgacgaagccgtgacatatagcctgggaaagtttgggcagagggccctggatttctacagcattcatgtgaccaaggagtccacccaccccgtgaagcccctggcccagatcgccggaaacagatacgcctccggacctgtgggaaaggccctgagcgacgcatgtatgggcacaatcgcctccttcctgtctaagtaccaggacatcatcatcgaacaccagaaggtggtgaagggcaaccagaagagactggagagcctgcgggagctggccggcaaggaaaacctggaataccctagcgtgaccctgccacctcagcctcacaccaaggagggcgttgatgcctacaacgaagtgatcgcccgggtgcgaatgtgggtgaacctgaacctgtggcagaagctgaagctaagcagagatgatgccaagcctctgctgagactgaagggattcccttcctttcctctggtcgagagacaggccaacgaagtggactggtgggacatggtgtgtaacgtgaagaagctgatcaacgagaaaaaggaggatggcaaggtgttttggcagaatctggctggctacaagagacaggaagccctgagaccatacctgagcagcgaggaagatcggaagaagggaaagaaattcgctcggtaccagctgggcgacctgctgctgcacctggaaaagaagcacggcgaggactggggaaaggtgtacgacgaggcctgggagcggattgacaagaaagtggaaggcctgagcaagcacatcaagctggaagaggaacggagaagcgaggacgcccagagcaaggccgccctgaccgactggctgcgggctaaggccagcttcgtgatcgagggcctgaaggaggccgacaaggacgagttctgcagatgcgagctgaagctgcagaagtggtacggggacctgcggggaaagcccttcgccatcgaagccgagaacagcatcctggacatcagcggcttcagcaagcagtacaactgtgccttcatctggcagaaggacggcgtgaagaagctgaacctgtacctgatcatcaactacttcaagggcggcaagctgcggttcaagaagatcaaacctgaagccttcgaagccaacagattctacaccgtgatcaacaaaaagagcggcgagatcgtgcccatggaggtgaacttcaacttcgacgaccccaacctgatcatcctgcctctggcctttggcaagagacagggcagagaattcatctggaacgacctgctgtccctggaaaccggcagcctgaagctggccaacggaagagtgatcgagaagacactgtacaacagaagaacccggcaggatgagcctgccctgttcgtggccctgaccttcgagcggcgggaggtcctggactcctccaatatcaaaccaatgaacctgatcggcgtggcaagaggcgaaaacatccccgccgtgatcgccctgaccgaccccgagggctgcccactgagccggtttaaggatagcctgggaaacccaacccacatcctgagaatcggcgagagctataaggagaagcagcggaccatccaggccaagaaggaggtggagcagcggagagccggcggctacagccggaagtacgccagcaaagccaagaatctggcagacgatatggtgagaaacaccgctagagatctgctgtactacgccgtgacccaggatgccatgctgatcttcgccaacctgagccggggcttcggccggcagggcaagcggaccttcatggccgagagacagtacacacggatggaggactggctgaccgccaagctggcctacgagggcctgagcaagacctacctgtccaagacactggcccagtacacctccaagacatgcagcaactgtgggtttaccatcaccagcgccgactacgacagggtgctggagaagctgaagaagacagcaacaggctggatgaccacaattaacggcaaggagctgaaggtggagggccagattacctactacaacagatacaagagacagaacgtagtcaaggacctgtccgtcgagctggatagactgagcgaagaatctgtgaacaacgacatctcctcctggacaaagggcagaagcggagaagctctgagcctcctgaagaaaagattctcccatagacccgtgcaggagaagttcgtgtgcctgaactgcggcttcgagacacacgcagccgagcaagccgccctgaacatcgccagatcctggctgttcctgcggagccaggagtacaagaaataccagacaaacaagacaaccggcaacaccgataagagagccttcgtcgagacctggcagtccttttaccggaagaagcttaaggaggtgtggaaacctgccgtgcggtctggcggatctggcggaggctcctaagcccggcgccgtgagcttcgccgacgtggccgtgtacttcagccccgaggagtggggctgcctgaggcccgcccagagggccctgtacagggacgtgatgagggagacctacggccacctgggcgccctgggcttccccggccccaagcccgccctgatcagctggatggagcaggagagcgaggcctggagccccgacgcccaggaccccgaggagggcgagagcctgggcggcgccctgggatctggctccggcagcggccccaagaaaaagagaaaagtctaagctgccttctgcggggcttgccttctggccatgcccttcttctctcccttgcacctgtacctcttggtctttgaataaagcctgagtaggaaggctagcaaaaaaaaaaaaaaaaaaaaaaaaaaaaaaaaaaaaaaaaaaaaaaaaaaaaaaaaaaaaaaaaaaaaaaaaaaaaaaaa

SEQ ID NO: 15311 - RNA, 9485 nt, synthetic construct
  source 1..9485: mol_type = other RNA
aggaaataagagagaaaagaagagtaagaagaaatataagagccaccatggcccctaagaagaagcgtaaagtgagccggatggaacgcctcgtctacgaggtgcggcagaagtgcagaaacatcgaggacatctgcatctcctgcggatctctgaacgtgaccctggagcacccactgttcatcggcggcatgtgccagaactgtaaaaactgttttctggagtgtgcctatcaatacgacgatgacggctaccagagctactgcaccatctgttgcggcggaagagaggtgctgatgtgtggaaataacaactgctgccggtgcttctgcgtggaatgcgtggacctgctggtgggccccggcgccgcccaggccgctattaaggaagatccttggaactgctacatgtgcggccacaagggcacatacggcctgctgagacggagagaggactggcctagcagactgcagatgttcttcgccaataaccacgaccaggagttcgacccccctaaggtgtaccctcccgtccccgccgagaagagaaagcccatccgggtcctgagcctgttcgatggcatcgccaccggtctgctggtgctgaaggacctgggcatccaggtggataggtacattgcctccgaggtgtgcgaggactccatcaccgtgggaatggtgcgtcatcagggcaagatcatgtacgtgggcgacgtgcggagcgtgacacagaagcatatccaggagtggggccctttcgacctggtgatcggcggcagcccttgcaatgacctgagcatcgtgaacccagcccggaagggcctgtacgagggaaccggcagactgttcttcgagttttacagactgctgcacgacgcccggcctaaggaaggcgacgaccggcccttcttttggctgttcgagaatgtggtggccatgggagtcagcgacaagcgggatattagccggttcctggagagcaaccccgtgatgatcgatgccaaggaagtgagcgccgcccaccgggccagatacttctggggcaatctgcctggcatgaacagacccctggccagcaccgtgaacgacaagctggagctgcaggagtgcctggagcacggccggatcgccaagttcagcaaggtgagaaccatcaccacccgaagcaacagcatcaaacaaggcaaggaccagcactttcctgtgttcatgaacgagaaggaggacatcctgtggtgtaccgagatggagagagtgttcgggttcccagtccactacacagatgtcagcaacatgtctagactggccagacagagactgctgggaagaagctggtccgtccctgtgatcagacacctgttcgcccctctgaaggagtacttcgcctgcgtgagcagcggcaacagcaacgccaacagccggggccccagcttctctagcggcctggtgccactgtccctgagagggagccacatgggccccatggagatctacaaaaccgtgagcgcctggaagcggcagcctgtgcgcgtgctgagcctgtttcggaatatcgataaagtcctgaaaagcctgggattcctggagagcggctctggctccggcggtggcaccctgaagtacgtggaggatgtgacaaacgtggtcagacgggatgtggagaagtggggccccttcgatctggtgtacggcagcacccaacccctgggcagctcttgtgaccggtgccctggctggtacatgtttcagttccaccggatcctgcagtacgccctgccgagacaggagtcccagcggccattcttttggattttcatggacaacttgctgctgaccgaggatgaccaggaaactaccactcggttcctgcagaccgaagccgtgaccctgcaggacgtgagaggccgggactaccagaacgccatgcgggtgtggtccaacatccctggactgaaaagcaagcacgcacctctgacccctaaagaagaggagtacctgcaggcccaggtgcggagcagaagcaagctggacgcccctaaggtggatctgctggtgaagaattgcctcctgcccctgagagagtacttcaagtatttcagccagaatagtctgcccctgggaggcagcggcggcggcgccctggtgacatttgaggacgtcgccgtgcggttcacccaggaggaatgggctctgctggatccttctcagaaaatcctgtaccgggacgtgatgagagagacataccggaatctgacctccgtgggcatcaactgggaatgttgggaccttgaagcctgcttcagaagcctgggaagaaacctgagagtgcaggtggtgaagagaaagtgcgagctgaccaacagcggcccctgcgccgagggcggcccaagcagcggcgcccctcctcccagcggcggcagcccagccggctccccaacctctaccgaggagggcacctctgagtccgccacccccgagagcggccctggcacctccaccgagcccagcgagggcagcgcacccggcagccctgccggcagccccacctccacagaggagggaaccagcaccgagcccagcgaaggcagcgccccaggcaccagcaccgagcctagtgagcaggagattaaacggatcaacaagatcagaagaagacttgtgaaagacagcaacaccaagaaggccggcaagacaggccccatgaaaaccctgctggttagagtgatgacacccgatctgagagagcggctggaaaacctgagaaagaagcctgaaaatatcccccagcccatcagcaatacatctagagccaacctgaataagctgctgaccgattacaccgaaatgaagaaggcgatcctgcatgtgtactgggaagagttccagaaggaccctgtgggcctgatgagccgggtggcccagcctgccagcaagaagatcgatcagaacaagctgaaacctgagatggacgagaagggcaacctgaccaccgccggctttgcctgctctcagtgtggccagcccctgttcgtgtacaagctggagcaggtgtctgagaagggcaaggcttacaccaactacttcggacggtgcaatgtggccgagcacgaaaagctgatcctgctggcccagctgaagcccgagaaggatagcgacgaagccgtgacatatagcctgggaaagtttgggcagagggccctggatttctacagcattcatgtgaccaaggagtccacccaccccgtgaagcccctggcccagatcgccggaaacagatacgcctccggacctgtgggaaaggccctgagcgacgcatgtatgggcacaatcgcctccttcctgtctaagtaccaggacatcatcatcgaacaccagaaggtggtgaagggcaaccagaagagactggagagcctgcgggagctggccggcaaggaaaacctggaataccctagcgtgaccctgccacctcagcctcacaccaaggagggcgttgatgcctacaacgaagtgatcgcccgggtgcgaatgtgggtgaacctgaacctgtggcagaagctgaagctaagcagagatgatgccaagcctctgctgagactgaagggattcccttcctttcctctggtcgagagacaggccaacgaagtggactggtgggacatggtgtgtaacgtgaagaagctgatcaacgagaaaaaggaggatggcaaggtgttttggcagaatctggctggctacaagagacaggaagccctgagaccatacctgagcagcgaggaagatcggaagaagggaaagaaattcgctcggtaccagctgggcgacctgctgctgcacctggaaaagaagcacggcgaggactggggaaaggtgtacgacgaggcctgggagcggattgacaagaaagtggaaggcctgagcaagcacatcaagctggaagaggaacggagaagcgaggacgcccagagcaaggccgccctgaccgactggctgcgggctaaggccagcttcgtgatcgagggcctgaaggaggccgacaaggacgagttctgcagatgcgagctgaagctgcagaagtggtacggggacctgcggggaaagcccttcgccatcgaagccgagaacagcatcctggacatcagcggcttcagcaagcagtacaactgtgccttcatctggcagaaggacggcgtgaagaagctgaacctgtacctgatcatcaactacttcaagggcggcaagctgcggttcaagaagatcaaacctgaagccttcgaagccaacagattctacaccgtgatcaacaaaaagagcggcgagatcgtgcccatggaggtgaacttcaacttcgacgaccccaacctgatcatcctgcctctggcctttggcaagagacagggcagagaattcatctggaacgacctgctgtccctggaaaccggcagcctgaagctggccaacggaagagtgatcgagaagacactgtacaacagaagaacccggcaggatgagcctgccctgttcgtggccctgaccttcgagcggcgggaggtcctggactcctccaatatcaaaccaatgaacctgatcggcgtggcaagaggcgaaaacatccccgccgtgatcgccctgaccgaccccgagggctgcccactgagccggtttaaggatagcctgggaaacccaacccacatcctgagaatcggcgagagctataaggagaagcagcggaccatccaggccaagaaggaggtggagcagcggagagccggcggctacagccggaagtacgccagcaaagccaagaatctggcagacgatatggtgagaaacaccgctagagatctgctgtactacgccgtgacccaggatgccatgctgatcttcgccaacctgagccggggcttcggccggcagggcaagcggaccttcatggccgagagacagtacacacggatggaggactggctgaccgccaagctggcctacgagggcctgagcaagacctacctgtccaagacactggcccagtacacctccaagacatgcagcaactgtgggtttaccatcaccagcgccgactacgacagggtgctggagaagctgaagaagacagcaacaggctggatgaccacaattaacggcaaggagctgaaggtggagggccagattacctactacaacagatacaagagacagaacgtagtcaaggacctgtccgtcgagctggatagactgagcgaagaatctgtgaacaacgacatctcctcctggacaaagggcagaagcggagaagctctgagcctcctgaagaaaagattctcccatagacccgtgcaggagaagttcgtgtgcctgaactgcggcttcgagacacacgcagccgagcaagccgccctgaacatcgccagatcctggctgttcctgcggagccaggagtacaagaaataccagacaaacaagacaaccggcaacaccgataagagagccttcgtcgagacctggcagtccttttaccggaagaagcttaaggaggtgtggaaacctgccgtgcggtctggcggatctggcggaggctccatggccttcgaggacgtggccgtgtacttcagccaggaggagtggggcctgctggacaccgcccagagggccctgtacaggagggtgatgctggagaacttcaccctggtgaccagcctgggcctgagcaccagcaggccccacgtggtgatccagctggagaggggcgaggagccctgggtgcccagcggcaaggacatgaccctggccaggaacacctacaggaggctgaacgccggcgagggcggcccaagcagcggcgcccctcctcccagcggcggcagcccagccggctccccaacctctaccgaggagggcacctctgagtccgccacccccgagagcggccctggcacctccaccgagcccagcgagggcagcgcacccggcagccctgccggcagccccacctccacagaggagggaaccagcaccgagcccagcgaaggcagcgccccaggcaccagcaccgagcctagtgagcaggagattaaacggatcaacaagatcagaagaagacttgtgaaagacagcaacaccaagaaggccggcaagacaggccccatgaaaaccctgctggttagagtgatgacacccgatctgagagagcggctggaaaacctgagaaagaagcctgaaaatatcccccagcccatcagcaatacatctagagccaacctgaataagctgctgaccgattacaccgaaatgaagaaggcgatcctgcatgtgtactgggaagagttccagaaggaccctgtgggcctgatgagccgggtggcccagcctgccagcaagaagatcgatcagaacaagctgaaacctgagatggacgagaagggcaacctgaccaccgccggctttgcctgctctcagtgtggccagcccctgttcgtgtacaagctggagcaggtgtctgagaagggcaaggcttacaccaactacttcggacggtgcaatgtggccgagcacgaaaagctgatcctgctggcccagctgaagcccgagaaggatagcgacgaagccgtgacatatagcctgggaaagtttgggcagagggccctggatttctacagcattcatgtgaccaaggagtccacccaccccgtgaagcccctggcccagatcgccggaaacagatacgcctccggacctgtgggaaaggccctgagcgacgcatgtatgggcacaatcgcctccttcctgtctaagtaccaggacatcatcatcgaacaccagaaggtggtgaagggcaaccagaagagactggagagcctgcgggagctggccggcaaggaaaacctggaataccctagcgtgaccctgccacctcagcctcacaccaaggagggcgttgatgcctacaacgaagtgatcgcccgggtgcgaatgtgggtgaacctgaacctgtggcagaagctgaagctaagcagagatgatgccaagcctctgctgagactgaagggattcccttcctttcctctggtcgagagacaggccaacgaagtggactggtgggacatggtgtgtaacgtgaagaagctgatcaacgagaaaaaggaggatggcaaggtgttttggcagaatctggctggctacaagagacaggaagccctgagaccatacctgagcagcgaggaagatcggaagaagggaaagaaattcgctcggtaccagctgggcgacctgctgctgcacctggaaaagaagcacggcgaggactggggaaaggtgtacgacgaggcctgggagcggattgacaagaaagtggaaggcctgagcaagcacatcaagctggaagaggaacggagaagcgaggacgcccagagcaaggccgccctgaccgactggctgcgggctaaggccagcttcgtgatcgagggcctgaaggaggccgacaaggacgagttctgcagatgcgagctgaagctgcagaagtggtacggggacctgcggggaaagcccttcgccatcgaagccgagaacagcatcctggacatcagcggcttcagcaagcagtacaactgtgccttcatctggcagaaggacggcgtgaagaagctgaacctgtacctgatcatcaactacttcaagggcggcaagctgcggttcaagaagatcaaacctgaagccttcgaagccaacagattctacaccgtgatcaacaaaaagagcggcgagatcgtgcccatggaggtgaacttcaacttcgacgaccccaacctgatcatcctgcctctggcctttggcaagagacagggcagagaattcatctggaacgacctgctgtccctggaaaccggcagcctgaagctggccaacggaagagtgatcgagaagacactgtacaacagaagaacccggcaggatgagcctgccctgttcgtggccctgaccttcgagcggcgggaggtcctggactcctccaatatcaaaccaatgaacctgatcggcgtggcaagaggcgaaaacatccccgccgtgatcgccctgaccgaccccgagggctgcccactgagccggtttaaggatagcctgggaaacccaacccacatcctgagaatcggcgagagctataaggagaagcagcggaccatccaggccaagaaggaggtggagcagcggagagccggcggctacagccggaagtacgccagcaaagccaagaatctggcagacgatatggtgagaaacaccgctagagatctgctgtactacgccgtgacccaggatgccatgctgatcttcgccaacctgagccggggcttcggccggcagggcaagcggaccttcatggccgagagacagtacacacggatggaggactggctgaccgccaagctggcctacgagggcctgagcaagacctacctgtccaagacactggcccagtacacctccaagacatgcagcaactgtgggtttaccatcaccagcgccgactacgacagggtgctggagaagctgaagaagacagcaacaggctggatgaccacaattaacggcaaggagctgaaggtggagggccagattacctactacaacagatacaagagacagaacgtagtcaaggacctgtccgtcgagctggatagactgagcgaagaatctgtgaacaacgacatctcctcctggacaaagggcagaagcggagaagctctgagcctcctgaagaaaagattctcccatagacccgtgcaggagaagttcgtgtgcctgaactgcggcttcgagacacacgcagccgagcaagccgccctgaacatcgccagatcctggctgttcctgcggagccaggagtacaagaaataccagacaaacaagacaaccggcaacaccgataagagagccttcgtcgagacctggcagtccttttaccggaagaagcttaaggaggtgtggaaacctgccgtgcggtctggcggatctggcggaggctcctatggccttcgaggacgtggccgtgtacttcagccaggaggagtggggcctgctggacaccgcccagagggccctgtacaggagggtgatgctggagaacttcaccctggtgaccagcctgggcctgagcaccagcaggccccacgtggtgatccagctggagaggggcgaggagccctgggtgcccagcggcaaggacatgaccctggccaggaacacctacaggaggctgaacgccggcgagggatctggctccggcagcggccccaagaaaaagagaaaagtctaagctgccttctgcggggcttgccttctggccatgcccttcttctctcccttgcacctgtacctcttggtctttgaataaagcctgagtaggaaggctagcaaaaaaaaaaaaaaaaaaaaaaaaaaaaaaaaaaaaaaaaaaaaaaaaaaaaaaaaaaaaaaaaaaaaaaaaaaaaaaaa

SEQ ID NO: 15312 - RNA, 9485 nt, synthetic construct
  source 1..9485: mol_type = other RNA
aggaaataagagagaaaagaagagtaagaagaaatataagagccaccatggcccctaagaagaagcgtaaagtgagccggatggaacgcctcgtctacgaggtgcggcagaagtgcagaaacatcgaggacatctgcatctcctgcggatctctgaacgtgaccctggagcacccactgttcatcggcggcatgtgccagaactgtaaaaactgttttctggagtgtgcctatcaatacgacgatgacggctaccagagctactgcaccatctgttgcggcggaagagaggtgctgatgtgtggaaataacaactgctgccggtgcttctgcgtggaatgcgtggacctgctggtgggccccggcgccgcccaggccgctattaaggaagatccttggaactgctacatgtgcggccacaagggcacatacggcctgctgagacggagagaggactggcctagcagactgcagatgttcttcgccaataaccacgaccaggagttcgacccccctaaggtgtaccctcccgtccccgccgagaagagaaagcccatccgggtcctgagcctgttcgatggcatcgccaccggtctgctggtgctgaaggacctgggcatccaggtggataggtacattgcctccgaggtgtgcgaggactccatcaccgtgggaatggtgcgtcatcagggcaagatcatgtacgtgggcgacgtgcggagcgtgacacagaagcatatccaggagtggggccctttcgacctggtgatcggcggcagcccttgcaatgacctgagcatcgtgaacccagcccggaagggcctgtacgagggaaccggcagactgttcttcgagttttacagactgctgcacgacgcccggcctaaggaaggcgacgaccggcccttcttttggctgttcgagaatgtggtggccatgggagtcagcgacaagcgggatattagccggttcctggagagcaaccccgtgatgatcgatgccaaggaagtgagcgccgcccaccgggccagatacttctggggcaatctgcctggcatgaacagacccctggccagcaccgtgaacgacaagctggagctgcaggagtgcctggagcacggccggatcgccaagttcagcaaggtgagaaccatcaccacccgaagcaacagcatcaaacaaggcaaggaccagcactttcctgtgttcatgaacgagaaggaggacatcctgtggtgtaccgagatggagagagtgttcgggttcccagtccactacacagatgtcagcaacatgtctagactggccagacagagactgctgggaagaagctggtccgtccctgtgatcagacacctgttcgcccctctgaaggagtacttcgcctgcgtgagcagcggcaacagcaacgccaacagccggggccccagcttctctagcggcctggtgccactgtccctgagagggagccacatgggccccatggagatctacaaaaccgtgagcgcctggaagcggcagcctgtgcgcgtgctgagcctgtttcggaatatcgataaagtcctgaaaagcctgggattcctggagagcggctctggctccggcggtggcaccctgaagtacgtggaggatgtgacaaacgtggtcagacgggatgtggagaagtggggccccttcgatctggtgtacggcagcacccaacccctgggcagctcttgtgaccggtgccctggctggtacatgtttcagttccaccggatcctgcagtacgccctgccgagacaggagtcccagcggccattcttttggattttcatggacaacttgctgctgaccgaggatgaccaggaaactaccactcggttcctgcagaccgaagccgtgaccctgcaggacgtgagaggccgggactaccagaacgccatgcgggtgtggtccaacatccctggactgaaaagcaagcacgcacctctgacccctaaagaagaggagtacctgcaggcccaggtgcggagcagaagcaagctggacgcccctaaggtggatctgctggtgaagaattgcctcctgcccctgagagagtacttcaagtatttcagccagaatagtctgcccctgggaggcagcggcggcggcgccctggtgacatttgaggacgtcgccgtgcggttcacccaggaggaatgggctctgctggatccttctcagaaaatcctgtaccgggacgtgatgagagagacataccggaatctgacctccgtgggcatcaactgggaatgttgggaccttgaagcctgcttcagaagcctgggaagaaacctgagagtgcaggtggtgaagagaaagtgcgagctgaccaacagcggcccctgcgccgagggcggcccaagcagcggcgcccctcctcccagcggcggcagcccagccggctccccaacctctaccgaggagggcacctctgagtccgccacccccgagagcggccctggcacctccaccgagcccagcgagggcagcgcacccggcagccctgccggcagccccacctccacagaggagggaaccagcaccgagcccagcgaaggcagcgccccaggcaccagcaccgagcctagtgagcaggagattaaacggatcaacaagatcagaagaagacttgtgaaagacagcaacaccaagaaggccggcaagacaggccccatgaaaaccctgctggttagagtgatgacacccgatctgagagagcggctggaaaacctgagaaagaagcctgaaaatatcccccagcccatcagcaatacatctagagccaacctgaataagctgctgaccgattacaccgaaatgaagaaggcgatcctgcatgtgtactgggaagagttccagaaggaccctgtgggcctgatgagccgggtggcccagcctgccagcaagaagatcgatcagaacaagctgaaacctgagatggacgagaagggcaacctgaccaccgccggctttgcctgctctcagtgtggccagcccctgttcgtgtacaagctggagcaggtgtctgagaagggcaaggcttacaccaactacttcggacggtgcaatgtggccgagcacgaaaagctgatcctgctggcccagctgaagcccgagaaggatagcgacgaagccgtgacatatagcctgggaaagtttgggcagagggccctggatttctacagcattcatgtgaccaaggagtccacccaccccgtgaagcccctggcccagatcgccggaaacagatacgcctccggacctgtgggaaaggccctgagcgacgcatgtatgggcacaatcgcctccttcctgtctaagtaccaggacatcatcatcgaacaccagaaggtggtgaagggcaaccagaagagactggagagcctgcgggagctggccggcaaggaaaacctggaataccctagcgtgaccctgccacctcagcctcacaccaaggagggcgttgatgcctacaacgaagtgatcgcccgggtgcgaatgtgggtgaacctgaacctgtggcagaagctgaagctaagcagagatgatgccaagcctctgctgagactgaagggattcccttcctttcctctggtcgagagacaggccaacgaagtggactggtgggacatggtgtgtaacgtgaagaagctgatcaacgagaaaaaggaggatggcaaggtgttttggcagaatctggctggctacaagagacaggaagccctgagaccatacctgagcagcgaggaagatcggaagaagggaaagaaattcgctcggtaccagctgggcgacctgctgctgcacctggaaaagaagcacggcgaggactggggaaaggtgtacgacgaggcctgggagcggattgacaagaaagtggaaggcctgagcaagcacatcaagctggaagaggaacggagaagcgaggacgcccagagcaaggccgccctgaccgactggctgcgggctaaggccagcttcgtgatcgagggcctgaaggaggccgacaaggacgagttctgcagatgcgagctgaagctgcagaagtggtacggggacctgcggggaaagcccttcgccatcgaagccgagaacagcatcctggacatcagcggcttcagcaagcagtacaactgtgccttcatctggcagaaggacggcgtgaagaagctgaacctgtacctgatcatcaactacttcaagggcggcaagctgcggttcaagaagatcaaacctgaagccttcgaagccaacagattctacaccgtgatcaacaaaaagagcggcgagatcgtgcccatggaggtgaacttcaacttcgacgaccccaacctgatcatcctgcctctggcctttggcaagagacagggcagagaattcatctggaacgacctgctgtccctggaaaccggcagcctgaagctggccaacggaagagtgatcgagaagacactgtacaacagaagaacccggcaggatgagcctgccctgttcgtggccctgaccttcgagcggcgggaggtcctggactcctccaatatcaaaccaatgaacctgatcggcgtggcaagaggcgaaaacatccccgccgtgatcgccctgaccgaccccgagggctgcccactgagccggtttaaggatagcctgggaaacccaacccacatcctgagaatcggcgagagctataaggagaagcagcggaccatccaggccaagaaggaggtggagcagcggagagccggcggctacagccggaagtacgccagcaaagccaagaatctggcagacgatatggtgagaaacaccgctagagatctgctgtactacgccgtgacccaggatgccatgctgatcttcgccaacctgagccggggcttcggccggcagggcaagcggaccttcatggccgagagacagtacacacggatggaggactggctgaccgccaagctggcctacgagggcctgagcaagacctacctgtccaagacactggcccagtacacctccaagacatgcagcaactgtgggtttaccatcaccagcgccgactacgacagggtgctggagaagctgaagaagacagcaacaggctggatgaccacaattaacggcaaggagctgaaggtggagggccagattacctactacaacagatacaagagacagaacgtagtcaaggacctgtccgtcgagctggatagactgagcgaagaatctgtgaacaacgacatctcctcctggacaaagggcagaagcggagaagctctgagcctcctgaagaaaagattctcccatagacccgtgcaggagaagttcgtgtgcctgaactgcggcttcgagacacacgcagccgagcaagccgccctgaacatcgccagatcctggctgttcctgcggagccaggagtacaagaaataccagacaaacaagacaaccggcaacaccgataagagagccttcgtcgagacctggcagtccttttaccggaagaagcttaaggaggtgtggaaacctgccgtgcggtctggcggatctggcggaggctccatggccttcgaggacgtggccgtgtacttcagccaggaggagtggggcctgctggacaccgcccagagggccctgtacaggagggtgatgctggacaacttcgccctggtggccagcctgggcctgagcaccagcaggcccagggtggtgatccagctggagaggggcgaggagccctgggtgcccagcggcaccgacaccgtgctgagcaggaacacctacaggaggaggaaccccggcagcggcggcccaagcagcggcgcccctcctcccagcggcggcagcccagccggctccccaacctctaccgaggagggcacctctgagtccgccacccccgagagcggccctggcacctccaccgagcccagcgagggcagcgcacccggcagccctgccggcagccccacctccacagaggagggaaccagcaccgagcccagcgaaggcagcgccccaggcaccagcaccgagcctagtgagcaggagattaaacggatcaacaagatcagaagaagacttgtgaaagacagcaacaccaagaaggccggcaagacaggccccatgaaaaccctgctggttagagtgatgacacccgatctgagagagcggctggaaaacctgagaaagaagcctgaaaatatcccccagcccatcagcaatacatctagagccaacctgaataagctgctgaccgattacaccgaaatgaagaaggcgatcctgcatgtgtactgggaagagttccagaaggaccctgtgggcctgatgagccgggtggcccagcctgccagcaagaagatcgatcagaacaagctgaaacctgagatggacgagaagggcaacctgaccaccgccggctttgcctgctctcagtgtggccagcccctgttcgtgtacaagctggagcaggtgtctgagaagggcaaggcttacaccaactacttcggacggtgcaatgtggccgagcacgaaaagctgatcctgctggcccagctgaagcccgagaaggatagcgacgaagccgtgacatatagcctgggaaagtttgggcagagggccctggatttctacagcattcatgtgaccaaggagtccacccaccccgtgaagcccctggcccagatcgccggaaacagatacgcctccggacctgtgggaaaggccctgagcgacgcatgtatgggcacaatcgcctccttcctgtctaagtaccaggacatcatcatcgaacaccagaaggtggtgaagggcaaccagaagagactggagagcctgcgggagctggccggcaaggaaaacctggaataccctagcgtgaccctgccacctcagcctcacaccaaggagggcgttgatgcctacaacgaagtgatcgcccgggtgcgaatgtgggtgaacctgaacctgtggcagaagctgaagctaagcagagatgatgccaagcctctgctgagactgaagggattcccttcctttcctctggtcgagagacaggccaacgaagtggactggtgggacatggtgtgtaacgtgaagaagctgatcaacgagaaaaaggaggatggcaaggtgttttggcagaatctggctggctacaagagacaggaagccctgagaccatacctgagcagcgaggaagatcggaagaagggaaagaaattcgctcggtaccagctgggcgacctgctgctgcacctggaaaagaagcacggcgaggactggggaaaggtgtacgacgaggcctgggagcggattgacaagaaagtggaaggcctgagcaagcacatcaagctggaagaggaacggagaagcgaggacgcccagagcaaggccgccctgaccgactggctgcgggctaaggccagcttcgtgatcgagggcctgaaggaggccgacaaggacgagttctgcagatgcgagctgaagctgcagaagtggtacggggacctgcggggaaagcccttcgccatcgaagccgagaacagcatcctggacatcagcggcttcagcaagcagtacaactgtgccttcatctggcagaaggacggcgtgaagaagctgaacctgtacctgatcatcaactacttcaagggcggcaagctgcggttcaagaagatcaaacctgaagccttcgaagccaacagattctacaccgtgatcaacaaaaagagcggcgagatcgtgcccatggaggtgaacttcaacttcgacgaccccaacctgatcatcctgcctctggcctttggcaagagacagggcagagaattcatctggaacgacctgctgtccctggaaaccggcagcctgaagctggccaacggaagagtgatcgagaagacactgtacaacagaagaacccggcaggatgagcctgccctgttcgtggccctgaccttcgagcggcgggaggtcctggactcctccaatatcaaaccaatgaacctgatcggcgtggcaagaggcgaaaacatccccgccgtgatcgccctgaccgaccccgagggctgcccactgagccggtttaaggatagcctgggaaacccaacccacatcctgagaatcggcgagagctataaggagaagcagcggaccatccaggccaagaaggaggtggagcagcggagagccggcggctacagccggaagtacgccagcaaagccaagaatctggcagacgatatggtgagaaacaccgctagagatctgctgtactacgccgtgacccaggatgccatgctgatcttcgccaacctgagccggggcttcggccggcagggcaagcggaccttcatggccgagagacagtacacacggatggaggactggctgaccgccaagctggcctacgagggcctgagcaagacctacctgtccaagacactggcccagtacacctccaagacatgcagcaactgtgggtttaccatcaccagcgccgactacgacagggtgctggagaagctgaagaagacagcaacaggctggatgaccacaattaacggcaaggagctgaaggtggagggccagattacctactacaacagatacaagagacagaacgtagtcaaggacctgtccgtcgagctggatagactgagcgaagaatctgtgaacaacgacatctcctcctggacaaagggcagaagcggagaagctctgagcctcctgaagaaaagattctcccatagacccgtgcaggagaagttcgtgtgcctgaactgcggcttcgagacacacgcagccgagcaagccgccctgaacatcgccagatcctggctgttcctgcggagccaggagtacaagaaataccagacaaacaagacaaccggcaacaccgataagagagccttcgtcgagacctggcagtccttttaccggaagaagcttaaggaggtgtggaaacctgccgtgcggtctggcggatctggcggaggctcctatggccttcgaggacgtggccgtgtacttcagccaggaggagtggggcctgctggacaccgcccagagggccctgtacaggagggtgatgctggacaacttcgccctggtggccagcctgggcctgagcaccagcaggcccagggtggtgatccagctggagaggggcgaggagccctgggtgcccagcggcaccgacaccgtgctgagcaggaacacctacaggaggaggaaccccggcagcggatctggctccggcagcggccccaagaaaaagagaaaagtctaagctgccttctgcggggcttgccttctggccatgcccttcttctctcccttgcacctgtacctcttggtctttgaataaagcctgagtaggaaggctagcaaaaaaaaaaaaaaaaaaaaaaaaaaaaaaaaaaaaaaaaaaaaaaaaaaaaaaaaaaaaaaaaaaaaaaaaaaaaaaaa

SEQ ID NO: 15313 - RNA, 9485 nt, synthetic construct
  source 1..9485: mol_type = other RNA
aggaaataagagagaaaagaagagtaagaagaaatataagagccaccatggcccctaagaagaagcgtaaagtgagccggatggaacgcctcgtctacgaggtgcggcagaagtgcagaaacatcgaggacatctgcatctcctgcggatctctgaacgtgaccctggagcacccactgttcatcggcggcatgtgccagaactgtaaaaactgttttctggagtgtgcctatcaatacgacgatgacggctaccagagctactgcaccatctgttgcggcggaagagaggtgctgatgtgtggaaataacaactgctgccggtgcttctgcgtggaatgcgtggacctgctggtgggccccggcgccgcccaggccgctattaaggaagatccttggaactgctacatgtgcggccacaagggcacatacggcctgctgagacggagagaggactggcctagcagactgcagatgttcttcgccaataaccacgaccaggagttcgacccccctaaggtgtaccctcccgtccccgccgagaagagaaagcccatccgggtcctgagcctgttcgatggcatcgccaccggtctgctggtgctgaaggacctgggcatccaggtggataggtacattgcctccgaggtgtgcgaggactccatcaccgtgggaatggtgcgtcatcagggcaagatcatgtacgtgggcgacgtgcggagcgtgacacagaagcatatccaggagtggggccctttcgacctggtgatcggcggcagcccttgcaatgacctgagcatcgtgaacccagcccggaagggcctgtacgagggaaccggcagactgttcttcgagttttacagactgctgcacgacgcccggcctaaggaaggcgacgaccggcccttcttttggctgttcgagaatgtggtggccatgggagtcagcgacaagcgggatattagccggttcctggagagcaaccccgtgatgatcgatgccaaggaagtgagcgccgcccaccgggccagatacttctggggcaatctgcctggcatgaacagacccctggccagcaccgtgaacgacaagctggagctgcaggagtgcctggagcacggccggatcgccaagttcagcaaggtgagaaccatcaccacccgaagcaacagcatcaaacaaggcaaggaccagcactttcctgtgttcatgaacgagaaggaggacatcctgtggtgtaccgagatggagagagtgttcgggttcccagtccactacacagatgtcagcaacatgtctagactggccagacagagactgctgggaagaagctggtccgtccctgtgatcagacacctgttcgcccctctgaaggagtacttcgcctgcgtgagcagcggcaacagcaacgccaacagccggggccccagcttctctagcggcctggtgccactgtccctgagagggagccacatgggccccatggagatctacaaaaccgtgagcgcctggaagcggcagcctgtgcgcgtgctgagcctgtttcggaatatcgataaagtcctgaaaagcctgggattcctggagagcggctctggctccggcggtggcaccctgaagtacgtggaggatgtgacaaacgtggtcagacgggatgtggagaagtggggccccttcgatctggtgtacggcagcacccaacccctgggcagctcttgtgaccggtgccctggctggtacatgtttcagttccaccggatcctgcagtacgccctgccgagacaggagtcccagcggccattcttttggattttcatggacaacttgctgctgaccgaggatgaccaggaaactaccactcggttcctgcagaccgaagccgtgaccctgcaggacgtgagaggccgggactaccagaacgccatgcgggtgtggtccaacatccctggactgaaaagcaagcacgcacctctgacccctaaagaagaggagtacctgcaggcccaggtgcggagcagaagcaagctggacgcccctaaggtggatctgctggtgaagaattgcctcctgcccctgagagagtacttcaagtatttcagccagaatagtctgcccctgggaggcagcggcggcggcgccctggtgacatttgaggacgtcgccgtgcggttcacccaggaggaatgggctctgctggatccttctcagaaaatcctgtaccgggacgtgatgagagagacataccggaatctgacctccgtgggcatcaactgggaatgttgggaccttgaagcctgcttcagaagcctgggaagaaacctgagagtgcaggtggtgaagagaaagtgcgagctgaccaacagcggcccctgcgccgagggcggcccaagcagcggcgcccctcctcccagcggcggcagcccagccggctccccaacctctaccgaggagggcacctctgagtccgccacccccgagagcggccctggcacctccaccgagcccagcgagggcagcgcacccggcagccctgccggcagccccacctccacagaggagggaaccagcaccgagcccagcgaaggcagcgccccaggcaccagcaccgagcctagtgagcaggagattaaacggatcaacaagatcagaagaagacttgtgaaagacagcaacaccaagaaggccggcaagacaggccccatgaaaaccctgctggttagagtgatgacacccgatctgagagagcggctggaaaacctgagaaagaagcctgaaaatatcccccagcccatcagcaatacatctagagccaacctgaataagctgctgaccgattacaccgaaatgaagaaggcgatcctgcatgtgtactgggaagagttccagaaggaccctgtgggcctgatgagccgggtggcccagcctgccagcaagaagatcgatcagaacaagctgaaacctgagatggacgagaagggcaacctgaccaccgccggctttgcctgctctcagtgtggccagcccctgttcgtgtacaagctggagcaggtgtctgagaagggcaaggcttacaccaactacttcggacggtgcaatgtggccgagcacgaaaagctgatcctgctggcccagctgaagcccgagaaggatagcgacgaagccgtgacatatagcctgggaaagtttgggcagagggccctggatttctacagcattcatgtgaccaaggagtccacccaccccgtgaagcccctggcccagatcgccggaaacagatacgcctccggacctgtgggaaaggccctgagcgacgcatgtatgggcacaatcgcctccttcctgtctaagtaccaggacatcatcatcgaacaccagaaggtggtgaagggcaaccagaagagactggagagcctgcgggagctggccggcaaggaaaacctggaataccctagcgtgaccctgccacctcagcctcacaccaaggagggcgttgatgcctacaacgaagtgatcgcccgggtgcgaatgtgggtgaacctgaacctgtggcagaagctgaagctaagcagagatgatgccaagcctctgctgagactgaagggattcccttcctttcctctggtcgagagacaggccaacgaagtggactggtgggacatggtgtgtaacgtgaagaagctgatcaacgagaaaaaggaggatggcaaggtgttttggcagaatctggctggctacaagagacaggaagccctgagaccatacctgagcagcgaggaagatcggaagaagggaaagaaattcgctcggtaccagctgggcgacctgctgctgcacctggaaaagaagcacggcgaggactggggaaaggtgtacgacgaggcctgggagcggattgacaagaaagtggaaggcctgagcaagcacatcaagctggaagaggaacggagaagcgaggacgcccagagcaaggccgccctgaccgactggctgcgggctaaggccagcttcgtgatcgagggcctgaaggaggccgacaaggacgagttctgcagatgcgagctgaagctgcagaagtggtacggggacctgcggggaaagcccttcgccatcgaagccgagaacagcatcctggacatcagcggcttcagcaagcagtacaactgtgccttcatctggcagaaggacggcgtgaagaagctgaacctgtacctgatcatcaactacttcaagggcggcaagctgcggttcaagaagatcaaacctgaagccttcgaagccaacagattctacaccgtgatcaacaaaaagagcggcgagatcgtgcccatggaggtgaacttcaacttcgacgaccccaacctgatcatcctgcctctggcctttggcaagagacagggcagagaattcatctggaacgacctgctgtccctggaaaccggcagcctgaagctggccaacggaagagtgatcgagaagacactgtacaacagaagaacccggcaggatgagcctgccctgttcgtggccctgaccttcgagcggcgggaggtcctggactcctccaatatcaaaccaatgaacctgatcggcgtggcaagaggcgaaaacatccccgccgtgatcgccctgaccgaccccgagggctgcccactgagccggtttaaggatagcctgggaaacccaacccacatcctgagaatcggcgagagctataaggagaagcagcggaccatccaggccaagaaggaggtggagcagcggagagccggcggctacagccggaagtacgccagcaaagccaagaatctggcagacgatatggtgagaaacaccgctagagatctgctgtactacgccgtgacccaggatgccatgctgatcttcgccaacctgagccggggcttcggccggcagggcaagcggaccttcatggccgagagacagtacacacggatggaggactggctgaccgccaagctggcctacgagggcctgagcaagacctacctgtccaagacactggcccagtacacctccaagacatgcagcaactgtgggtttaccatcaccagcgccgactacgacagggtgctggagaagctgaagaagacagcaacaggctggatgaccacaattaacggcaaggagctgaaggtggagggccagattacctactacaacagatacaagagacagaacgtagtcaaggacctgtccgtcgagctggatagactgagcgaagaatctgtgaacaacgacatctcctcctggacaaagggcagaagcggagaagctctgagcctcctgaagaaaagattctcccatagacccgtgcaggagaagttcgtgtgcctgaactgcggcttcgagacacacgcagccgagcaagccgccctgaacatcgccagatcctggctgttcctgcggagccaggagtacaagaaataccagacaaacaagacaaccggcaacaccgataagagagccttcgtcgagacctggcagtccttttaccggaagaagcttaaggaggtgtggaaacctgccgtgcggtctggcggatctggcggaggctccaagcccggcgccgtgagcttcgccgacgtggccgtgtacttcagccccgaggagtggggctgcctgaggcccgcccagagggccctgtacagggacgtgatgagggagacctacggccacctgggcgccctgggcttccccggccccaagcccgccctgatcagctggatggagcaggagaccgaggcctggagccccgccgcccaggaccccgagaagggcgagaggctgggcggcgccaggggcggcccaagcagcggcgcccctcctcccagcggcggcagcccagccggctccccaacctctaccgaggagggcacctctgagtccgccacccccgagagcggccctggcacctccaccgagcccagcgagggcagcgcacccggcagccctgccggcagccccacctccacagaggagggaaccagcaccgagcccagcgaaggcagcgccccaggcaccagcaccgagcctagtgagcaggagattaaacggatcaacaagatcagaagaagacttgtgaaagacagcaacaccaagaaggccggcaagacaggccccatgaaaaccctgctggttagagtgatgacacccgatctgagagagcggctggaaaacctgagaaagaagcctgaaaatatcccccagcccatcagcaatacatctagagccaacctgaataagctgctgaccgattacaccgaaatgaagaaggcgatcctgcatgtgtactgggaagagttccagaaggaccctgtgggcctgatgagccgggtggcccagcctgccagcaagaagatcgatcagaacaagctgaaacctgagatggacgagaagggcaacctgaccaccgccggctttgcctgctctcagtgtggccagcccctgttcgtgtacaagctggagcaggtgtctgagaagggcaaggcttacaccaactacttcggacggtgcaatgtggccgagcacgaaaagctgatcctgctggcccagctgaagcccgagaaggatagcgacgaagccgtgacatatagcctgggaaagtttgggcagagggccctggatttctacagcattcatgtgaccaaggagtccacccaccccgtgaagcccctggcccagatcgccggaaacagatacgcctccggacctgtgggaaaggccctgagcgacgcatgtatgggcacaatcgcctccttcctgtctaagtaccaggacatcatcatcgaacaccagaaggtggtgaagggcaaccagaagagactggagagcctgcgggagctggccggcaaggaaaacctggaataccctagcgtgaccctgccacctcagcctcacaccaaggagggcgttgatgcctacaacgaagtgatcgcccgggtgcgaatgtgggtgaacctgaacctgtggcagaagctgaagctaagcagagatgatgccaagcctctgctgagactgaagggattcccttcctttcctctggtcgagagacaggccaacgaagtggactggtgggacatggtgtgtaacgtgaagaagctgatcaacgagaaaaaggaggatggcaaggtgttttggcagaatctggctggctacaagagacaggaagccctgagaccatacctgagcagcgaggaagatcggaagaagggaaagaaattcgctcggtaccagctgggcgacctgctgctgcacctggaaaagaagcacggcgaggactggggaaaggtgtacgacgaggcctgggagcggattgacaagaaagtggaaggcctgagcaagcacatcaagctggaagaggaacggagaagcgaggacgcccagagcaaggccgccctgaccgactggctgcgggctaaggccagcttcgtgatcgagggcctgaaggaggccgacaaggacgagttctgcagatgcgagctgaagctgcagaagtggtacggggacctgcggggaaagcccttcgccatcgaagccgagaacagcatcctggacatcagcggcttcagcaagcagtacaactgtgccttcatctggcagaaggacggcgtgaagaagctgaacctgtacctgatcatcaactacttcaagggcggcaagctgcggttcaagaagatcaaacctgaagccttcgaagccaacagattctacaccgtgatcaacaaaaagagcggcgagatcgtgcccatggaggtgaacttcaacttcgacgaccccaacctgatcatcctgcctctggcctttggcaagagacagggcagagaattcatctggaacgacctgctgtccctggaaaccggcagcctgaagctggccaacggaagagtgatcgagaagacactgtacaacagaagaacccggcaggatgagcctgccctgttcgtggccctgaccttcgagcggcgggaggtcctggactcctccaatatcaaaccaatgaacctgatcggcgtggcaagaggcgaaaacatccccgccgtgatcgccctgaccgaccccgagggctgcccactgagccggtttaaggatagcctgggaaacccaacccacatcctgagaatcggcgagagctataaggagaagcagcggaccatccaggccaagaaggaggtggagcagcggagagccggcggctacagccggaagtacgccagcaaagccaagaatctggcagacgatatggtgagaaacaccgctagagatctgctgtactacgccgtgacccaggatgccatgctgatcttcgccaacctgagccggggcttcggccggcagggcaagcggaccttcatggccgagagacagtacacacggatggaggactggctgaccgccaagctggcctacgagggcctgagcaagacctacctgtccaagacactggcccagtacacctccaagacatgcagcaactgtgggtttaccatcaccagcgccgactacgacagggtgctggagaagctgaagaagacagcaacaggctggatgaccacaattaacggcaaggagctgaaggtggagggccagattacctactacaacagatacaagagacagaacgtagtcaaggacctgtccgtcgagctggatagactgagcgaagaatctgtgaacaacgacatctcctcctggacaaagggcagaagcggagaagctctgagcctcctgaagaaaagattctcccatagacccgtgcaggagaagttcgtgtgcctgaactgcggcttcgagacacacgcagccgagcaagccgccctgaacatcgccagatcctggctgttcctgcggagccaggagtacaagaaataccagacaaacaagacaaccggcaacaccgataagagagccttcgtcgagacctggcagtccttttaccggaagaagcttaaggaggtgtggaaacctgccgtgcggtctggcggatctggcggaggctcctaagcccggcgccgtgagcttcgccgacgtggccgtgtacttcagccccgaggagtggggctgcctgaggcccgcccagagggccctgtacagggacgtgatgagggagacctacggccacctgggcgccctgggcttccccggccccaagcccgccctgatcagctggatggagcaggagaccgaggcctggagccccgccgcccaggaccccgagaagggcgagaggctgggcggcgccaggggatctggctccggcagcggccccaagaaaaagagaaaagtctaagctgccttctgcggggcttgccttctggccatgcccttcttctctcccttgcacctgtacctcttggtctttgaataaagcctgagtaggaaggctagcaaaaaaaaaaaaaaaaaaaaaaaaaaaaaaaaaaaaaaaaaaaaaaaaaaaaaaaaaaaaaaaaaaaaaaaaaaaaaaaa

SEQ ID NO: 15314 - RNA, 9485 nt, synthetic construct
  source 1..9485: mol_type = other RNA
aggaaataagagagaaaagaagagtaagaagaaatataagagccaccatggcccctaagaagaagcgtaaagtgagccggatggaacgcctcgtctacgaggtgcggcagaagtgcagaaacatcgaggacatctgcatctcctgcggatctctgaacgtgaccctggagcacccactgttcatcggcggcatgtgccagaactgtaaaaactgttttctggagtgtgcctatcaatacgacgatgacggctaccagagctactgcaccatctgttgcggcggaagagaggtgctgatgtgtggaaataacaactgctgccggtgcttctgcgtggaatgcgtggacctgctggtgggccccggcgccgcccaggccgctattaaggaagatccttggaactgctacatgtgcggccacaagggcacatacggcctgctgagacggagagaggactggcctagcagactgcagatgttcttcgccaataaccacgaccaggagttcgacccccctaaggtgtaccctcccgtccccgccgagaagagaaagcccatccgggtcctgagcctgttcgatggcatcgccaccggtctgctggtgctgaaggacctgggcatccaggtggataggtacattgcctccgaggtgtgcgaggactccatcaccgtgggaatggtgcgtcatcagggcaagatcatgtacgtgggcgacgtgcggagcgtgacacagaagcatatccaggagtggggccctttcgacctggtgatcggcggcagcccttgcaatgacctgagcatcgtgaacccagcccggaagggcctgtacgagggaaccggcagactgttcttcgagttttacagactgctgcacgacgcccggcctaaggaaggcgacgaccggcccttcttttggctgttcgagaatgtggtggccatgggagtcagcgacaagcgggatattagccggttcctggagagcaaccccgtgatgatcgatgccaaggaagtgagcgccgcccaccgggccagatacttctggggcaatctgcctggcatgaacagacccctggccagcaccgtgaacgacaagctggagctgcaggagtgcctggagcacggccggatcgccaagttcagcaaggtgagaaccatcaccacccgaagcaacagcatcaaacaaggcaaggaccagcactttcctgtgttcatgaacgagaaggaggacatcctgtggtgtaccgagatggagagagtgttcgggttcccagtccactacacagatgtcagcaacatgtctagactggccagacagagactgctgggaagaagctggtccgtccctgtgatcagacacctgttcgcccctctgaaggagtacttcgcctgcgtgagcagcggcaacagcaacgccaacagccggggccccagcttctctagcggcctggtgccactgtccctgagagggagccacatgggccccatggagatctacaaaaccgtgagcgcctggaagcggcagcctgtgcgcgtgctgagcctgtttcggaatatcgataaagtcctgaaaagcctgggattcctggagagcggctctggctccggcggtggcaccctgaagtacgtggaggatgtgacaaacgtggtcagacgggatgtggagaagtggggccccttcgatctggtgtacggcagcacccaacccctgggcagctcttgtgaccggtgccctggctggtacatgtttcagttccaccggatcctgcagtacgccctgccgagacaggagtcccagcggccattcttttggattttcatggacaacttgctgctgaccgaggatgaccaggaaactaccactcggttcctgcagaccgaagccgtgaccctgcaggacgtgagaggccgggactaccagaacgccatgcgggtgtggtccaacatccctggactgaaaagcaagcacgcacctctgacccctaaagaagaggagtacctgcaggcccaggtgcggagcagaagcaagctggacgcccctaaggtggatctgctggtgaagaattgcctcctgcccctgagagagtacttcaagtatttcagccagaatagtctgcccctgggaggcagcggcggcggcgccctggtgacatttgaggacgtcgccgtgcggttcacccaggaggaatgggctctgctggatccttctcagaaaatcctgtaccgggacgtgatgagagagacataccggaatctgacctccgtgggcatcaactgggaatgttgggaccttgaagcctgcttcagaagcctgggaagaaacctgagagtgcaggtggtgaagagaaagtgcgagctgaccaacagcggcccctgcgccgagggcggcccaagcagcggcgcccctcctcccagcggcggcagcccagccggctccccaacctctaccgaggagggcacctctgagtccgccacccccgagagcggccctggcacctccaccgagcccagcgagggcagcgcacccggcagccctgccggcagccccacctccacagaggagggaaccagcaccgagcccagcgaaggcagcgccccaggcaccagcaccgagcctagtgagcaggagattaaacggatcaacaagatcagaagaagacttgtgaaagacagcaacaccaagaaggccggcaagacaggccccatgaaaaccctgctggttagagtgatgacacccgatctgagagagcggctggaaaacctgagaaagaagcctgaaaatatcccccagcccatcagcaatacatctagagccaacctgaataagctgctgaccgattacaccgaaatgaagaaggcgatcctgcatgtgtactgggaagagttccagaaggaccctgtgggcctgatgagccgggtggcccagcctgccagcaagaagatcgatcagaacaagctgaaacctgagatggacgagaagggcaacctgaccaccgccggctttgcctgctctcagtgtggccagcccctgttcgtgtacaagctggagcaggtgtctgagaagggcaaggcttacaccaactacttcggacggtgcaatgtggccgagcacgaaaagctgatcctgctggcccagctgaagcccgagaaggatagcgacgaagccgtgacatatagcctgggaaagtttgggcagagggccctggatttctacagcattcatgtgaccaaggagtccacccaccccgtgaagcccctggcccagatcgccggaaacagatacgcctccggacctgtgggaaaggccctgagcgacgcatgtatgggcacaatcgcctccttcctgtctaagtaccaggacatcatcatcgaacaccagaaggtggtgaagggcaaccagaagagactggagagcctgcgggagctggccggcaaggaaaacctggaataccctagcgtgaccctgccacctcagcctcacaccaaggagggcgttgatgcctacaacgaagtgatcgcccgggtgcgaatgtgggtgaacctgaacctgtggcagaagctgaagctaagcagagatgatgccaagcctctgctgagactgaagggattcccttcctttcctctggtcgagagacaggccaacgaagtggactggtgggacatggtgtgtaacgtgaagaagctgatcaacgagaaaaaggaggatggcaaggtgttttggcagaatctggctggctacaagagacaggaagccctgagaccatacctgagcagcgaggaagatcggaagaagggaaagaaattcgctcggtaccagctgggcgacctgctgctgcacctggaaaagaagcacggcgaggactggggaaaggtgtacgacgaggcctgggagcggattgacaagaaagtggaaggcctgagcaagcacatcaagctggaagaggaacggagaagcgaggacgcccagagcaaggccgccctgaccgactggctgcgggctaaggccagcttcgtgatcgagggcctgaaggaggccgacaaggacgagttctgcagatgcgagctgaagctgcagaagtggtacggggacctgcggggaaagcccttcgccatcgaagccgagaacagcatcctggacatcagcggcttcagcaagcagtacaactgtgccttcatctggcagaaggacggcgtgaagaagctgaacctgtacctgatcatcaactacttcaagggcggcaagctgcggttcaagaagatcaaacctgaagccttcgaagccaacagattctacaccgtgatcaacaaaaagagcggcgagatcgtgcccatggaggtgaacttcaacttcgacgaccccaacctgatcatcctgcctctggcctttggcaagagacagggcagagaattcatctggaacgacctgctgtccctggaaaccggcagcctgaagctggccaacggaagagtgatcgagaagacactgtacaacagaagaacccggcaggatgagcctgccctgttcgtggccctgaccttcgagcggcgggaggtcctggactcctccaatatcaaaccaatgaacctgatcggcgtggcaagaggcgaaaacatccccgccgtgatcgccctgaccgaccccgagggctgcccactgagccggtttaaggatagcctgggaaacccaacccacatcctgagaatcggcgagagctataaggagaagcagcggaccatccaggccaagaaggaggtggagcagcggagagccggcggctacagccggaagtacgccagcaaagccaagaatctggcagacgatatggtgagaaacaccgctagagatctgctgtactacgccgtgacccaggatgccatgctgatcttcgccaacctgagccggggcttcggccggcagggcaagcggaccttcatggccgagagacagtacacacggatggaggactggctgaccgccaagctggcctacgagggcctgagcaagacctacctgtccaagacactggcccagtacacctccaagacatgcagcaactgtgggtttaccatcaccagcgccgactacgacagggtgctggagaagctgaagaagacagcaacaggctggatgaccacaattaacggcaaggagctgaaggtggagggccagattacctactacaacagatacaagagacagaacgtagtcaaggacctgtccgtcgagctggatagactgagcgaagaatctgtgaacaacgacatctcctcctggacaaagggcagaagcggagaagctctgagcctcctgaagaaaagattctcccatagacccgtgcaggagaagttcgtgtgcctgaactgcggcttcgagacacacgcagccgagcaagccgccctgaacatcgccagatcctggctgttcctgcggagccaggagtacaagaaataccagacaaacaagacaaccggcaacaccgataagagagccttcgtcgagacctggcagtccttttaccggaagaagcttaaggaggtgtggaaacctgccgtgcggtctggcggatctggcggaggctccatggccttcgaggacgtggccgtgtacttcagccaggaggagtggggcctgctggacaccgcccagagggccctgtacaggagggtgatgctggacaacttcgccctggtggccagcctgggcctgagcaccagcaggcccagggtggtgatccagctggagaggggcgaggagccctgggtgcccagcggcaaggacatgaccctggccaggaacacctacggcaggctgaacagcggcagcggcggcccaagcagcggcgcccctcctcccagcggcggcagcccagccggctccccaacctctaccgaggagggcacctctgagtccgccacccccgagagcggccctggcacctccaccgagcccagcgagggcagcgcacccggcagccctgccggcagccccacctccacagaggagggaaccagcaccgagcccagcgaaggcagcgccccaggcaccagcaccgagcctagtgagcaggagattaaacggatcaacaagatcagaagaagacttgtgaaagacagcaacaccaagaaggccggcaagacaggccccatgaaaaccctgctggttagagtgatgacacccgatctgagagagcggctggaaaacctgagaaagaagcctgaaaatatcccccagcccatcagcaatacatctagagccaacctgaataagctgctgaccgattacaccgaaatgaagaaggcgatcctgcatgtgtactgggaagagttccagaaggaccctgtgggcctgatgagccgggtggcccagcctgccagcaagaagatcgatcagaacaagctgaaacctgagatggacgagaagggcaacctgaccaccgccggctttgcctgctctcagtgtggccagcccctgttcgtgtacaagctggagcaggtgtctgagaagggcaaggcttacaccaactacttcggacggtgcaatgtggccgagcacgaaaagctgatcctgctggcccagctgaagcccgagaaggatagcgacgaagccgtgacatatagcctgggaaagtttgggcagagggccctggatttctacagcattcatgtgaccaaggagtccacccaccccgtgaagcccctggcccagatcgccggaaacagatacgcctccggacctgtgggaaaggccctgagcgacgcatgtatgggcacaatcgcctccttcctgtctaagtaccaggacatcatcatcgaacaccagaaggtggtgaagggcaaccagaagagactggagagcctgcgggagctggccggcaaggaaaacctggaataccctagcgtgaccctgccacctcagcctcacaccaaggagggcgttgatgcctacaacgaagtgatcgcccgggtgcgaatgtgggtgaacctgaacctgtggcagaagctgaagctaagcagagatgatgccaagcctctgctgagactgaagggattcccttcctttcctctggtcgagagacaggccaacgaagtggactggtgggacatggtgtgtaacgtgaagaagctgatcaacgagaaaaaggaggatggcaaggtgttttggcagaatctggctggctacaagagacaggaagccctgagaccatacctgagcagcgaggaagatcggaagaagggaaagaaattcgctcggtaccagctgggcgacctgctgctgcacctggaaaagaagcacggcgaggactggggaaaggtgtacgacgaggcctgggagcggattgacaagaaagtggaaggcctgagcaagcacatcaagctggaagaggaacggagaagcgaggacgcccagagcaaggccgccctgaccgactggctgcgggctaaggccagcttcgtgatcgagggcctgaaggaggccgacaaggacgagttctgcagatgcgagctgaagctgcagaagtggtacggggacctgcggggaaagcccttcgccatcgaagccgagaacagcatcctggacatcagcggcttcagcaagcagtacaactgtgccttcatctggcagaaggacggcgtgaagaagctgaacctgtacctgatcatcaactacttcaagggcggcaagctgcggttcaagaagatcaaacctgaagccttcgaagccaacagattctacaccgtgatcaacaaaaagagcggcgagatcgtgcccatggaggtgaacttcaacttcgacgaccccaacctgatcatcctgcctctggcctttggcaagagacagggcagagaattcatctggaacgacctgctgtccctggaaaccggcagcctgaagctggccaacggaagagtgatcgagaagacactgtacaacagaagaacccggcaggatgagcctgccctgttcgtggccctgaccttcgagcggcgggaggtcctggactcctccaatatcaaaccaatgaacctgatcggcgtggcaagaggcgaaaacatccccgccgtgatcgccctgaccgaccccgagggctgcccactgagccggtttaaggatagcctgggaaacccaacccacatcctgagaatcggcgagagctataaggagaagcagcggaccatccaggccaagaaggaggtggagcagcggagagccggcggctacagccggaagtacgccagcaaagccaagaatctggcagacgatatggtgagaaacaccgctagagatctgctgtactacgccgtgacccaggatgccatgctgatcttcgccaacctgagccggggcttcggccggcagggcaagcggaccttcatggccgagagacagtacacacggatggaggactggctgaccgccaagctggcctacgagggcctgagcaagacctacctgtccaagacactggcccagtacacctccaagacatgcagcaactgtgggtttaccatcaccagcgccgactacgacagggtgctggagaagctgaagaagacagcaacaggctggatgaccacaattaacggcaaggagctgaaggtggagggccagattacctactacaacagatacaagagacagaacgtagtcaaggacctgtccgtcgagctggatagactgagcgaagaatctgtgaacaacgacatctcctcctggacaaagggcagaagcggagaagctctgagcctcctgaagaaaagattctcccatagacccgtgcaggagaagttcgtgtgcctgaactgcggcttcgagacacacgcagccgagcaagccgccctgaacatcgccagatcctggctgttcctgcggagccaggagtacaagaaataccagacaaacaagacaaccggcaacaccgataagagagccttcgtcgagacctggcagtccttttaccggaagaagcttaaggaggtgtggaaacctgccgtgcggtctggcggatctggcggaggctcctatggccttcgaggacgtggccgtgtacttcagccaggaggagtggggcctgctggacaccgcccagagggccctgtacaggagggtgatgctggacaacttcgccctggtggccagcctgggcctgagcaccagcaggcccagggtggtgatccagctggagaggggcgaggagccctgggtgcccagcggcaaggacatgaccctggccaggaacacctacggcaggctgaacagcggcagcggatctggctccggcagcggccccaagaaaaagagaaaagtctaagctgccttctgcggggcttgccttctggccatgcccttcttctctcccttgcacctgtacctcttggtctttgaataaagcctgagtaggaaggctagcaaaaaaaaaaaaaaaaaaaaaaaaaaaaaaaaaaaaaaaaaaaaaaaaaaaaaaaaaaaaaaaaaaaaaaaaaaaaaaaa

SEQ ID NO: 15315 - RNA, 9485 nt, synthetic construct
  source 1..9485: mol_type = other RNA
aggaaataagagagaaaagaagagtaagaagaaatataagagccaccatggcccctaagaagaagcgtaaagtgagccggatggaacgcctcgtctacgaggtgcggcagaagtgcagaaacatcgaggacatctgcatctcctgcggatctctgaacgtgaccctggagcacccactgttcatcggcggcatgtgccagaactgtaaaaactgttttctggagtgtgcctatcaatacgacgatgacggctaccagagctactgcaccatctgttgcggcggaagagaggtgctgatgtgtggaaataacaactgctgccggtgcttctgcgtggaatgcgtggacctgctggtgggccccggcgccgcccaggccgctattaaggaagatccttggaactgctacatgtgcggccacaagggcacatacggcctgctgagacggagagaggactggcctagcagactgcagatgttcttcgccaataaccacgaccaggagttcgacccccctaaggtgtaccctcccgtccccgccgagaagagaaagcccatccgggtcctgagcctgttcgatggcatcgccaccggtctgctggtgctgaaggacctgggcatccaggtggataggtacattgcctccgaggtgtgcgaggactccatcaccgtgggaatggtgcgtcatcagggcaagatcatgtacgtgggcgacgtgcggagcgtgacacagaagcatatccaggagtggggccctttcgacctggtgatcggcggcagcccttgcaatgacctgagcatcgtgaacccagcccggaagggcctgtacgagggaaccggcagactgttcttcgagttttacagactgctgcacgacgcccggcctaaggaaggcgacgaccggcccttcttttggctgttcgagaatgtggtggccatgggagtcagcgacaagcgggatattagccggttcctggagagcaaccccgtgatgatcgatgccaaggaagtgagcgccgcccaccgggccagatacttctggggcaatctgcctggcatgaacagacccctggccagcaccgtgaacgacaagctggagctgcaggagtgcctggagcacggccggatcgccaagttcagcaaggtgagaaccatcaccacccgaagcaacagcatcaaacaaggcaaggaccagcactttcctgtgttcatgaacgagaaggaggacatcctgtggtgtaccgagatggagagagtgttcgggttcccagtccactacacagatgtcagcaacatgtctagactggccagacagagactgctgggaagaagctggtccgtccctgtgatcagacacctgttcgcccctctgaaggagtacttcgcctgcgtgagcagcggcaacagcaacgccaacagccggggccccagcttctctagcggcctggtgccactgtccctgagagggagccacatgggccccatggagatctacaaaaccgtgagcgcctggaagcggcagcctgtgcgcgtgctgagcctgtttcggaatatcgataaagtcctgaaaagcctgggattcctggagagcggctctggctccggcggtggcaccctgaagtacgtggaggatgtgacaaacgtggtcagacgggatgtggagaagtggggccccttcgatctggtgtacggcagcacccaacccctgggcagctcttgtgaccggtgccctggctggtacatgtttcagttccaccggatcctgcagtacgccctgccgagacaggagtcccagcggccattcttttggattttcatggacaacttgctgctgaccgaggatgaccaggaaactaccactcggttcctgcagaccgaagccgtgaccctgcaggacgtgagaggccgggactaccagaacgccatgcgggtgtggtccaacatccctggactgaaaagcaagcacgcacctctgacccctaaagaagaggagtacctgcaggcccaggtgcggagcagaagcaagctggacgcccctaaggtggatctgctggtgaagaattgcctcctgcccctgagagagtacttcaagtatttcagccagaatagtctgcccctgggaggcagcggcggcggcgccctggtgacatttgaggacgtcgccgtgcggttcacccaggaggaatgggctctgctggatccttctcagaaaatcctgtaccgggacgtgatgagagagacataccggaatctgacctccgtgggcatcaactgggaatgttgggaccttgaagcctgcttcagaagcctgggaagaaacctgagagtgcaggtggtgaagagaaagtgcgagctgaccaacagcggcccctgcgccgagggcggcccaagcagcggcgcccctcctcccagcggcggcagcccagccggctccccaacctctaccgaggagggcacctctgagtccgccacccccgagagcggccctggcacctccaccgagcccagcgagggcagcgcacccggcagccctgccggcagccccacctccacagaggagggaaccagcaccgagcccagcgaaggcagcgccccaggcaccagcaccgagcctagtgagcaggagattaaacggatcaacaagatcagaagaagacttgtgaaagacagcaacaccaagaaggccggcaagacaggccccatgaaaaccctgctggttagagtgatgacacccgatctgagagagcggctggaaaacctgagaaagaagcctgaaaatatcccccagcccatcagcaatacatctagagccaacctgaataagctgctgaccgattacaccgaaatgaagaaggcgatcctgcatgtgtactgggaagagttccagaaggaccctgtgggcctgatgagccgggtggcccagcctgccagcaagaagatcgatcagaacaagctgaaacctgagatggacgagaagggcaacctgaccaccgccggctttgcctgctctcagtgtggccagcccctgttcgtgtacaagctggagcaggtgtctgagaagggcaaggcttacaccaactacttcggacggtgcaatgtggccgagcacgaaaagctgatcctgctggcccagctgaagcccgagaaggatagcgacgaagccgtgacatatagcctgggaaagtttgggcagagggccctggatttctacagcattcatgtgaccaaggagtccacccaccccgtgaagcccctggcccagatcgccggaaacagatacgcctccggacctgtgggaaaggccctgagcgacgcatgtatgggcacaatcgcctccttcctgtctaagtaccaggacatcatcatcgaacaccagaaggtggtgaagggcaaccagaagagactggagagcctgcgggagctggccggcaaggaaaacctggaataccctagcgtgaccctgccacctcagcctcacaccaaggagggcgttgatgcctacaacgaagtgatcgcccgggtgcgaatgtgggtgaacctgaacctgtggcagaagctgaagctaagcagagatgatgccaagcctctgctgagactgaagggattcccttcctttcctctggtcgagagacaggccaacgaagtggactggtgggacatggtgtgtaacgtgaagaagctgatcaacgagaaaaaggaggatggcaaggtgttttggcagaatctggctggctacaagagacaggaagccctgagaccatacctgagcagcgaggaagatcggaagaagggaaagaaattcgctcggtaccagctgggcgacctgctgctgcacctggaaaagaagcacggcgaggactggggaaaggtgtacgacgaggcctgggagcggattgacaagaaagtggaaggcctgagcaagcacatcaagctggaagaggaacggagaagcgaggacgcccagagcaaggccgccctgaccgactggctgcgggctaaggccagcttcgtgatcgagggcctgaaggaggccgacaaggacgagttctgcagatgcgagctgaagctgcagaagtggtacggggacctgcggggaaagcccttcgccatcgaagccgagaacagcatcctggacatcagcggcttcagcaagcagtacaactgtgccttcatctggcagaaggacggcgtgaagaagctgaacctgtacctgatcatcaactacttcaagggcggcaagctgcggttcaagaagatcaaacctgaagccttcgaagccaacagattctacaccgtgatcaacaaaaagagcggcgagatcgtgcccatggaggtgaacttcaacttcgacgaccccaacctgatcatcctgcctctggcctttggcaagagacagggcagagaattcatctggaacgacctgctgtccctggaaaccggcagcctgaagctggccaacggaagagtgatcgagaagacactgtacaacagaagaacccggcaggatgagcctgccctgttcgtggccctgaccttcgagcggcgggaggtcctggactcctccaatatcaaaccaatgaacctgatcggcgtggcaagaggcgaaaacatccccgccgtgatcgccctgaccgaccccgagggctgcccactgagccggtttaaggatagcctgggaaacccaacccacatcctgagaatcggcgagagctataaggagaagcagcggaccatccaggccaagaaggaggtggagcagcggagagccggcggctacagccggaagtacgccagcaaagccaagaatctggcagacgatatggtgagaaacaccgctagagatctgctgtactacgccgtgacccaggatgccatgctgatcttcgccaacctgagccggggcttcggccggcagggcaagcggaccttcatggccgagagacagtacacacggatggaggactggctgaccgccaagctggcctacgagggcctgagcaagacctacctgtccaagacactggcccagtacacctccaagacatgcagcaactgtgggtttaccatcaccagcgccgactacgacagggtgctggagaagctgaagaagacagcaacaggctggatgaccacaattaacggcaaggagctgaaggtggagggccagattacctactacaacagatacaagagacagaacgtagtcaaggacctgtccgtcgagctggatagactgagcgaagaatctgtgaacaacgacatctcctcctggacaaagggcagaagcggagaagctctgagcctcctgaagaaaagattctcccatagacccgtgcaggagaagttcgtgtgcctgaactgcggcttcgagacacacgcagccgagcaagccgccctgaacatcgccagatcctggctgttcctgcggagccaggagtacaagaaataccagacaaacaagacaaccggcaacaccgataagagagccttcgtcgagacctggcagtccttttaccggaagaagcttaaggaggtgtggaaacctgccgtgcggtctggcggatctggcggaggctccagccagagccccctgaccttcggcgacgtggccgtggagttcagcggcgaggagtgggcctggctggacagcgcccagaggagcctgcacaggagcgtgatgctggagaactacaggaacctggccagcctgggcctgtgcctgagcaagcccgagatgatcagcagcctggagcagaggaaggagccctgggccgtgaagaggaagctgaccggcggcgagtgccccgacagccagaccctgggcggcccaagcagcggcgcccctcctcccagcggcggcagcccagccggctccccaacctctaccgaggagggcacctctgagtccgccacccccgagagcggccctggcacctccaccgagcccagcgagggcagcgcacccggcagccctgccggcagccccacctccacagaggagggaaccagcaccgagcccagcgaaggcagcgccccaggcaccagcaccgagcctagtgagcaggagattaaacggatcaacaagatcagaagaagacttgtgaaagacagcaacaccaagaaggccggcaagacaggccccatgaaaaccctgctggttagagtgatgacacccgatctgagagagcggctggaaaacctgagaaagaagcctgaaaatatcccccagcccatcagcaatacatctagagccaacctgaataagctgctgaccgattacaccgaaatgaagaaggcgatcctgcatgtgtactgggaagagttccagaaggaccctgtgggcctgatgagccgggtggcccagcctgccagcaagaagatcgatcagaacaagctgaaacctgagatggacgagaagggcaacctgaccaccgccggctttgcctgctctcagtgtggccagcccctgttcgtgtacaagctggagcaggtgtctgagaagggcaaggcttacaccaactacttcggacggtgcaatgtggccgagcacgaaaagctgatcctgctggcccagctgaagcccgagaaggatagcgacgaagccgtgacatatagcctgggaaagtttgggcagagggccctggatttctacagcattcatgtgaccaaggagtccacccaccccgtgaagcccctggcccagatcgccggaaacagatacgcctccggacctgtgggaaaggccctgagcgacgcatgtatgggcacaatcgcctccttcctgtctaagtaccaggacatcatcatcgaacaccagaaggtggtgaagggcaaccagaagagactggagagcctgcgggagctggccggcaaggaaaacctggaataccctagcgtgaccctgccacctcagcctcacaccaaggagggcgttgatgcctacaacgaagtgatcgcccgggtgcgaatgtgggtgaacctgaacctgtggcagaagctgaagctaagcagagatgatgccaagcctctgctgagactgaagggattcccttcctttcctctggtcgagagacaggccaacgaagtggactggtgggacatggtgtgtaacgtgaagaagctgatcaacgagaaaaaggaggatggcaaggtgttttggcagaatctggctggctacaagagacaggaagccctgagaccatacctgagcagcgaggaagatcggaagaagggaaagaaattcgctcggtaccagctgggcgacctgctgctgcacctggaaaagaagcacggcgaggactggggaaaggtgtacgacgaggcctgggagcggattgacaagaaagtggaaggcctgagcaagcacatcaagctggaagaggaacggagaagcgaggacgcccagagcaaggccgccctgaccgactggctgcgggctaaggccagcttcgtgatcgagggcctgaaggaggccgacaaggacgagttctgcagatgcgagctgaagctgcagaagtggtacggggacctgcggggaaagcccttcgccatcgaagccgagaacagcatcctggacatcagcggcttcagcaagcagtacaactgtgccttcatctggcagaaggacggcgtgaagaagctgaacctgtacctgatcatcaactacttcaagggcggcaagctgcggttcaagaagatcaaacctgaagccttcgaagccaacagattctacaccgtgatcaacaaaaagagcggcgagatcgtgcccatggaggtgaacttcaacttcgacgaccccaacctgatcatcctgcctctggcctttggcaagagacagggcagagaattcatctggaacgacctgctgtccctggaaaccggcagcctgaagctggccaacggaagagtgatcgagaagacactgtacaacagaagaacccggcaggatgagcctgccctgttcgtggccctgaccttcgagcggcgggaggtcctggactcctccaatatcaaaccaatgaacctgatcggcgtggcaagaggcgaaaacatccccgccgtgatcgccctgaccgaccccgagggctgcccactgagccggtttaaggatagcctgggaaacccaacccacatcctgagaatcggcgagagctataaggagaagcagcggaccatccaggccaagaaggaggtggagcagcggagagccggcggctacagccggaagtacgccagcaaagccaagaatctggcagacgatatggtgagaaacaccgctagagatctgctgtactacgccgtgacccaggatgccatgctgatcttcgccaacctgagccggggcttcggccggcagggcaagcggaccttcatggccgagagacagtacacacggatggaggactggctgaccgccaagctggcctacgagggcctgagcaagacctacctgtccaagacactggcccagtacacctccaagacatgcagcaactgtgggtttaccatcaccagcgccgactacgacagggtgctggagaagctgaagaagacagcaacaggctggatgaccacaattaacggcaaggagctgaaggtggagggccagattacctactacaacagatacaagagacagaacgtagtcaaggacctgtccgtcgagctggatagactgagcgaagaatctgtgaacaacgacatctcctcctggacaaagggcagaagcggagaagctctgagcctcctgaagaaaagattctcccatagacccgtgcaggagaagttcgtgtgcctgaactgcggcttcgagacacacgcagccgagcaagccgccctgaacatcgccagatcctggctgttcctgcggagccaggagtacaagaaataccagacaaacaagacaaccggcaacaccgataagagagccttcgtcgagacctggcagtccttttaccggaagaagcttaaggaggtgtggaaacctgccgtgcggtctggcggatctggcggaggctcctagccagagccccctgaccttcggcgacgtggccgtggagttcagcggcgaggagtgggcctggctggacagcgcccagaggagcctgcacaggagcgtgatgctggagaactacaggaacctggccagcctgggcctgtgcctgagcaagcccgagatgatcagcagcctggagcagaggaaggagccctgggccgtgaagaggaagctgaccggcggcgagtgccccgacagccagaccctgggatctggctccggcagcggccccaagaaaaagagaaaagtctaagctgccttctgcggggcttgccttctggccatgcccttcttctctcccttgcacctgtacctcttggtctttgaataaagcctgagtaggaaggctagcaaaaaaaaaaaaaaaaaaaaaaaaaaaaaaaaaaaaaaaaaaaaaaaaaaaaaaaaaaaaaaaaaaaaaaaaaaaaaaaa

SEQ ID NO: 15316 - RNA, 9485 nt, synthetic construct
  source 1..9485: mol_type = other RNA
aggaaataagagagaaaagaagagtaagaagaaatataagagccaccatggcccctaagaagaagcgtaaagtgagccggatggaacgcctcgtctacgaggtgcggcagaagtgcagaaacatcgaggacatctgcatctcctgcggatctctgaacgtgaccctggagcacccactgttcatcggcggcatgtgccagaactgtaaaaactgttttctggagtgtgcctatcaatacgacgatgacggctaccagagctactgcaccatctgttgcggcggaagagaggtgctgatgtgtggaaataacaactgctgccggtgcttctgcgtggaatgcgtggacctgctggtgggccccggcgccgcccaggccgctattaaggaagatccttggaactgctacatgtgcggccacaagggcacatacggcctgctgagacggagagaggactggcctagcagactgcagatgttcttcgccaataaccacgaccaggagttcgacccccctaaggtgtaccctcccgtccccgccgagaagagaaagcccatccgggtcctgagcctgttcgatggcatcgccaccggtctgctggtgctgaaggacctgggcatccaggtggataggtacattgcctccgaggtgtgcgaggactccatcaccgtgggaatggtgcgtcatcagggcaagatcatgtacgtgggcgacgtgcggagcgtgacacagaagcatatccaggagtggggccctttcgacctggtgatcggcggcagcccttgcaatgacctgagcatcgtgaacccagcccggaagggcctgtacgagggaaccggcagactgttcttcgagttttacagactgctgcacgacgcccggcctaaggaaggcgacgaccggcccttcttttggctgttcgagaatgtggtggccatgggagtcagcgacaagcgggatattagccggttcctggagagcaaccccgtgatgatcgatgccaaggaagtgagcgccgcccaccgggccagatacttctggggcaatctgcctggcatgaacagacccctggccagcaccgtgaacgacaagctggagctgcaggagtgcctggagcacggccggatcgccaagttcagcaaggtgagaaccatcaccacccgaagcaacagcatcaaacaaggcaaggaccagcactttcctgtgttcatgaacgagaaggaggacatcctgtggtgtaccgagatggagagagtgttcgggttcccagtccactacacagatgtcagcaacatgtctagactggccagacagagactgctgggaagaagctggtccgtccctgtgatcagacacctgttcgcccctctgaaggagtacttcgcctgcgtgagcagcggcaacagcaacgccaacagccggggccccagcttctctagcggcctggtgccactgtccctgagagggagccacatgggccccatggagatctacaaaaccgtgagcgcctggaagcggcagcctgtgcgcgtgctgagcctgtttcggaatatcgataaagtcctgaaaagcctgggattcctggagagcggctctggctccggcggtggcaccctgaagtacgtggaggatgtgacaaacgtggtcagacgggatgtggagaagtggggccccttcgatctggtgtacggcagcacccaacccctgggcagctcttgtgaccggtgccctggctggtacatgtttcagttccaccggatcctgcagtacgccctgccgagacaggagtcccagcggccattcttttggattttcatggacaacttgctgctgaccgaggatgaccaggaaactaccactcggttcctgcagaccgaagccgtgaccctgcaggacgtgagaggccgggactaccagaacgccatgcgggtgtggtccaacatccctggactgaaaagcaagcacgcacctctgacccctaaagaagaggagtacctgcaggcccaggtgcggagcagaagcaagctggacgcccctaaggtggatctgctggtgaagaattgcctcctgcccctgagagagtacttcaagtatttcagccagaatagtctgcccctgggaggcagcggcggcggcgccctggtgacatttgaggacgtcgccgtgcggttcacccaggaggaatgggctctgctggatccttctcagaaaatcctgtaccgggacgtgatgagagagacataccggaatctgacctccgtgggcatcaactgggaatgttgggaccttgaagcctgcttcagaagcctgggaagaaacctgagagtgcaggtggtgaagagaaagtgcgagctgaccaacagcggcccctgcgccgagggcggcccaagcagcggcgcccctcctcccagcggcggcagcccagccggctccccaacctctaccgaggagggcacctctgagtccgccacccccgagagcggccctggcacctccaccgagcccagcgagggcagcgcacccggcagccctgccggcagccccacctccacagaggagggaaccagcaccgagcccagcgaaggcagcgccccaggcaccagcaccgagcctagtgagcaggagattaaacggatcaacaagatcagaagaagacttgtgaaagacagcaacaccaagaaggccggcaagacaggccccatgaaaaccctgctggttagagtgatgacacccgatctgagagagcggctggaaaacctgagaaagaagcctgaaaatatcccccagcccatcagcaatacatctagagccaacctgaataagctgctgaccgattacaccgaaatgaagaaggcgatcctgcatgtgtactgggaagagttccagaaggaccctgtgggcctgatgagccgggtggcccagcctgccagcaagaagatcgatcagaacaagctgaaacctgagatggacgagaagggcaacctgaccaccgccggctttgcctgctctcagtgtggccagcccctgttcgtgtacaagctggagcaggtgtctgagaagggcaaggcttacaccaactacttcggacggtgcaatgtggccgagcacgaaaagctgatcctgctggcccagctgaagcccgagaaggatagcgacgaagccgtgacatatagcctgggaaagtttgggcagagggccctggatttctacagcattcatgtgaccaaggagtccacccaccccgtgaagcccctggcccagatcgccggaaacagatacgcctccggacctgtgggaaaggccctgagcgacgcatgtatgggcacaatcgcctccttcctgtctaagtaccaggacatcatcatcgaacaccagaaggtggtgaagggcaaccagaagagactggagagcctgcgggagctggccggcaaggaaaacctggaataccctagcgtgaccctgccacctcagcctcacaccaaggagggcgttgatgcctacaacgaagtgatcgcccgggtgcgaatgtgggtgaacctgaacctgtggcagaagctgaagctaagcagagatgatgccaagcctctgctgagactgaagggattcccttcctttcctctggtcgagagacaggccaacgaagtggactggtgggacatggtgtgtaacgtgaagaagctgatcaacgagaaaaaggaggatggcaaggtgttttggcagaatctggctggctacaagagacaggaagccctgagaccatacctgagcagcgaggaagatcggaagaagggaaagaaattcgctcggtaccagctgggcgacctgctgctgcacctggaaaagaagcacggcgaggactggggaaaggtgtacgacgaggcctgggagcggattgacaagaaagtggaaggcctgagcaagcacatcaagctggaagaggaacggagaagcgaggacgcccagagcaaggccgccctgaccgactggctgcgggctaaggccagcttcgtgatcgagggcctgaaggaggccgacaaggacgagttctgcagatgcgagctgaagctgcagaagtggtacggggacctgcggggaaagcccttcgccatcgaagccgagaacagcatcctggacatcagcggcttcagcaagcagtacaactgtgccttcatctggcagaaggacggcgtgaagaagctgaacctgtacctgatcatcaactacttcaagggcggcaagctgcggttcaagaagatcaaacctgaagccttcgaagccaacagattctacaccgtgatcaacaaaaagagcggcgagatcgtgcccatggaggtgaacttcaacttcgacgaccccaacctgatcatcctgcctctggcctttggcaagagacagggcagagaattcatctggaacgacctgctgtccctggaaaccggcagcctgaagctggccaacggaagagtgatcgagaagacactgtacaacagaagaacccggcaggatgagcctgccctgttcgtggccctgaccttcgagcggcgggaggtcctggactcctccaatatcaaaccaatgaacctgatcggcgtggcaagaggcgaaaacatccccgccgtgatcgccctgaccgaccccgagggctgcccactgagccggtttaaggatagcctgggaaacccaacccacatcctgagaatcggcgagagctataaggagaagcagcggaccatccaggccaagaaggaggtggagcagcggagagccggcggctacagccggaagtacgccagcaaagccaagaatctggcagacgatatggtgagaaacaccgctagagatctgctgtactacgccgtgacccaggatgccatgctgatcttcgccaacctgagccggggcttcggccggcagggcaagcggaccttcatggccgagagacagtacacacggatggaggactggctgaccgccaagctggcctacgagggcctgagcaagacctacctgtccaagacactggcccagtacacctccaagacatgcagcaactgtgggtttaccatcaccagcgccgactacgacagggtgctggagaagctgaagaagacagcaacaggctggatgaccacaattaacggcaaggagctgaaggtggagggccagattacctactacaacagatacaagagacagaacgtagtcaaggacctgtccgtcgagctggatagactgagcgaagaatctgtgaacaacgacatctcctcctggacaaagggcagaagcggagaagctctgagcctcctgaagaaaagattctcccatagacccgtgcaggagaagttcgtgtgcctgaactgcggcttcgagacacacgcagccgagcaagccgccctgaacatcgccagatcctggctgttcctgcggagccaggagtacaagaaataccagacaaacaagacaaccggcaacaccgataagagagccttcgtcgagacctggcagtccttttaccggaagaagcttaaggaggtgtggaaacctgccgtgcggtctggcggatctggcggaggctccagccagagccccctgaccttcggcgacgtggccgtggagttcagcggcgaggagtgggcctggctggacagcgcccagaggagcctgcacaggagcgtgatgctggagaactacaggaacctggccagcctgggcctgtgcctgagcaagcccgagatgatcagcagcctggagcagaggaaggagccctgggccgtgaagaggaagagcaccggcggcgagtgcgccgacagccagaccctgggcggcccaagcagcggcgcccctcctcccagcggcggcagcccagccggctccccaacctctaccgaggagggcacctctgagtccgccacccccgagagcggccctggcacctccaccgagcccagcgagggcagcgcacccggcagccctgccggcagccccacctccacagaggagggaaccagcaccgagcccagcgaaggcagcgccccaggcaccagcaccgagcctagtgagcaggagattaaacggatcaacaagatcagaagaagacttgtgaaagacagcaacaccaagaaggccggcaagacaggccccatgaaaaccctgctggttagagtgatgacacccgatctgagagagcggctggaaaacctgagaaagaagcctgaaaatatcccccagcccatcagcaatacatctagagccaacctgaataagctgctgaccgattacaccgaaatgaagaaggcgatcctgcatgtgtactgggaagagttccagaaggaccctgtgggcctgatgagccgggtggcccagcctgccagcaagaagatcgatcagaacaagctgaaacctgagatggacgagaagggcaacctgaccaccgccggctttgcctgctctcagtgtggccagcccctgttcgtgtacaagctggagcaggtgtctgagaagggcaaggcttacaccaactacttcggacggtgcaatgtggccgagcacgaaaagctgatcctgctggcccagctgaagcccgagaaggatagcgacgaagccgtgacatatagcctgggaaagtttgggcagagggccctggatttctacagcattcatgtgaccaaggagtccacccaccccgtgaagcccctggcccagatcgccggaaacagatacgcctccggacctgtgggaaaggccctgagcgacgcatgtatgggcacaatcgcctccttcctgtctaagtaccaggacatcatcatcgaacaccagaaggtggtgaagggcaaccagaagagactggagagcctgcgggagctggccggcaaggaaaacctggaataccctagcgtgaccctgccacctcagcctcacaccaaggagggcgttgatgcctacaacgaagtgatcgcccgggtgcgaatgtgggtgaacctgaacctgtggcagaagctgaagctaagcagagatgatgccaagcctctgctgagactgaagggattcccttcctttcctctggtcgagagacaggccaacgaagtggactggtgggacatggtgtgtaacgtgaagaagctgatcaacgagaaaaaggaggatggcaaggtgttttggcagaatctggctggctacaagagacaggaagccctgagaccatacctgagcagcgaggaagatcggaagaagggaaagaaattcgctcggtaccagctgggcgacctgctgctgcacctggaaaagaagcacggcgaggactggggaaaggtgtacgacgaggcctgggagcggattgacaagaaagtggaaggcctgagcaagcacatcaagctggaagaggaacggagaagcgaggacgcccagagcaaggccgccctgaccgactggctgcgggctaaggccagcttcgtgatcgagggcctgaaggaggccgacaaggacgagttctgcagatgcgagctgaagctgcagaagtggtacggggacctgcggggaaagcccttcgccatcgaagccgagaacagcatcctggacatcagcggcttcagcaagcagtacaactgtgccttcatctggcagaaggacggcgtgaagaagctgaacctgtacctgatcatcaactacttcaagggcggcaagctgcggttcaagaagatcaaacctgaagccttcgaagccaacagattctacaccgtgatcaacaaaaagagcggcgagatcgtgcccatggaggtgaacttcaacttcgacgaccccaacctgatcatcctgcctctggcctttggcaagagacagggcagagaattcatctggaacgacctgctgtccctggaaaccggcagcctgaagctggccaacggaagagtgatcgagaagacactgtacaacagaagaacccggcaggatgagcctgccctgttcgtggccctgaccttcgagcggcgggaggtcctggactcctccaatatcaaaccaatgaacctgatcggcgtggcaagaggcgaaaacatccccgccgtgatcgccctgaccgaccccgagggctgcccactgagccggtttaaggatagcctgggaaacccaacccacatcctgagaatcggcgagagctataaggagaagcagcggaccatccaggccaagaaggaggtggagcagcggagagccggcggctacagccggaagtacgccagcaaagccaagaatctggcagacgatatggtgagaaacaccgctagagatctgctgtactacgccgtgacccaggatgccatgctgatcttcgccaacctgagccggggcttcggccggcagggcaagcggaccttcatggccgagagacagtacacacggatggaggactggctgaccgccaagctggcctacgagggcctgagcaagacctacctgtccaagacactggcccagtacacctccaagacatgcagcaactgtgggtttaccatcaccagcgccgactacgacagggtgctggagaagctgaagaagacagcaacaggctggatgaccacaattaacggcaaggagctgaaggtggagggccagattacctactacaacagatacaagagacagaacgtagtcaaggacctgtccgtcgagctggatagactgagcgaagaatctgtgaacaacgacatctcctcctggacaaagggcagaagcggagaagctctgagcctcctgaagaaaagattctcccatagacccgtgcaggagaagttcgtgtgcctgaactgcggcttcgagacacacgcagccgagcaagccgccctgaacatcgccagatcctggctgttcctgcggagccaggagtacaagaaataccagacaaacaagacaaccggcaacaccgataagagagccttcgtcgagacctggcagtccttttaccggaagaagcttaaggaggtgtggaaacctgccgtgcggtctggcggatctggcggaggctcctagccagagccccctgaccttcggcgacgtggccgtggagttcagcggcgaggagtgggcctggctggacagcgcccagaggagcctgcacaggagcgtgatgctggagaactacaggaacctggccagcctgggcctgtgcctgagcaagcccgagatgatcagcagcctggagcagaggaaggagccctgggccgtgaagaggaagagcaccggcggcgagtgcgccgacagccagaccctgggatctggctccggcagcggccccaagaaaaagagaaaagtctaagctgccttctgcggggcttgccttctggccatgcccttcttctctcccttgcacctgtacctcttggtctttgaataaagcctgagtaggaaggctagcaaaaaaaaaaaaaaaaaaaaaaaaaaaaaaaaaaaaaaaaaaaaaaaaaaaaaaaaaaaaaaaaaaaaaaaaaaaaaaaa

SEQ ID NO: 15317 - RNA, 9485 nt, synthetic construct
  source 1..9485: mol_type = other RNA
aggaaataagagagaaaagaagagtaagaagaaatataagagccaccatggcccctaagaagaagcgtaaagtgagccggatggaacgcctcgtctacgaggtgcggcagaagtgcagaaacatcgaggacatctgcatctcctgcggatctctgaacgtgaccctggagcacccactgttcatcggcggcatgtgccagaactgtaaaaactgttttctggagtgtgcctatcaatacgacgatgacggctaccagagctactgcaccatctgttgcggcggaagagaggtgctgatgtgtggaaataacaactgctgccggtgcttctgcgtggaatgcgtggacctgctggtgggccccggcgccgcccaggccgctattaaggaagatccttggaactgctacatgtgcggccacaagggcacatacggcctgctgagacggagagaggactggcctagcagactgcagatgttcttcgccaataaccacgaccaggagttcgacccccctaaggtgtaccctcccgtccccgccgagaagagaaagcccatccgggtcctgagcctgttcgatggcatcgccaccggtctgctggtgctgaaggacctgggcatccaggtggataggtacattgcctccgaggtgtgcgaggactccatcaccgtgggaatggtgcgtcatcagggcaagatcatgtacgtgggcgacgtgcggagcgtgacacagaagcatatccaggagtggggccctttcgacctggtgatcggcggcagcccttgcaatgacctgagcatcgtgaacccagcccggaagggcctgtacgagggaaccggcagactgttcttcgagttttacagactgctgcacgacgcccggcctaaggaaggcgacgaccggcccttcttttggctgttcgagaatgtggtggccatgggagtcagcgacaagcgggatattagccggttcctggagagcaaccccgtgatgatcgatgccaaggaagtgagcgccgcccaccgggccagatacttctggggcaatctgcctggcatgaacagacccctggccagcaccgtgaacgacaagctggagctgcaggagtgcctggagcacggccggatcgccaagttcagcaaggtgagaaccatcaccacccgaagcaacagcatcaaacaaggcaaggaccagcactttcctgtgttcatgaacgagaaggaggacatcctgtggtgtaccgagatggagagagtgttcgggttcccagtccactacacagatgtcagcaacatgtctagactggccagacagagactgctgggaagaagctggtccgtccctgtgatcagacacctgttcgcccctctgaaggagtacttcgcctgcgtgagcagcggcaacagcaacgccaacagccggggccccagcttctctagcggcctggtgccactgtccctgagagggagccacatgggccccatggagatctacaaaaccgtgagcgcctggaagcggcagcctgtgcgcgtgctgagcctgtttcggaatatcgataaagtcctgaaaagcctgggattcctggagagcggctctggctccggcggtggcaccctgaagtacgtggaggatgtgacaaacgtggtcagacgggatgtggagaagtggggccccttcgatctggtgtacggcagcacccaacccctgggcagctcttgtgaccggtgccctggctggtacatgtttcagttccaccggatcctgcagtacgccctgccgagacaggagtcccagcggccattcttttggattttcatggacaacttgctgctgaccgaggatgaccaggaaactaccactcggttcctgcagaccgaagccgtgaccctgcaggacgtgagaggccgggactaccagaacgccatgcgggtgtggtccaacatccctggactgaaaagcaagcacgcacctctgacccctaaagaagaggagtacctgcaggcccaggtgcggagcagaagcaagctggacgcccctaaggtggatctgctggtgaagaattgcctcctgcccctgagagagtacttcaagtatttcagccagaatagtctgcccctgggaggcagcggcggcggcgccctggtgacatttgaggacgtcgccgtgcggttcacccaggaggaatgggctctgctggatccttctcagaaaatcctgtaccgggacgtgatgagagagacataccggaatctgacctccgtgggcatcaactgggaatgttgggaccttgaagcctgcttcagaagcctgggaagaaacctgagagtgcaggtggtgaagagaaagtgcgagctgaccaacagcggcccctgcgccgagggcggcccaagcagcggcgcccctcctcccagcggcggcagcccagccggctccccaacctctaccgaggagggcacctctgagtccgccacccccgagagcggccctggcacctccaccgagcccagcgagggcagcgcacccggcagccctgccggcagccccacctccacagaggagggaaccagcaccgagcccagcgaaggcagcgccccaggcaccagcaccgagcctagtgagcaggagattaaacggatcaacaagatcagaagaagacttgtgaaagacagcaacaccaagaaggccggcaagacaggccccatgaaaaccctgctggttagagtgatgacacccgatctgagagagcggctggaaaacctgagaaagaagcctgaaaatatcccccagcccatcagcaatacatctagagccaacctgaataagctgctgaccgattacaccgaaatgaagaaggcgatcctgcatgtgtactgggaagagttccagaaggaccctgtgggcctgatgagccgggtggcccagcctgccagcaagaagatcgatcagaacaagctgaaacctgagatggacgagaagggcaacctgaccaccgccggctttgcctgctctcagtgtggccagcccctgttcgtgtacaagctggagcaggtgtctgagaagggcaaggcttacaccaactacttcggacggtgcaatgtggccgagcacgaaaagctgatcctgctggcccagctgaagcccgagaaggatagcgacgaagccgtgacatatagcctgggaaagtttgggcagagggccctggatttctacagcattcatgtgaccaaggagtccacccaccccgtgaagcccctggcccagatcgccggaaacagatacgcctccggacctgtgggaaaggccctgagcgacgcatgtatgggcacaatcgcctccttcctgtctaagtaccaggacatcatcatcgaacaccagaaggtggtgaagggcaaccagaagagactggagagcctgcgggagctggccggcaaggaaaacctggaataccctagcgtgaccctgccacctcagcctcacaccaaggagggcgttgatgcctacaacgaagtgatcgcccgggtgcgaatgtgggtgaacctgaacctgtggcagaagctgaagctaagcagagatgatgccaagcctctgctgagactgaagggattcccttcctttcctctggtcgagagacaggccaacgaagtggactggtgggacatggtgtgtaacgtgaagaagctgatcaacgagaaaaaggaggatggcaaggtgttttggcagaatctggctggctacaagagacaggaagccctgagaccatacctgagcagcgaggaagatcggaagaagggaaagaaattcgctcggtaccagctgggcgacctgctgctgcacctggaaaagaagcacggcgaggactggggaaaggtgtacgacgaggcctgggagcggattgacaagaaagtggaaggcctgagcaagcacatcaagctggaagaggaacggagaagcgaggacgcccagagcaaggccgccctgaccgactggctgcgggctaaggccagcttcgtgatcgagggcctgaaggaggccgacaaggacgagttctgcagatgcgagctgaagctgcagaagtggtacggggacctgcggggaaagcccttcgccatcgaagccgagaacagcatcctggacatcagcggcttcagcaagcagtacaactgtgccttcatctggcagaaggacggcgtgaagaagctgaacctgtacctgatcatcaactacttcaagggcggcaagctgcggttcaagaagatcaaacctgaagccttcgaagccaacagattctacaccgtgatcaacaaaaagagcggcgagatcgtgcccatggaggtgaacttcaacttcgacgaccccaacctgatcatcctgcctctggcctttggcaagagacagggcagagaattcatctggaacgacctgctgtccctggaaaccggcagcctgaagctggccaacggaagagtgatcgagaagacactgtacaacagaagaacccggcaggatgagcctgccctgttcgtggccctgaccttcgagcggcgggaggtcctggactcctccaatatcaaaccaatgaacctgatcggcgtggcaagaggcgaaaacatccccgccgtgatcgccctgaccgaccccgagggctgcccactgagccggtttaaggatagcctgggaaacccaacccacatcctgagaatcggcgagagctataaggagaagcagcggaccatccaggccaagaaggaggtggagcagcggagagccggcggctacagccggaagtacgccagcaaagccaagaatctggcagacgatatggtgagaaacaccgctagagatctgctgtactacgccgtgacccaggatgccatgctgatcttcgccaacctgagccggggcttcggccggcagggcaagcggaccttcatggccgagagacagtacacacggatggaggactggctgaccgccaagctggcctacgagggcctgagcaagacctacctgtccaagacactggcccagtacacctccaagacatgcagcaactgtgggtttaccatcaccagcgccgactacgacagggtgctggagaagctgaagaagacagcaacaggctggatgaccacaattaacggcaaggagctgaaggtggagggccagattacctactacaacagatacaagagacagaacgtagtcaaggacctgtccgtcgagctggatagactgagcgaagaatctgtgaacaacgacatctcctcctggacaaagggcagaagcggagaagctctgagcctcctgaagaaaagattctcccatagacccgtgcaggagaagttcgtgtgcctgaactgcggcttcgagacacacgcagccgagcaagccgccctgaacatcgccagatcctggctgttcctgcggagccaggagtacaagaaataccagacaaacaagacaaccggcaacaccgataagagagccttcgtcgagacctggcagtccttttaccggaagaagcttaaggaggtgtggaaacctgccgtgcggtctggcggatctggcggaggctccgacagggtgaagttcaccttcagcgacgtggccgtgtacttcagcgaggaggagtggcagctgctggaggagcagcagaaggagctgtaccagaacgtgatgaaggagaactacaccaccctgatgagcctgggctacaccaccgtgaagcccgacgtgatcagcaagatcgagcagggcaagcagcccctggtgagcagccccagcggcagcaagggcaggagggccatcggcaggcccagcggcggcccaagcagcggcgcccctcctcccagcggcggcagcccagccggctccccaacctctaccgaggagggcacctctgagtccgccacccccgagagcggccctggcacctccaccgagcccagcgagggcagcgcacccggcagccctgccggcagccccacctccacagaggagggaaccagcaccgagcccagcgaaggcagcgccccaggcaccagcaccgagcctagtgagcaggagattaaacggatcaacaagatcagaagaagacttgtgaaagacagcaacaccaagaaggccggcaagacaggccccatgaaaaccctgctggttagagtgatgacacccgatctgagagagcggctggaaaacctgagaaagaagcctgaaaatatcccccagcccatcagcaatacatctagagccaacctgaataagctgctgaccgattacaccgaaatgaagaaggcgatcctgcatgtgtactgggaagagttccagaaggaccctgtgggcctgatgagccgggtggcccagcctgccagcaagaagatcgatcagaacaagctgaaacctgagatggacgagaagggcaacctgaccaccgccggctttgcctgctctcagtgtggccagcccctgttcgtgtacaagctggagcaggtgtctgagaagggcaaggcttacaccaactacttcggacggtgcaatgtggccgagcacgaaaagctgatcctgctggcccagctgaagcccgagaaggatagcgacgaagccgtgacatatagcctgggaaagtttgggcagagggccctggatttctacagcattcatgtgaccaaggagtccacccaccccgtgaagcccctggcccagatcgccggaaacagatacgcctccggacctgtgggaaaggccctgagcgacgcatgtatgggcacaatcgcctccttcctgtctaagtaccaggacatcatcatcgaacaccagaaggtggtgaagggcaaccagaagagactggagagcctgcgggagctggccggcaaggaaaacctggaataccctagcgtgaccctgccacctcagcctcacaccaaggagggcgttgatgcctacaacgaagtgatcgcccgggtgcgaatgtgggtgaacctgaacctgtggcagaagctgaagctaagcagagatgatgccaagcctctgctgagactgaagggattcccttcctttcctctggtcgagagacaggccaacgaagtggactggtgggacatggtgtgtaacgtgaagaagctgatcaacgagaaaaaggaggatggcaaggtgttttggcagaatctggctggctacaagagacaggaagccctgagaccatacctgagcagcgaggaagatcggaagaagggaaagaaattcgctcggtaccagctgggcgacctgctgctgcacctggaaaagaagcacggcgaggactggggaaaggtgtacgacgaggcctgggagcggattgacaagaaagtggaaggcctgagcaagcacatcaagctggaagaggaacggagaagcgaggacgcccagagcaaggccgccctgaccgactggctgcgggctaaggccagcttcgtgatcgagggcctgaaggaggccgacaaggacgagttctgcagatgcgagctgaagctgcagaagtggtacggggacctgcggggaaagcccttcgccatcgaagccgagaacagcatcctggacatcagcggcttcagcaagcagtacaactgtgccttcatctggcagaaggacggcgtgaagaagctgaacctgtacctgatcatcaactacttcaagggcggcaagctgcggttcaagaagatcaaacctgaagccttcgaagccaacagattctacaccgtgatcaacaaaaagagcggcgagatcgtgcccatggaggtgaacttcaacttcgacgaccccaacctgatcatcctgcctctggcctttggcaagagacagggcagagaattcatctggaacgacctgctgtccctggaaaccggcagcctgaagctggccaacggaagagtgatcgagaagacactgtacaacagaagaacccggcaggatgagcctgccctgttcgtggccctgaccttcgagcggcgggaggtcctggactcctccaatatcaaaccaatgaacctgatcggcgtggcaagaggcgaaaacatccccgccgtgatcgccctgaccgaccccgagggctgcccactgagccggtttaaggatagcctgggaaacccaacccacatcctgagaatcggcgagagctataaggagaagcagcggaccatccaggccaagaaggaggtggagcagcggagagccggcggctacagccggaagtacgccagcaaagccaagaatctggcagacgatatggtgagaaacaccgctagagatctgctgtactacgccgtgacccaggatgccatgctgatcttcgccaacctgagccggggcttcggccggcagggcaagcggaccttcatggccgagagacagtacacacggatggaggactggctgaccgccaagctggcctacgagggcctgagcaagacctacctgtccaagacactggcccagtacacctccaagacatgcagcaactgtgggtttaccatcaccagcgccgactacgacagggtgctggagaagctgaagaagacagcaacaggctggatgaccacaattaacggcaaggagctgaaggtggagggccagattacctactacaacagatacaagagacagaacgtagtcaaggacctgtccgtcgagctggatagactgagcgaagaatctgtgaacaacgacatctcctcctggacaaagggcagaagcggagaagctctgagcctcctgaagaaaagattctcccatagacccgtgcaggagaagttcgtgtgcctgaactgcggcttcgagacacacgcagccgagcaagccgccctgaacatcgccagatcctggctgttcctgcggagccaggagtacaagaaataccagacaaacaagacaaccggcaacaccgataagagagccttcgtcgagacctggcagtccttttaccggaagaagcttaaggaggtgtggaaacctgccgtgcggtctggcggatctggcggaggctcctgacagggtgaagttcaccttcagcgacgtggccgtgtacttcagcgaggaggagtggcagctgctggaggagcagcagaaggagctgtaccagaacgtgatgaaggagaactacaccaccctgatgagcctgggctacaccaccgtgaagcccgacgtgatcagcaagatcgagcagggcaagcagcccctggtgagcagccccagcggcagcaagggcaggagggccatcggcaggcccagcggatctggctccggcagcggccccaagaaaaagagaaaagtctaagctgccttctgcggggcttgccttctggccatgcccttcttctctcccttgcacctgtacctcttggtctttgaataaagcctgagtaggaaggctagcaaaaaaaaaaaaaaaaaaaaaaaaaaaaaaaaaaaaaaaaaaaaaaaaaaaaaaaaaaaaaaaaaaaaaaaaaaaaaaaa

SEQ ID NO: 15318 - RNA, 9485 nt, synthetic construct
  source 1..9485: mol_type = other RNA
aggaaataagagagaaaagaagagtaagaagaaatataagagccaccatggcccctaagaagaagcgtaaagtgagccggatggaacgcctcgtctacgaggtgcggcagaagtgcagaaacatcgaggacatctgcatctcctgcggatctctgaacgtgaccctggagcacccactgttcatcggcggcatgtgccagaactgtaaaaactgttttctggagtgtgcctatcaatacgacgatgacggctaccagagctactgcaccatctgttgcggcggaagagaggtgctgatgtgtggaaataacaactgctgccggtgcttctgcgtggaatgcgtggacctgctggtgggccccggcgccgcccaggccgctattaaggaagatccttggaactgctacatgtgcggccacaagggcacatacggcctgctgagacggagagaggactggcctagcagactgcagatgttcttcgccaataaccacgaccaggagttcgacccccctaaggtgtaccctcccgtccccgccgagaagagaaagcccatccgggtcctgagcctgttcgatggcatcgccaccggtctgctggtgctgaaggacctgggcatccaggtggataggtacattgcctccgaggtgtgcgaggactccatcaccgtgggaatggtgcgtcatcagggcaagatcatgtacgtgggcgacgtgcggagcgtgacacagaagcatatccaggagtggggccctttcgacctggtgatcggcggcagcccttgcaatgacctgagcatcgtgaacccagcccggaagggcctgtacgagggaaccggcagactgttcttcgagttttacagactgctgcacgacgcccggcctaaggaaggcgacgaccggcccttcttttggctgttcgagaatgtggtggccatgggagtcagcgacaagcgggatattagccggttcctggagagcaaccccgtgatgatcgatgccaaggaagtgagcgccgcccaccgggccagatacttctggggcaatctgcctggcatgaacagacccctggccagcaccgtgaacgacaagctggagctgcaggagtgcctggagcacggccggatcgccaagttcagcaaggtgagaaccatcaccacccgaagcaacagcatcaaacaaggcaaggaccagcactttcctgtgttcatgaacgagaaggaggacatcctgtggtgtaccgagatggagagagtgttcgggttcccagtccactacacagatgtcagcaacatgtctagactggccagacagagactgctgggaagaagctggtccgtccctgtgatcagacacctgttcgcccctctgaaggagtacttcgcctgcgtgagcagcggcaacagcaacgccaacagccggggccccagcttctctagcggcctggtgccactgtccctgagagggagccacatgggccccatggagatctacaaaaccgtgagcgcctggaagcggcagcctgtgcgcgtgctgagcctgtttcggaatatcgataaagtcctgaaaagcctgggattcctggagagcggctctggctccggcggtggcaccctgaagtacgtggaggatgtgacaaacgtggtcagacgggatgtggagaagtggggccccttcgatctggtgtacggcagcacccaacccctgggcagctcttgtgaccggtgccctggctggtacatgtttcagttccaccggatcctgcagtacgccctgccgagacaggagtcccagcggccattcttttggattttcatggacaacttgctgctgaccgaggatgaccaggaaactaccactcggttcctgcagaccgaagccgtgaccctgcaggacgtgagaggccgggactaccagaacgccatgcgggtgtggtccaacatccctggactgaaaagcaagcacgcacctctgacccctaaagaagaggagtacctgcaggcccaggtgcggagcagaagcaagctggacgcccctaaggtggatctgctggtgaagaattgcctcctgcccctgagagagtacttcaagtatttcagccagaatagtctgcccctgggaggcagcggcggcggcgccctggtgacatttgaggacgtcgccgtgcggttcacccaggaggaatgggctctgctggatccttctcagaaaatcctgtaccgggacgtgatgagagagacataccggaatctgacctccgtgggcatcaactgggaatgttgggaccttgaagcctgcttcagaagcctgggaagaaacctgagagtgcaggtggtgaagagaaagtgcgagctgaccaacagcggcccctgcgccgagggcggcccaagcagcggcgcccctcctcccagcggcggcagcccagccggctccccaacctctaccgaggagggcacctctgagtccgccacccccgagagcggccctggcacctccaccgagcccagcgagggcagcgcacccggcagccctgccggcagccccacctccacagaggagggaaccagcaccgagcccagcgaaggcagcgccccaggcaccagcaccgagcctagtgagcaggagattaaacggatcaacaagatcagaagaagacttgtgaaagacagcaacaccaagaaggccggcaagacaggccccatgaaaaccctgctggttagagtgatgacacccgatctgagagagcggctggaaaacctgagaaagaagcctgaaaatatcccccagcccatcagcaatacatctagagccaacctgaataagctgctgaccgattacaccgaaatgaagaaggcgatcctgcatgtgtactgggaagagttccagaaggaccctgtgggcctgatgagccgggtggcccagcctgccagcaagaagatcgatcagaacaagctgaaacctgagatggacgagaagggcaacctgaccaccgccggctttgcctgctctcagtgtggccagcccctgttcgtgtacaagctggagcaggtgtctgagaagggcaaggcttacaccaactacttcggacggtgcaatgtggccgagcacgaaaagctgatcctgctggcccagctgaagcccgagaaggatagcgacgaagccgtgacatatagcctgggaaagtttgggcagagggccctggatttctacagcattcatgtgaccaaggagtccacccaccccgtgaagcccctggcccagatcgccggaaacagatacgcctccggacctgtgggaaaggccctgagcgacgcatgtatgggcacaatcgcctccttcctgtctaagtaccaggacatcatcatcgaacaccagaaggtggtgaagggcaaccagaagagactggagagcctgcgggagctggccggcaaggaaaacctggaataccctagcgtgaccctgccacctcagcctcacaccaaggagggcgttgatgcctacaacgaagtgatcgcccgggtgcgaatgtgggtgaacctgaacctgtggcagaagctgaagctaagcagagatgatgccaagcctctgctgagactgaagggattcccttcctttcctctggtcgagagacaggccaacgaagtggactggtgggacatggtgtgtaacgtgaagaagctgatcaacgagaaaaaggaggatggcaaggtgttttggcagaatctggctggctacaagagacaggaagccctgagaccatacctgagcagcgaggaagatcggaagaagggaaagaaattcgctcggtaccagctgggcgacctgctgctgcacctggaaaagaagcacggcgaggactggggaaaggtgtacgacgaggcctgggagcggattgacaagaaagtggaaggcctgagcaagcacatcaagctggaagaggaacggagaagcgaggacgcccagagcaaggccgccctgaccgactggctgcgggctaaggccagcttcgtgatcgagggcctgaaggaggccgacaaggacgagttctgcagatgcgagctgaagctgcagaagtggtacggggacctgcggggaaagcccttcgccatcgaagccgagaacagcatcctggacatcagcggcttcagcaagcagtacaactgtgccttcatctggcagaaggacggcgtgaagaagctgaacctgtacctgatcatcaactacttcaagggcggcaagctgcggttcaagaagatcaaacctgaagccttcgaagccaacagattctacaccgtgatcaacaaaaagagcggcgagatcgtgcccatggaggtgaacttcaacttcgacgaccccaacctgatcatcctgcctctggcctttggcaagagacagggcagagaattcatctggaacgacctgctgtccctggaaaccggcagcctgaagctggccaacggaagagtgatcgagaagacactgtacaacagaagaacccggcaggatgagcctgccctgttcgtggccctgaccttcgagcggcgggaggtcctggactcctccaatatcaaaccaatgaacctgatcggcgtggcaagaggcgaaaacatccccgccgtgatcgccctgaccgaccccgagggctgcccactgagccggtttaaggatagcctgggaaacccaacccacatcctgagaatcggcgagagctataaggagaagcagcggaccatccaggccaagaaggaggtggagcagcggagagccggcggctacagccggaagtacgccagcaaagccaagaatctggcagacgatatggtgagaaacaccgctagagatctgctgtactacgccgtgacccaggatgccatgctgatcttcgccaacctgagccggggcttcggccggcagggcaagcggaccttcatggccgagagacagtacacacggatggaggactggctgaccgccaagctggcctacgagggcctgagcaagacctacctgtccaagacactggcccagtacacctccaagacatgcagcaactgtgggtttaccatcaccagcgccgactacgacagggtgctggagaagctgaagaagacagcaacaggctggatgaccacaattaacggcaaggagctgaaggtggagggccagattacctactacaacagatacaagagacagaacgtagtcaaggacctgtccgtcgagctggatagactgagcgaagaatctgtgaacaacgacatctcctcctggacaaagggcagaagcggagaagctctgagcctcctgaagaaaagattctcccatagacccgtgcaggagaagttcgtgtgcctgaactgcggcttcgagacacacgcagccgagcaagccgccctgaacatcgccagatcctggctgttcctgcggagccaggagtacaagaaataccagacaaacaagacaaccggcaacaccgataagagagccttcgtcgagacctggcagtccttttaccggaagaagcttaaggaggtgtggaaacctgccgtgcggtctggcggatctggcggaggctccgccctgaggagcgtgatgttcagcgacatcagcatcgacttcagccccgaggagtgggactgcctggacctggagcagaaggacctgtacagggacgtgatgctggagaactacagcaacctggtgagcctgggctgcttcatcagcaagcccgacgtgatcagcctgctggagcagggcaaggagccctggaaggtggtgaggaagaggaggggccagtgccccgacctgcagaccaagtacggcggcccaagcagcggcgcccctcctcccagcggcggcagcccagccggctccccaacctctaccgaggagggcacctctgagtccgccacccccgagagcggccctggcacctccaccgagcccagcgagggcagcgcacccggcagccctgccggcagccccacctccacagaggagggaaccagcaccgagcccagcgaaggcagcgccccaggcaccagcaccgagcctagtgagcaggagattaaacggatcaacaagatcagaagaagacttgtgaaagacagcaacaccaagaaggccggcaagacaggccccatgaaaaccctgctggttagagtgatgacacccgatctgagagagcggctggaaaacctgagaaagaagcctgaaaatatcccccagcccatcagcaatacatctagagccaacctgaataagctgctgaccgattacaccgaaatgaagaaggcgatcctgcatgtgtactgggaagagttccagaaggaccctgtgggcctgatgagccgggtggcccagcctgccagcaagaagatcgatcagaacaagctgaaacctgagatggacgagaagggcaacctgaccaccgccggctttgcctgctctcagtgtggccagcccctgttcgtgtacaagctggagcaggtgtctgagaagggcaaggcttacaccaactacttcggacggtgcaatgtggccgagcacgaaaagctgatcctgctggcccagctgaagcccgagaaggatagcgacgaagccgtgacatatagcctgggaaagtttgggcagagggccctggatttctacagcattcatgtgaccaaggagtccacccaccccgtgaagcccctggcccagatcgccggaaacagatacgcctccggacctgtgggaaaggccctgagcgacgcatgtatgggcacaatcgcctccttcctgtctaagtaccaggacatcatcatcgaacaccagaaggtggtgaagggcaaccagaagagactggagagcctgcgggagctggccggcaaggaaaacctggaataccctagcgtgaccctgccacctcagcctcacaccaaggagggcgttgatgcctacaacgaagtgatcgcccgggtgcgaatgtgggtgaacctgaacctgtggcagaagctgaagctaagcagagatgatgccaagcctctgctgagactgaagggattcccttcctttcctctggtcgagagacaggccaacgaagtggactggtgggacatggtgtgtaacgtgaagaagctgatcaacgagaaaaaggaggatggcaaggtgttttggcagaatctggctggctacaagagacaggaagccctgagaccatacctgagcagcgaggaagatcggaagaagggaaagaaattcgctcggtaccagctgggcgacctgctgctgcacctggaaaagaagcacggcgaggactggggaaaggtgtacgacgaggcctgggagcggattgacaagaaagtggaaggcctgagcaagcacatcaagctggaagaggaacggagaagcgaggacgcccagagcaaggccgccctgaccgactggctgcgggctaaggccagcttcgtgatcgagggcctgaaggaggccgacaaggacgagttctgcagatgcgagctgaagctgcagaagtggtacggggacctgcggggaaagcccttcgccatcgaagccgagaacagcatcctggacatcagcggcttcagcaagcagtacaactgtgccttcatctggcagaaggacggcgtgaagaagctgaacctgtacctgatcatcaactacttcaagggcggcaagctgcggttcaagaagatcaaacctgaagccttcgaagccaacagattctacaccgtgatcaacaaaaagagcggcgagatcgtgcccatggaggtgaacttcaacttcgacgaccccaacctgatcatcctgcctctggcctttggcaagagacagggcagagaattcatctggaacgacctgctgtccctggaaaccggcagcctgaagctggccaacggaagagtgatcgagaagacactgtacaacagaagaacccggcaggatgagcctgccctgttcgtggccctgaccttcgagcggcgggaggtcctggactcctccaatatcaaaccaatgaacctgatcggcgtggcaagaggcgaaaacatccccgccgtgatcgccctgaccgaccccgagggctgcccactgagccggtttaaggatagcctgggaaacccaacccacatcctgagaatcggcgagagctataaggagaagcagcggaccatccaggccaagaaggaggtggagcagcggagagccggcggctacagccggaagtacgccagcaaagccaagaatctggcagacgatatggtgagaaacaccgctagagatctgctgtactacgccgtgacccaggatgccatgctgatcttcgccaacctgagccggggcttcggccggcagggcaagcggaccttcatggccgagagacagtacacacggatggaggactggctgaccgccaagctggcctacgagggcctgagcaagacctacctgtccaagacactggcccagtacacctccaagacatgcagcaactgtgggtttaccatcaccagcgccgactacgacagggtgctggagaagctgaagaagacagcaacaggctggatgaccacaattaacggcaaggagctgaaggtggagggccagattacctactacaacagatacaagagacagaacgtagtcaaggacctgtccgtcgagctggatagactgagcgaagaatctgtgaacaacgacatctcctcctggacaaagggcagaagcggagaagctctgagcctcctgaagaaaagattctcccatagacccgtgcaggagaagttcgtgtgcctgaactgcggcttcgagacacacgcagccgagcaagccgccctgaacatcgccagatcctggctgttcctgcggagccaggagtacaagaaataccagacaaacaagacaaccggcaacaccgataagagagccttcgtcgagacctggcagtccttttaccggaagaagcttaaggaggtgtggaaacctgccgtgcggtctggcggatctggcggaggctcctgccctgaggagcgtgatgttcagcgacatcagcatcgacttcagccccgaggagtgggactgcctggacctggagcagaaggacctgtacagggacgtgatgctggagaactacagcaacctggtgagcctgggctgcttcatcagcaagcccgacgtgatcagcctgctggagcagggcaaggagccctggaaggtggtgaggaagaggaggggccagtgccccgacctgcagaccaagtacggatctggctccggcagcggccccaagaaaaagagaaaagtctaagctgccttctgcggggcttgccttctggccatgcccttcttctctcccttgcacctgtacctcttggtctttgaataaagcctgagtaggaaggctagcaaaaaaaaaaaaaaaaaaaaaaaaaaaaaaaaaaaaaaaaaaaaaaaaaaaaaaaaaaaaaaaaaaaaaaaaaaaaaaaa

SEQ ID NO: 15319 - RNA, 9485 nt, synthetic construct
  source 1..9485: mol_type = other RNA
aggaaataagagagaaaagaagagtaagaagaaatataagagccaccatggcccctaagaagaagcgtaaagtgagccggatggaacgcctcgtctacgaggtgcggcagaagtgcagaaacatcgaggacatctgcatctcctgcggatctctgaacgtgaccctggagcacccactgttcatcggcggcatgtgccagaactgtaaaaactgttttctggagtgtgcctatcaatacgacgatgacggctaccagagctactgcaccatctgttgcggcggaagagaggtgctgatgtgtggaaataacaactgctgccggtgcttctgcgtggaatgcgtggacctgctggtgggccccggcgccgcccaggccgctattaaggaagatccttggaactgctacatgtgcggccacaagggcacatacggcctgctgagacggagagaggactggcctagcagactgcagatgttcttcgccaataaccacgaccaggagttcgacccccctaaggtgtaccctcccgtccccgccgagaagagaaagcccatccgggtcctgagcctgttcgatggcatcgccaccggtctgctggtgctgaaggacctgggcatccaggtggataggtacattgcctccgaggtgtgcgaggactccatcaccgtgggaatggtgcgtcatcagggcaagatcatgtacgtgggcgacgtgcggagcgtgacacagaagcatatccaggagtggggccctttcgacctggtgatcggcggcagcccttgcaatgacctgagcatcgtgaacccagcccggaagggcctgtacgagggaaccggcagactgttcttcgagttttacagactgctgcacgacgcccggcctaaggaaggcgacgaccggcccttcttttggctgttcgagaatgtggtggccatgggagtcagcgacaagcgggatattagccggttcctggagagcaaccccgtgatgatcgatgccaaggaagtgagcgccgcccaccgggccagatacttctggggcaatctgcctggcatgaacagacccctggccagcaccgtgaacgacaagctggagctgcaggagtgcctggagcacggccggatcgccaagttcagcaaggtgagaaccatcaccacccgaagcaacagcatcaaacaaggcaaggaccagcactttcctgtgttcatgaacgagaaggaggacatcctgtggtgtaccgagatggagagagtgttcgggttcccagtccactacacagatgtcagcaacatgtctagactggccagacagagactgctgggaagaagctggtccgtccctgtgatcagacacctgttcgcccctctgaaggagtacttcgcctgcgtgagcagcggcaacagcaacgccaacagccggggccccagcttctctagcggcctggtgccactgtccctgagagggagccacatgggccccatggagatctacaaaaccgtgagcgcctggaagcggcagcctgtgcgcgtgctgagcctgtttcggaatatcgataaagtcctgaaaagcctgggattcctggagagcggctctggctccggcggtggcaccctgaagtacgtggaggatgtgacaaacgtggtcagacgggatgtggagaagtggggccccttcgatctggtgtacggcagcacccaacccctgggcagctcttgtgaccggtgccctggctggtacatgtttcagttccaccggatcctgcagtacgccctgccgagacaggagtcccagcggccattcttttggattttcatggacaacttgctgctgaccgaggatgaccaggaaactaccactcggttcctgcagaccgaagccgtgaccctgcaggacgtgagaggccgggactaccagaacgccatgcgggtgtggtccaacatccctggactgaaaagcaagcacgcacctctgacccctaaagaagaggagtacctgcaggcccaggtgcggagcagaagcaagctggacgcccctaaggtggatctgctggtgaagaattgcctcctgcccctgagagagtacttcaagtatttcagccagaatagtctgcccctgggaggcagcggcggcggcgccctggtgacatttgaggacgtcgccgtgcggttcacccaggaggaatgggctctgctggatccttctcagaaaatcctgtaccgggacgtgatgagagagacataccggaatctgacctccgtgggcatcaactgggaatgttgggaccttgaagcctgcttcagaagcctgggaagaaacctgagagtgcaggtggtgaagagaaagtgcgagctgaccaacagcggcccctgcgccgagggcggcccaagcagcggcgcccctcctcccagcggcggcagcccagccggctccccaacctctaccgaggagggcacctctgagtccgccacccccgagagcggccctggcacctccaccgagcccagcgagggcagcgcacccggcagccctgccggcagccccacctccacagaggagggaaccagcaccgagcccagcgaaggcagcgccccaggcaccagcaccgagcctagtgagcaggagattaaacggatcaacaagatcagaagaagacttgtgaaagacagcaacaccaagaaggccggcaagacaggccccatgaaaaccctgctggttagagtgatgacacccgatctgagagagcggctggaaaacctgagaaagaagcctgaaaatatcccccagcccatcagcaatacatctagagccaacctgaataagctgctgaccgattacaccgaaatgaagaaggcgatcctgcatgtgtactgggaagagttccagaaggaccctgtgggcctgatgagccgggtggcccagcctgccagcaagaagatcgatcagaacaagctgaaacctgagatggacgagaagggcaacctgaccaccgccggctttgcctgctctcagtgtggccagcccctgttcgtgtacaagctggagcaggtgtctgagaagggcaaggcttacaccaactacttcggacggtgcaatgtggccgagcacgaaaagctgatcctgctggcccagctgaagcccgagaaggatagcgacgaagccgtgacatatagcctgggaaagtttgggcagagggccctggatttctacagcattcatgtgaccaaggagtccacccaccccgtgaagcccctggcccagatcgccggaaacagatacgcctccggacctgtgggaaaggccctgagcgacgcatgtatgggcacaatcgcctccttcctgtctaagtaccaggacatcatcatcgaacaccagaaggtggtgaagggcaaccagaagagactggagagcctgcgggagctggccggcaaggaaaacctggaataccctagcgtgaccctgccacctcagcctcacaccaaggagggcgttgatgcctacaacgaagtgatcgcccgggtgcgaatgtgggtgaacctgaacctgtggcagaagctgaagctaagcagagatgatgccaagcctctgctgagactgaagggattcccttcctttcctctggtcgagagacaggccaacgaagtggactggtgggacatggtgtgtaacgtgaagaagctgatcaacgagaaaaaggaggatggcaaggtgttttggcagaatctggctggctacaagagacaggaagccctgagaccatacctgagcagcgaggaagatcggaagaagggaaagaaattcgctcggtaccagctgggcgacctgctgctgcacctggaaaagaagcacggcgaggactggggaaaggtgtacgacgaggcctgggagcggattgacaagaaagtggaaggcctgagcaagcacatcaagctggaagaggaacggagaagcgaggacgcccagagcaaggccgccctgaccgactggctgcgggctaaggccagcttcgtgatcgagggcctgaaggaggccgacaaggacgagttctgcagatgcgagctgaagctgcagaagtggtacggggacctgcggggaaagcccttcgccatcgaagccgagaacagcatcctggacatcagcggcttcagcaagcagtacaactgtgccttcatctggcagaaggacggcgtgaagaagctgaacctgtacctgatcatcaactacttcaagggcggcaagctgcggttcaagaagatcaaacctgaagccttcgaagccaacagattctacaccgtgatcaacaaaaagagcggcgagatcgtgcccatggaggtgaacttcaacttcgacgaccccaacctgatcatcctgcctctggcctttggcaagagacagggcagagaattcatctggaacgacctgctgtccctggaaaccggcagcctgaagctggccaacggaagagtgatcgagaagacactgtacaacagaagaacccggcaggatgagcctgccctgttcgtggccctgaccttcgagcggcgggaggtcctggactcctccaatatcaaaccaatgaacctgatcggcgtggcaagaggcgaaaacatccccgccgtgatcgccctgaccgaccccgagggctgcccactgagccggtttaaggatagcctgggaaacccaacccacatcctgagaatcggcgagagctataaggagaagcagcggaccatccaggccaagaaggaggtggagcagcggagagccggcggctacagccggaagtacgccagcaaagccaagaatctggcagacgatatggtgagaaacaccgctagagatctgctgtactacgccgtgacccaggatgccatgctgatcttcgccaacctgagccggggcttcggccggcagggcaagcggaccttcatggccgagagacagtacacacggatggaggactggctgaccgccaagctggcctacgagggcctgagcaagacctacctgtccaagacactggcccagtacacctccaagacatgcagcaactgtgggtttaccatcaccagcgccgactacgacagggtgctggagaagctgaagaagacagcaacaggctggatgaccacaattaacggcaaggagctgaaggtggagggccagattacctactacaacagatacaagagacagaacgtagtcaaggacctgtccgtcgagctggatagactgagcgaagaatctgtgaacaacgacatctcctcctggacaaagggcagaagcggagaagctctgagcctcctgaagaaaagattctcccatagacccgtgcaggagaagttcgtgtgcctgaactgcggcttcgagacacacgcagccgagcaagccgccctgaacatcgccagatcctggctgttcctgcggagccaggagtacaagaaataccagacaaacaagacaaccggcaacaccgataagagagccttcgtcgagacctggcagtccttttaccggaagaagcttaaggaggtgtggaaacctgccgtgcggtctggcggatctggcggaggctccgccagggtggccgtgatgttcagcgacgtgagcatcgccttcagccaggaggagtgggagtacctggacctggcccagagggacctgtacaaggacgtgatgatggagaactacaggaacgtggccagcctggccggctgcttcatcagcaagcccgacgtgatcagcctgctggagcagggcaaggagccctggaaggtggtgaggaagaggaggaggaaccccgacctggagaccaaggacggcggcccaagcagcggcgcccctcctcccagcggcggcagcccagccggctccccaacctctaccgaggagggcacctctgagtccgccacccccgagagcggccctggcacctccaccgagcccagcgagggcagcgcacccggcagccctgccggcagccccacctccacagaggagggaaccagcaccgagcccagcgaaggcagcgccccaggcaccagcaccgagcctagtgagcaggagattaaacggatcaacaagatcagaagaagacttgtgaaagacagcaacaccaagaaggccggcaagacaggccccatgaaaaccctgctggttagagtgatgacacccgatctgagagagcggctggaaaacctgagaaagaagcctgaaaatatcccccagcccatcagcaatacatctagagccaacctgaataagctgctgaccgattacaccgaaatgaagaaggcgatcctgcatgtgtactgggaagagttccagaaggaccctgtgggcctgatgagccgggtggcccagcctgccagcaagaagatcgatcagaacaagctgaaacctgagatggacgagaagggcaacctgaccaccgccggctttgcctgctctcagtgtggccagcccctgttcgtgtacaagctggagcaggtgtctgagaagggcaaggcttacaccaactacttcggacggtgcaatgtggccgagcacgaaaagctgatcctgctggcccagctgaagcccgagaaggatagcgacgaagccgtgacatatagcctgggaaagtttgggcagagggccctggatttctacagcattcatgtgaccaaggagtccacccaccccgtgaagcccctggcccagatcgccggaaacagatacgcctccggacctgtgggaaaggccctgagcgacgcatgtatgggcacaatcgcctccttcctgtctaagtaccaggacatcatcatcgaacaccagaaggtggtgaagggcaaccagaagagactggagagcctgcgggagctggccggcaaggaaaacctggaataccctagcgtgaccctgccacctcagcctcacaccaaggagggcgttgatgcctacaacgaagtgatcgcccgggtgcgaatgtgggtgaacctgaacctgtggcagaagctgaagctaagcagagatgatgccaagcctctgctgagactgaagggattcccttcctttcctctggtcgagagacaggccaacgaagtggactggtgggacatggtgtgtaacgtgaagaagctgatcaacgagaaaaaggaggatggcaaggtgttttggcagaatctggctggctacaagagacaggaagccctgagaccatacctgagcagcgaggaagatcggaagaagggaaagaaattcgctcggtaccagctgggcgacctgctgctgcacctggaaaagaagcacggcgaggactggggaaaggtgtacgacgaggcctgggagcggattgacaagaaagtggaaggcctgagcaagcacatcaagctggaagaggaacggagaagcgaggacgcccagagcaaggccgccctgaccgactggctgcgggctaaggccagcttcgtgatcgagggcctgaaggaggccgacaaggacgagttctgcagatgcgagctgaagctgcagaagtggtacggggacctgcggggaaagcccttcgccatcgaagccgagaacagcatcctggacatcagcggcttcagcaagcagtacaactgtgccttcatctggcagaaggacggcgtgaagaagctgaacctgtacctgatcatcaactacttcaagggcggcaagctgcggttcaagaagatcaaacctgaagccttcgaagccaacagattctacaccgtgatcaacaaaaagagcggcgagatcgtgcccatggaggtgaacttcaacttcgacgaccccaacctgatcatcctgcctctggcctttggcaagagacagggcagagaattcatctggaacgacctgctgtccctggaaaccggcagcctgaagctggccaacggaagagtgatcgagaagacactgtacaacagaagaacccggcaggatgagcctgccctgttcgtggccctgaccttcgagcggcgggaggtcctggactcctccaatatcaaaccaatgaacctgatcggcgtggcaagaggcgaaaacatccccgccgtgatcgccctgaccgaccccgagggctgcccactgagccggtttaaggatagcctgggaaacccaacccacatcctgagaatcggcgagagctataaggagaagcagcggaccatccaggccaagaaggaggtggagcagcggagagccggcggctacagccggaagtacgccagcaaagccaagaatctggcagacgatatggtgagaaacaccgctagagatctgctgtactacgccgtgacccaggatgccatgctgatcttcgccaacctgagccggggcttcggccggcagggcaagcggaccttcatggccgagagacagtacacacggatggaggactggctgaccgccaagctggcctacgagggcctgagcaagacctacctgtccaagacactggcccagtacacctccaagacatgcagcaactgtgggtttaccatcaccagcgccgactacgacagggtgctggagaagctgaagaagacagcaacaggctggatgaccacaattaacggcaaggagctgaaggtggagggccagattacctactacaacagatacaagagacagaacgtagtcaaggacctgtccgtcgagctggatagactgagcgaagaatctgtgaacaacgacatctcctcctggacaaagggcagaagcggagaagctctgagcctcctgaagaaaagattctcccatagacccgtgcaggagaagttcgtgtgcctgaactgcggcttcgagacacacgcagccgagcaagccgccctgaacatcgccagatcctggctgttcctgcggagccaggagtacaagaaataccagacaaacaagacaaccggcaacaccgataagagagccttcgtcgagacctggcagtccttttaccggaagaagcttaaggaggtgtggaaacctgccgtgcggtctggcggatctggcggaggctcctgccagggtggccgtgatgttcagcgacgtgagcatcgccttcagccaggaggagtgggagtacctggacctggcccagagggacctgtacaaggacgtgatgatggagaactacaggaacgtggccagcctggccggctgcttcatcagcaagcccgacgtgatcagcctgctggagcagggcaaggagccctggaaggtggtgaggaagaggaggaggaaccccgacctggagaccaaggacggatctggctccggcagcggccccaagaaaaagagaaaagtctaagctgccttctgcggggcttgccttctggccatgcccttcttctctcccttgcacctgtacctcttggtctttgaataaagcctgagtaggaaggctagcaaaaaaaaaaaaaaaaaaaaaaaaaaaaaaaaaaaaaaaaaaaaaaaaaaaaaaaaaaaaaaaaaaaaaaaaaaaaaaaa

SEQ ID NO: 15320 - RNA, 9485 nt, synthetic construct
  source 1..9485: mol_type = other RNA
aggaaataagagagaaaagaagagtaagaagaaatataagagccaccatggcccctaagaagaagcgtaaagtgagccggatggaacgcctcgtctacgaggtgcggcagaagtgcagaaacatcgaggacatctgcatctcctgcggatctctgaacgtgaccctggagcacccactgttcatcggcggcatgtgccagaactgtaaaaactgttttctggagtgtgcctatcaatacgacgatgacggctaccagagctactgcaccatctgttgcggcggaagagaggtgctgatgtgtggaaataacaactgctgccggtgcttctgcgtggaatgcgtggacctgctggtgggccccggcgccgcccaggccgctattaaggaagatccttggaactgctacatgtgcggccacaagggcacatacggcctgctgagacggagagaggactggcctagcagactgcagatgttcttcgccaataaccacgaccaggagttcgacccccctaaggtgtaccctcccgtccccgccgagaagagaaagcccatccgggtcctgagcctgttcgatggcatcgccaccggtctgctggtgctgaaggacctgggcatccaggtggataggtacattgcctccgaggtgtgcgaggactccatcaccgtgggaatggtgcgtcatcagggcaagatcatgtacgtgggcgacgtgcggagcgtgacacagaagcatatccaggagtggggccctttcgacctggtgatcggcggcagcccttgcaatgacctgagcatcgtgaacccagcccggaagggcctgtacgagggaaccggcagactgttcttcgagttttacagactgctgcacgacgcccggcctaaggaaggcgacgaccggcccttcttttggctgttcgagaatgtggtggccatgggagtcagcgacaagcgggatattagccggttcctggagagcaaccccgtgatgatcgatgccaaggaagtgagcgccgcccaccgggccagatacttctggggcaatctgcctggcatgaacagacccctggccagcaccgtgaacgacaagctggagctgcaggagtgcctggagcacggccggatcgccaagttcagcaaggtgagaaccatcaccacccgaagcaacagcatcaaacaaggcaaggaccagcactttcctgtgttcatgaacgagaaggaggacatcctgtggtgtaccgagatggagagagtgttcgggttcccagtccactacacagatgtcagcaacatgtctagactggccagacagagactgctgggaagaagctggtccgtccctgtgatcagacacctgttcgcccctctgaaggagtacttcgcctgcgtgagcagcggcaacagcaacgccaacagccggggccccagcttctctagcggcctggtgccactgtccctgagagggagccacatgggccccatggagatctacaaaaccgtgagcgcctggaagcggcagcctgtgcgcgtgctgagcctgtttcggaatatcgataaagtcctgaaaagcctgggattcctggagagcggctctggctccggcggtggcaccctgaagtacgtggaggatgtgacaaacgtggtcagacgggatgtggagaagtggggccccttcgatctggtgtacggcagcacccaacccctgggcagctcttgtgaccggtgccctggctggtacatgtttcagttccaccggatcctgcagtacgccctgccgagacaggagtcccagcggccattcttttggattttcatggacaacttgctgctgaccgaggatgaccaggaaactaccactcggttcctgcagaccgaagccgtgaccctgcaggacgtgagaggccgggactaccagaacgccatgcgggtgtggtccaacatccctggactgaaaagcaagcacgcacctctgacccctaaagaagaggagtacctgcaggcccaggtgcggagcagaagcaagctggacgcccctaaggtggatctgctggtgaagaattgcctcctgcccctgagagagtacttcaagtatttcagccagaatagtctgcccctgggaggcagcggcggcggcgccctggtgacatttgaggacgtcgccgtgcggttcacccaggaggaatgggctctgctggatccttctcagaaaatcctgtaccgggacgtgatgagagagacataccggaatctgacctccgtgggcatcaactgggaatgttgggaccttgaagcctgcttcagaagcctgggaagaaacctgagagtgcaggtggtgaagagaaagtgcgagctgaccaacagcggcccctgcgccgagggcggcccaagcagcggcgcccctcctcccagcggcggcagcccagccggctccccaacctctaccgaggagggcacctctgagtccgccacccccgagagcggccctggcacctccaccgagcccagcgagggcagcgcacccggcagccctgccggcagccccacctccacagaggagggaaccagcaccgagcccagcgaaggcagcgccccaggcaccagcaccgagcctagtgagcaggagattaaacggatcaacaagatcagaagaagacttgtgaaagacagcaacaccaagaaggccggcaagacaggccccatgaaaaccctgctggttagagtgatgacacccgatctgagagagcggctggaaaacctgagaaagaagcctgaaaatatcccccagcccatcagcaatacatctagagccaacctgaataagctgctgaccgattacaccgaaatgaagaaggcgatcctgcatgtgtactgggaagagttccagaaggaccctgtgggcctgatgagccgggtggcccagcctgccagcaagaagatcgatcagaacaagctgaaacctgagatggacgagaagggcaacctgaccaccgccggctttgcctgctctcagtgtggccagcccctgttcgtgtacaagctggagcaggtgtctgagaagggcaaggcttacaccaactacttcggacggtgcaatgtggccgagcacgaaaagctgatcctgctggcccagctgaagcccgagaaggatagcgacgaagccgtgacatatagcctgggaaagtttgggcagagggccctggatttctacagcattcatgtgaccaaggagtccacccaccccgtgaagcccctggcccagatcgccggaaacagatacgcctccggacctgtgggaaaggccctgagcgacgcatgtatgggcacaatcgcctccttcctgtctaagtaccaggacatcatcatcgaacaccagaaggtggtgaagggcaaccagaagagactggagagcctgcgggagctggccggcaaggaaaacctggaataccctagcgtgaccctgccacctcagcctcacaccaaggagggcgttgatgcctacaacgaagtgatcgcccgggtgcgaatgtgggtgaacctgaacctgtggcagaagctgaagctaagcagagatgatgccaagcctctgctgagactgaagggattcccttcctttcctctggtcgagagacaggccaacgaagtggactggtgggacatggtgtgtaacgtgaagaagctgatcaacgagaaaaaggaggatggcaaggtgttttggcagaatctggctggctacaagagacaggaagccctgagaccatacctgagcagcgaggaagatcggaagaagggaaagaaattcgctcggtaccagctgggcgacctgctgctgcacctggaaaagaagcacggcgaggactggggaaaggtgtacgacgaggcctgggagcggattgacaagaaagtggaaggcctgagcaagcacatcaagctggaagaggaacggagaagcgaggacgcccagagcaaggccgccctgaccgactggctgcgggctaaggccagcttcgtgatcgagggcctgaaggaggccgacaaggacgagttctgcagatgcgagctgaagctgcagaagtggtacggggacctgcggggaaagcccttcgccatcgaagccgagaacagcatcctggacatcagcggcttcagcaagcagtacaactgtgccttcatctggcagaaggacggcgtgaagaagctgaacctgtacctgatcatcaactacttcaagggcggcaagctgcggttcaagaagatcaaacctgaagccttcgaagccaacagattctacaccgtgatcaacaaaaagagcggcgagatcgtgcccatggaggtgaacttcaacttcgacgaccccaacctgatcatcctgcctctggcctttggcaagagacagggcagagaattcatctggaacgacctgctgtccctggaaaccggcagcctgaagctggccaacggaagagtgatcgagaagacactgtacaacagaagaacccggcaggatgagcctgccctgttcgtggccctgaccttcgagcggcgggaggtcctggactcctccaatatcaaaccaatgaacctgatcggcgtggcaagaggcgaaaacatccccgccgtgatcgccctgaccgaccccgagggctgcccactgagccggtttaaggatagcctgggaaacccaacccacatcctgagaatcggcgagagctataaggagaagcagcggaccatccaggccaagaaggaggtggagcagcggagagccggcggctacagccggaagtacgccagcaaagccaagaatctggcagacgatatggtgagaaacaccgctagagatctgctgtactacgccgtgacccaggatgccatgctgatcttcgccaacctgagccggggcttcggccggcagggcaagcggaccttcatggccgagagacagtacacacggatggaggactggctgaccgccaagctggcctacgagggcctgagcaagacctacctgtccaagacactggcccagtacacctccaagacatgcagcaactgtgggtttaccatcaccagcgccgactacgacagggtgctggagaagctgaagaagacagcaacaggctggatgaccacaattaacggcaaggagctgaaggtggagggccagattacctactacaacagatacaagagacagaacgtagtcaaggacctgtccgtcgagctggatagactgagcgaagaatctgtgaacaacgacatctcctcctggacaaagggcagaagcggagaagctctgagcctcctgaagaaaagattctcccatagacccgtgcaggagaagttcgtgtgcctgaactgcggcttcgagacacacgcagccgagcaagccgccctgaacatcgccagatcctggctgttcctgcggagccaggagtacaagaaataccagacaaacaagacaaccggcaacaccgataagagagccttcgtcgagacctggcagtccttttaccggaagaagcttaaggaggtgtggaaacctgccgtgcggtctggcggatctggcggaggctccccccagaagagcgtgaccttcgaggacgtggccgtgtacttcacccagaccgagtgggacggcctgagccccgcccagagggccctgtacagggacgtgatgctggagaactacggcaacgtggccagcctgggcttcagcctgctgaagcccgccgtgatcagccagctggagggcgccggcgagctgggcggccccagccccctggtggacggcaccgagaccggcccccagggcctgtggggcggcccaagcagcggcgcccctcctcccagcggcggcagcccagccggctccccaacctctaccgaggagggcacctctgagtccgccacccccgagagcggccctggcacctccaccgagcccagcgagggcagcgcacccggcagccctgccggcagccccacctccacagaggagggaaccagcaccgagcccagcgaaggcagcgccccaggcaccagcaccgagcctagtgagcaggagattaaacggatcaacaagatcagaagaagacttgtgaaagacagcaacaccaagaaggccggcaagacaggccccatgaaaaccctgctggttagagtgatgacacccgatctgagagagcggctggaaaacctgagaaagaagcctgaaaatatcccccagcccatcagcaatacatctagagccaacctgaataagctgctgaccgattacaccgaaatgaagaaggcgatcctgcatgtgtactgggaagagttccagaaggaccctgtgggcctgatgagccgggtggcccagcctgccagcaagaagatcgatcagaacaagctgaaacctgagatggacgagaagggcaacctgaccaccgccggctttgcctgctctcagtgtggccagcccctgttcgtgtacaagctggagcaggtgtctgagaagggcaaggcttacaccaactacttcggacggtgcaatgtggccgagcacgaaaagctgatcctgctggcccagctgaagcccgagaaggatagcgacgaagccgtgacatatagcctgggaaagtttgggcagagggccctggatttctacagcattcatgtgaccaaggagtccacccaccccgtgaagcccctggcccagatcgccggaaacagatacgcctccggacctgtgggaaaggccctgagcgacgcatgtatgggcacaatcgcctccttcctgtctaagtaccaggacatcatcatcgaacaccagaaggtggtgaagggcaaccagaagagactggagagcctgcgggagctggccggcaaggaaaacctggaataccctagcgtgaccctgccacctcagcctcacaccaaggagggcgttgatgcctacaacgaagtgatcgcccgggtgcgaatgtgggtgaacctgaacctgtggcagaagctgaagctaagcagagatgatgccaagcctctgctgagactgaagggattcccttcctttcctctggtcgagagacaggccaacgaagtggactggtgggacatggtgtgtaacgtgaagaagctgatcaacgagaaaaaggaggatggcaaggtgttttggcagaatctggctggctacaagagacaggaagccctgagaccatacctgagcagcgaggaagatcggaagaagggaaagaaattcgctcggtaccagctgggcgacctgctgctgcacctggaaaagaagcacggcgaggactggggaaaggtgtacgacgaggcctgggagcggattgacaagaaagtggaaggcctgagcaagcacatcaagctggaagaggaacggagaagcgaggacgcccagagcaaggccgccctgaccgactggctgcgggctaaggccagcttcgtgatcgagggcctgaaggaggccgacaaggacgagttctgcagatgcgagctgaagctgcagaagtggtacggggacctgcggggaaagcccttcgccatcgaagccgagaacagcatcctggacatcagcggcttcagcaagcagtacaactgtgccttcatctggcagaaggacggcgtgaagaagctgaacctgtacctgatcatcaactacttcaagggcggcaagctgcggttcaagaagatcaaacctgaagccttcgaagccaacagattctacaccgtgatcaacaaaaagagcggcgagatcgtgcccatggaggtgaacttcaacttcgacgaccccaacctgatcatcctgcctctggcctttggcaagagacagggcagagaattcatctggaacgacctgctgtccctggaaaccggcagcctgaagctggccaacggaagagtgatcgagaagacactgtacaacagaagaacccggcaggatgagcctgccctgttcgtggccctgaccttcgagcggcgggaggtcctggactcctccaatatcaaaccaatgaacctgatcggcgtggcaagaggcgaaaacatccccgccgtgatcgccctgaccgaccccgagggctgcccactgagccggtttaaggatagcctgggaaacccaacccacatcctgagaatcggcgagagctataaggagaagcagcggaccatccaggccaagaaggaggtggagcagcggagagccggcggctacagccggaagtacgccagcaaagccaagaatctggcagacgatatggtgagaaacaccgctagagatctgctgtactacgccgtgacccaggatgccatgctgatcttcgccaacctgagccggggcttcggccggcagggcaagcggaccttcatggccgagagacagtacacacggatggaggactggctgaccgccaagctggcctacgagggcctgagcaagacctacctgtccaagacactggcccagtacacctccaagacatgcagcaactgtgggtttaccatcaccagcgccgactacgacagggtgctggagaagctgaagaagacagcaacaggctggatgaccacaattaacggcaaggagctgaaggtggagggccagattacctactacaacagatacaagagacagaacgtagtcaaggacctgtccgtcgagctggatagactgagcgaagaatctgtgaacaacgacatctcctcctggacaaagggcagaagcggagaagctctgagcctcctgaagaaaagattctcccatagacccgtgcaggagaagttcgtgtgcctgaactgcggcttcgagacacacgcagccgagcaagccgccctgaacatcgccagatcctggctgttcctgcggagccaggagtacaagaaataccagacaaacaagacaaccggcaacaccgataagagagccttcgtcgagacctggcagtccttttaccggaagaagcttaaggaggtgtggaaacctgccgtgcggtctggcggatctggcggaggctcctccccagaagagcgtgaccttcgaggacgtggccgtgtacttcacccagaccgagtgggacggcctgagccccgcccagagggccctgtacagggacgtgatgctggagaactacggcaacgtggccagcctgggcttcagcctgctgaagcccgccgtgatcagccagctggagggcgccggcgagctgggcggccccagccccctggtggacggcaccgagaccggcccccagggcctgtggggatctggctccggcagcggccccaagaaaaagagaaaagtctaagctgccttctgcggggcttgccttctggccatgcccttcttctctcccttgcacctgtacctcttggtctttgaataaagcctgagtaggaaggctagcaaaaaaaaaaaaaaaaaaaaaaaaaaaaaaaaaaaaaaaaaaaaaaaaaaaaaaaaaaaaaaaaaaaaaaaaaaaaaaaa

SEQ ID NO: 15321 - RNA, 9485 nt, synthetic construct
  source 1..9485: mol_type = other RNA
aggaaataagagagaaaagaagagtaagaagaaatataagagccaccatggcccctaagaagaagcgtaaagtgagccggatggaacgcctcgtctacgaggtgcggcagaagtgcagaaacatcgaggacatctgcatctcctgcggatctctgaacgtgaccctggagcacccactgttcatcggcggcatgtgccagaactgtaaaaactgttttctggagtgtgcctatcaatacgacgatgacggctaccagagctactgcaccatctgttgcggcggaagagaggtgctgatgtgtggaaataacaactgctgccggtgcttctgcgtggaatgcgtggacctgctggtgggccccggcgccgcccaggccgctattaaggaagatccttggaactgctacatgtgcggccacaagggcacatacggcctgctgagacggagagaggactggcctagcagactgcagatgttcttcgccaataaccacgaccaggagttcgacccccctaaggtgtaccctcccgtccccgccgagaagagaaagcccatccgggtcctgagcctgttcgatggcatcgccaccggtctgctggtgctgaaggacctgggcatccaggtggataggtacattgcctccgaggtgtgcgaggactccatcaccgtgggaatggtgcgtcatcagggcaagatcatgtacgtgggcgacgtgcggagcgtgacacagaagcatatccaggagtggggccctttcgacctggtgatcggcggcagcccttgcaatgacctgagcatcgtgaacccagcccggaagggcctgtacgagggaaccggcagactgttcttcgagttttacagactgctgcacgacgcccggcctaaggaaggcgacgaccggcccttcttttggctgttcgagaatgtggtggccatgggagtcagcgacaagcgggatattagccggttcctggagagcaaccccgtgatgatcgatgccaaggaagtgagcgccgcccaccgggccagatacttctggggcaatctgcctggcatgaacagacccctggccagcaccgtgaacgacaagctggagctgcaggagtgcctggagcacggccggatcgccaagttcagcaaggtgagaaccatcaccacccgaagcaacagcatcaaacaaggcaaggaccagcactttcctgtgttcatgaacgagaaggaggacatcctgtggtgtaccgagatggagagagtgttcgggttcccagtccactacacagatgtcagcaacatgtctagactggccagacagagactgctgggaagaagctggtccgtccctgtgatcagacacctgttcgcccctctgaaggagtacttcgcctgcgtgagcagcggcaacagcaacgccaacagccggggccccagcttctctagcggcctggtgccactgtccctgagagggagccacatgggccccatggagatctacaaaaccgtgagcgcctggaagcggcagcctgtgcgcgtgctgagcctgtttcggaatatcgataaagtcctgaaaagcctgggattcctggagagcggctctggctccggcggtggcaccctgaagtacgtggaggatgtgacaaacgtggtcagacgggatgtggagaagtggggccccttcgatctggtgtacggcagcacccaacccctgggcagctcttgtgaccggtgccctggctggtacatgtttcagttccaccggatcctgcagtacgccctgccgagacaggagtcccagcggccattcttttggattttcatggacaacttgctgctgaccgaggatgaccaggaaactaccactcggttcctgcagaccgaagccgtgaccctgcaggacgtgagaggccgggactaccagaacgccatgcgggtgtggtccaacatccctggactgaaaagcaagcacgcacctctgacccctaaagaagaggagtacctgcaggcccaggtgcggagcagaagcaagctggacgcccctaaggtggatctgctggtgaagaattgcctcctgcccctgagagagtacttcaagtatttcagccagaatagtctgcccctgggaggcagcggcggcggcgccctggtgacatttgaggacgtcgccgtgcggttcacccaggaggaatgggctctgctggatccttctcagaaaatcctgtaccgggacgtgatgagagagacataccggaatctgacctccgtgggcatcaactgggaatgttgggaccttgaagcctgcttcagaagcctgggaagaaacctgagagtgcaggtggtgaagagaaagtgcgagctgaccaacagcggcccctgcgccgagggcggcccaagcagcggcgcccctcctcccagcggcggcagcccagccggctccccaacctctaccgaggagggcacctctgagtccgccacccccgagagcggccctggcacctccaccgagcccagcgagggcagcgcacccggcagccctgccggcagccccacctccacagaggagggaaccagcaccgagcccagcgaaggcagcgccccaggcaccagcaccgagcctagtgagcaggagattaaacggatcaacaagatcagaagaagacttgtgaaagacagcaacaccaagaaggccggcaagacaggccccatgaaaaccctgctggttagagtgatgacacccgatctgagagagcggctggaaaacctgagaaagaagcctgaaaatatcccccagcccatcagcaatacatctagagccaacctgaataagctgctgaccgattacaccgaaatgaagaaggcgatcctgcatgtgtactgggaagagttccagaaggaccctgtgggcctgatgagccgggtggcccagcctgccagcaagaagatcgatcagaacaagctgaaacctgagatggacgagaagggcaacctgaccaccgccggctttgcctgctctcagtgtggccagcccctgttcgtgtacaagctggagcaggtgtctgagaagggcaaggcttacaccaactacttcggacggtgcaatgtggccgagcacgaaaagctgatcctgctggcccagctgaagcccgagaaggatagcgacgaagccgtgacatatagcctgggaaagtttgggcagagggccctggatttctacagcattcatgtgaccaaggagtccacccaccccgtgaagcccctggcccagatcgccggaaacagatacgcctccggacctgtgggaaaggccctgagcgacgcatgtatgggcacaatcgcctccttcctgtctaagtaccaggacatcatcatcgaacaccagaaggtggtgaagggcaaccagaagagactggagagcctgcgggagctggccggcaaggaaaacctggaataccctagcgtgaccctgccacctcagcctcacaccaaggagggcgttgatgcctacaacgaagtgatcgcccgggtgcgaatgtgggtgaacctgaacctgtggcagaagctgaagctaagcagagatgatgccaagcctctgctgagactgaagggattcccttcctttcctctggtcgagagacaggccaacgaagtggactggtgggacatggtgtgtaacgtgaagaagctgatcaacgagaaaaaggaggatggcaaggtgttttggcagaatctggctggctacaagagacaggaagccctgagaccatacctgagcagcgaggaagatcggaagaagggaaagaaattcgctcggtaccagctgggcgacctgctgctgcacctggaaaagaagcacggcgaggactggggaaaggtgtacgacgaggcctgggagcggattgacaagaaagtggaaggcctgagcaagcacatcaagctggaagaggaacggagaagcgaggacgcccagagcaaggccgccctgaccgactggctgcgggctaaggccagcttcgtgatcgagggcctgaaggaggccgacaaggacgagttctgcagatgcgagctgaagctgcagaagtggtacggggacctgcggggaaagcccttcgccatcgaagccgagaacagcatcctggacatcagcggcttcagcaagcagtacaactgtgccttcatctggcagaaggacggcgtgaagaagctgaacctgtacctgatcatcaactacttcaagggcggcaagctgcggttcaagaagatcaaacctgaagccttcgaagccaacagattctacaccgtgatcaacaaaaagagcggcgagatcgtgcccatggaggtgaacttcaacttcgacgaccccaacctgatcatcctgcctctggcctttggcaagagacagggcagagaattcatctggaacgacctgctgtccctggaaaccggcagcctgaagctggccaacggaagagtgatcgagaagacactgtacaacagaagaacccggcaggatgagcctgccctgttcgtggccctgaccttcgagcggcgggaggtcctggactcctccaatatcaaaccaatgaacctgatcggcgtggcaagaggcgaaaacatccccgccgtgatcgccctgaccgaccccgagggctgcccactgagccggtttaaggatagcctgggaaacccaacccacatcctgagaatcggcgagagctataaggagaagcagcggaccatccaggccaagaaggaggtggagcagcggagagccggcggctacagccggaagtacgccagcaaagccaagaatctggcagacgatatggtgagaaacaccgctagagatctgctgtactacgccgtgacccaggatgccatgctgatcttcgccaacctgagccggggcttcggccggcagggcaagcggaccttcatggccgagagacagtacacacggatggaggactggctgaccgccaagctggcctacgagggcctgagcaagacctacctgtccaagacactggcccagtacacctccaagacatgcagcaactgtgggtttaccatcaccagcgccgactacgacagggtgctggagaagctgaagaagacagcaacaggctggatgaccacaattaacggcaaggagctgaaggtggagggccagattacctactacaacagatacaagagacagaacgtagtcaaggacctgtccgtcgagctggatagactgagcgaagaatctgtgaacaacgacatctcctcctggacaaagggcagaagcggagaagctctgagcctcctgaagaaaagattctcccatagacccgtgcaggagaagttcgtgtgcctgaactgcggcttcgagacacacgcagccgagcaagccgccctgaacatcgccagatcctggctgttcctgcggagccaggagtacaagaaataccagacaaacaagacaaccggcaacaccgataagagagccttcgtcgagacctggcagtccttttaccggaagaagcttaaggaggtgtggaaacctgccgtgcggtctggcggatctggcggaggctccttccaggcccccgtgaccttcggcgacctggccatctacttcagccaggaggagtgggagtgcctgagccccatccagaaggacctgtacgaggacgtgatgctggagaactaccagaacctggtgagcctgggcctgagcttcaggaggcccaacgtgatcaccctgctggagaagggcaaggccccctggatggtggagcccgtgaagaggaggaggggcctggacctgggcagcaagtgcggcggcccaagcagcggcgcccctcctcccagcggcggcagcccagccggctccccaacctctaccgaggagggcacctctgagtccgccacccccgagagcggccctggcacctccaccgagcccagcgagggcagcgcacccggcagccctgccggcagccccacctccacagaggagggaaccagcaccgagcccagcgaaggcagcgccccaggcaccagcaccgagcctagtgagcaggagattaaacggatcaacaagatcagaagaagacttgtgaaagacagcaacaccaagaaggccggcaagacaggccccatgaaaaccctgctggttagagtgatgacacccgatctgagagagcggctggaaaacctgagaaagaagcctgaaaatatcccccagcccatcagcaatacatctagagccaacctgaataagctgctgaccgattacaccgaaatgaagaaggcgatcctgcatgtgtactgggaagagttccagaaggaccctgtgggcctgatgagccgggtggcccagcctgccagcaagaagatcgatcagaacaagctgaaacctgagatggacgagaagggcaacctgaccaccgccggctttgcctgctctcagtgtggccagcccctgttcgtgtacaagctggagcaggtgtctgagaagggcaaggcttacaccaactacttcggacggtgcaatgtggccgagcacgaaaagctgatcctgctggcccagctgaagcccgagaaggatagcgacgaagccgtgacatatagcctgggaaagtttgggcagagggccctggatttctacagcattcatgtgaccaaggagtccacccaccccgtgaagcccctggcccagatcgccggaaacagatacgcctccggacctgtgggaaaggccctgagcgacgcatgtatgggcacaatcgcctccttcctgtctaagtaccaggacatcatcatcgaacaccagaaggtggtgaagggcaaccagaagagactggagagcctgcgggagctggccggcaaggaaaacctggaataccctagcgtgaccctgccacctcagcctcacaccaaggagggcgttgatgcctacaacgaagtgatcgcccgggtgcgaatgtgggtgaacctgaacctgtggcagaagctgaagctaagcagagatgatgccaagcctctgctgagactgaagggattcccttcctttcctctggtcgagagacaggccaacgaagtggactggtgggacatggtgtgtaacgtgaagaagctgatcaacgagaaaaaggaggatggcaaggtgttttggcagaatctggctggctacaagagacaggaagccctgagaccatacctgagcagcgaggaagatcggaagaagggaaagaaattcgctcggtaccagctgggcgacctgctgctgcacctggaaaagaagcacggcgaggactggggaaaggtgtacgacgaggcctgggagcggattgacaagaaagtggaaggcctgagcaagcacatcaagctggaagaggaacggagaagcgaggacgcccagagcaaggccgccctgaccgactggctgcgggctaaggccagcttcgtgatcgagggcctgaaggaggccgacaaggacgagttctgcagatgcgagctgaagctgcagaagtggtacggggacctgcggggaaagcccttcgccatcgaagccgagaacagcatcctggacatcagcggcttcagcaagcagtacaactgtgccttcatctggcagaaggacggcgtgaagaagctgaacctgtacctgatcatcaactacttcaagggcggcaagctgcggttcaagaagatcaaacctgaagccttcgaagccaacagattctacaccgtgatcaacaaaaagagcggcgagatcgtgcccatggaggtgaacttcaacttcgacgaccccaacctgatcatcctgcctctggcctttggcaagagacagggcagagaattcatctggaacgacctgctgtccctggaaaccggcagcctgaagctggccaacggaagagtgatcgagaagacactgtacaacagaagaacccggcaggatgagcctgccctgttcgtggccctgaccttcgagcggcgggaggtcctggactcctccaatatcaaaccaatgaacctgatcggcgtggcaagaggcgaaaacatccccgccgtgatcgccctgaccgaccccgagggctgcccactgagccggtttaaggatagcctgggaaacccaacccacatcctgagaatcggcgagagctataaggagaagcagcggaccatccaggccaagaaggaggtggagcagcggagagccggcggctacagccggaagtacgccagcaaagccaagaatctggcagacgatatggtgagaaacaccgctagagatctgctgtactacgccgtgacccaggatgccatgctgatcttcgccaacctgagccggggcttcggccggcagggcaagcggaccttcatggccgagagacagtacacacggatggaggactggctgaccgccaagctggcctacgagggcctgagcaagacctacctgtccaagacactggcccagtacacctccaagacatgcagcaactgtgggtttaccatcaccagcgccgactacgacagggtgctggagaagctgaagaagacagcaacaggctggatgaccacaattaacggcaaggagctgaaggtggagggccagattacctactacaacagatacaagagacagaacgtagtcaaggacctgtccgtcgagctggatagactgagcgaagaatctgtgaacaacgacatctcctcctggacaaagggcagaagcggagaagctctgagcctcctgaagaaaagattctcccatagacccgtgcaggagaagttcgtgtgcctgaactgcggcttcgagacacacgcagccgagcaagccgccctgaacatcgccagatcctggctgttcctgcggagccaggagtacaagaaataccagacaaacaagacaaccggcaacaccgataagagagccttcgtcgagacctggcagtccttttaccggaagaagcttaaggaggtgtggaaacctgccgtgcggtctggcggatctggcggaggctcctttccaggcccccgtgaccttcggcgacctggccatctacttcagccaggaggagtgggagtgcctgagccccatccagaaggacctgtacgaggacgtgatgctggagaactaccagaacctggtgagcctgggcctgagcttcaggaggcccaacgtgatcaccctgctggagaagggcaaggccccctggatggtggagcccgtgaagaggaggaggggcctggacctgggcagcaagtgcggatctggctccggcagcggccccaagaaaaagagaaaagtctaagctgccttctgcggggcttgccttctggccatgcccttcttctctcccttgcacctgtacctcttggtctttgaataaagcctgagtaggaaggctagcaaaaaaaaaaaaaaaaaaaaaaaaaaaaaaaaaaaaaaaaaaaaaaaaaaaaaaaaaaaaaaaaaaaaaaaaaaaaaaaa

SEQ ID NO: 15322 - RNA, 9485 nt, synthetic construct
  source 1..9485: mol_type = other RNA
aggaaataagagagaaaagaagagtaagaagaaatataagagccaccatggcccctaagaagaagcgtaaagtgagccggatggaacgcctcgtctacgaggtgcggcagaagtgcagaaacatcgaggacatctgcatctcctgcggatctctgaacgtgaccctggagcacccactgttcatcggcggcatgtgccagaactgtaaaaactgttttctggagtgtgcctatcaatacgacgatgacggctaccagagctactgcaccatctgttgcggcggaagagaggtgctgatgtgtggaaataacaactgctgccggtgcttctgcgtggaatgcgtggacctgctggtgggccccggcgccgcccaggccgctattaaggaagatccttggaactgctacatgtgcggccacaagggcacatacggcctgctgagacggagagaggactggcctagcagactgcagatgttcttcgccaataaccacgaccaggagttcgacccccctaaggtgtaccctcccgtccccgccgagaagagaaagcccatccgggtcctgagcctgttcgatggcatcgccaccggtctgctggtgctgaaggacctgggcatccaggtggataggtacattgcctccgaggtgtgcgaggactccatcaccgtgggaatggtgcgtcatcagggcaagatcatgtacgtgggcgacgtgcggagcgtgacacagaagcatatccaggagtggggccctttcgacctggtgatcggcggcagcccttgcaatgacctgagcatcgtgaacccagcccggaagggcctgtacgagggaaccggcagactgttcttcgagttttacagactgctgcacgacgcccggcctaaggaaggcgacgaccggcccttcttttggctgttcgagaatgtggtggccatgggagtcagcgacaagcgggatattagccggttcctggagagcaaccccgtgatgatcgatgccaaggaagtgagcgccgcccaccgggccagatacttctggggcaatctgcctggcatgaacagacccctggccagcaccgtgaacgacaagctggagctgcaggagtgcctggagcacggccggatcgccaagttcagcaaggtgagaaccatcaccacccgaagcaacagcatcaaacaaggcaaggaccagcactttcctgtgttcatgaacgagaaggaggacatcctgtggtgtaccgagatggagagagtgttcgggttcccagtccactacacagatgtcagcaacatgtctagactggccagacagagactgctgggaagaagctggtccgtccctgtgatcagacacctgttcgcccctctgaaggagtacttcgcctgcgtgagcagcggcaacagcaacgccaacagccggggccccagcttctctagcggcctggtgccactgtccctgagagggagccacatgggccccatggagatctacaaaaccgtgagcgcctggaagcggcagcctgtgcgcgtgctgagcctgtttcggaatatcgataaagtcctgaaaagcctgggattcctggagagcggctctggctccggcggtggcaccctgaagtacgtggaggatgtgacaaacgtggtcagacgggatgtggagaagtggggccccttcgatctggtgtacggcagcacccaacccctgggcagctcttgtgaccggtgccctggctggtacatgtttcagttccaccggatcctgcagtacgccctgccgagacaggagtcccagcggccattcttttggattttcatggacaacttgctgctgaccgaggatgaccaggaaactaccactcggttcctgcagaccgaagccgtgaccctgcaggacgtgagaggccgggactaccagaacgccatgcgggtgtggtccaacatccctggactgaaaagcaagcacgcacctctgacccctaaagaagaggagtacctgcaggcccaggtgcggagcagaagcaagctggacgcccctaaggtggatctgctggtgaagaattgcctcctgcccctgagagagtacttcaagtatttcagccagaatagtctgcccctgggaggcagcggcggcggcgccctggtgacatttgaggacgtcgccgtgcggttcacccaggaggaatgggctctgctggatccttctcagaaaatcctgtaccgggacgtgatgagagagacataccggaatctgacctccgtgggcatcaactgggaatgttgggaccttgaagcctgcttcagaagcctgggaagaaacctgagagtgcaggtggtgaagagaaagtgcgagctgaccaacagcggcccctgcgccgagggcggcccaagcagcggcgcccctcctcccagcggcggcagcccagccggctccccaacctctaccgaggagggcacctctgagtccgccacccccgagagcggccctggcacctccaccgagcccagcgagggcagcgcacccggcagccctgccggcagccccacctccacagaggagggaaccagcaccgagcccagcgaaggcagcgccccaggcaccagcaccgagcctagtgagcaggagattaaacggatcaacaagatcagaagaagacttgtgaaagacagcaacaccaagaaggccggcaagacaggccccatgaaaaccctgctggttagagtgatgacacccgatctgagagagcggctggaaaacctgagaaagaagcctgaaaatatcccccagcccatcagcaatacatctagagccaacctgaataagctgctgaccgattacaccgaaatgaagaaggcgatcctgcatgtgtactgggaagagttccagaaggaccctgtgggcctgatgagccgggtggcccagcctgccagcaagaagatcgatcagaacaagctgaaacctgagatggacgagaagggcaacctgaccaccgccggctttgcctgctctcagtgtggccagcccctgttcgtgtacaagctggagcaggtgtctgagaagggcaaggcttacaccaactacttcggacggtgcaatgtggccgagcacgaaaagctgatcctgctggcccagctgaagcccgagaaggatagcgacgaagccgtgacatatagcctgggaaagtttgggcagagggccctggatttctacagcattcatgtgaccaaggagtccacccaccccgtgaagcccctggcccagatcgccggaaacagatacgcctccggacctgtgggaaaggccctgagcgacgcatgtatgggcacaatcgcctccttcctgtctaagtaccaggacatcatcatcgaacaccagaaggtggtgaagggcaaccagaagagactggagagcctgcgggagctggccggcaaggaaaacctggaataccctagcgtgaccctgccacctcagcctcacaccaaggagggcgttgatgcctacaacgaagtgatcgcccgggtgcgaatgtgggtgaacctgaacctgtggcagaagctgaagctaagcagagatgatgccaagcctctgctgagactgaagggattcccttcctttcctctggtcgagagacaggccaacgaagtggactggtgggacatggtgtgtaacgtgaagaagctgatcaacgagaaaaaggaggatggcaaggtgttttggcagaatctggctggctacaagagacaggaagccctgagaccatacctgagcagcgaggaagatcggaagaagggaaagaaattcgctcggtaccagctgggcgacctgctgctgcacctggaaaagaagcacggcgaggactggggaaaggtgtacgacgaggcctgggagcggattgacaagaaagtggaaggcctgagcaagcacatcaagctggaagaggaacggagaagcgaggacgcccagagcaaggccgccctgaccgactggctgcgggctaaggccagcttcgtgatcgagggcctgaaggaggccgacaaggacgagttctgcagatgcgagctgaagctgcagaagtggtacggggacctgcggggaaagcccttcgccatcgaagccgagaacagcatcctggacatcagcggcttcagcaagcagtacaactgtgccttcatctggcagaaggacggcgtgaagaagctgaacctgtacctgatcatcaactacttcaagggcggcaagctgcggttcaagaagatcaaacctgaagccttcgaagccaacagattctacaccgtgatcaacaaaaagagcggcgagatcgtgcccatggaggtgaacttcaacttcgacgaccccaacctgatcatcctgcctctggcctttggcaagagacagggcagagaattcatctggaacgacctgctgtccctggaaaccggcagcctgaagctggccaacggaagagtgatcgagaagacactgtacaacagaagaacccggcaggatgagcctgccctgttcgtggccctgaccttcgagcggcgggaggtcctggactcctccaatatcaaaccaatgaacctgatcggcgtggcaagaggcgaaaacatccccgccgtgatcgccctgaccgaccccgagggctgcccactgagccggtttaaggatagcctgggaaacccaacccacatcctgagaatcggcgagagctataaggagaagcagcggaccatccaggccaagaaggaggtggagcagcggagagccggcggctacagccggaagtacgccagcaaagccaagaatctggcagacgatatggtgagaaacaccgctagagatctgctgtactacgccgtgacccaggatgccatgctgatcttcgccaacctgagccggggcttcggccggcagggcaagcggaccttcatggccgagagacagtacacacggatggaggactggctgaccgccaagctggcctacgagggcctgagcaagacctacctgtccaagacactggcccagtacacctccaagacatgcagcaactgtgggtttaccatcaccagcgccgactacgacagggtgctggagaagctgaagaagacagcaacaggctggatgaccacaattaacggcaaggagctgaaggtggagggccagattacctactacaacagatacaagagacagaacgtagtcaaggacctgtccgtcgagctggatagactgagcgaagaatctgtgaacaacgacatctcctcctggacaaagggcagaagcggagaagctctgagcctcctgaagaaaagattctcccatagacccgtgcaggagaagttcgtgtgcctgaactgcggcttcgagacacacgcagccgagcaagccgccctgaacatcgccagatcctggctgttcctgcggagccaggagtacaagaaataccagacaaacaagacaaccggcaacaccgataagagagccttcgtcgagacctggcagtccttttaccggaagaagcttaaggaggtgtggaaacctgccgtgcggtctggcggatctggcggaggctccatggccctgaggagcgtgatcttcagcgacatcagcatcgacttcagccccgaggagtgggagtacctggacctggagcagaaggacctgtacagggacgtgatgctggagaactacagcaacctggtgagcctgggctgcttcatcagcaagcccgacgtgatcagcctgctggagcagggcaaggagccctggaaggtggtgaggaagaggaggaggcagtaccccgacctggagaccaagggcggcccaagcagcggcgcccctcctcccagcggcggcagcccagccggctccccaacctctaccgaggagggcacctctgagtccgccacccccgagagcggccctggcacctccaccgagcccagcgagggcagcgcacccggcagccctgccggcagccccacctccacagaggagggaaccagcaccgagcccagcgaaggcagcgccccaggcaccagcaccgagcctagtgagcaggagattaaacggatcaacaagatcagaagaagacttgtgaaagacagcaacaccaagaaggccggcaagacaggccccatgaaaaccctgctggttagagtgatgacacccgatctgagagagcggctggaaaacctgagaaagaagcctgaaaatatcccccagcccatcagcaatacatctagagccaacctgaataagctgctgaccgattacaccgaaatgaagaaggcgatcctgcatgtgtactgggaagagttccagaaggaccctgtgggcctgatgagccgggtggcccagcctgccagcaagaagatcgatcagaacaagctgaaacctgagatggacgagaagggcaacctgaccaccgccggctttgcctgctctcagtgtggccagcccctgttcgtgtacaagctggagcaggtgtctgagaagggcaaggcttacaccaactacttcggacggtgcaatgtggccgagcacgaaaagctgatcctgctggcccagctgaagcccgagaaggatagcgacgaagccgtgacatatagcctgggaaagtttgggcagagggccctggatttctacagcattcatgtgaccaaggagtccacccaccccgtgaagcccctggcccagatcgccggaaacagatacgcctccggacctgtgggaaaggccctgagcgacgcatgtatgggcacaatcgcctccttcctgtctaagtaccaggacatcatcatcgaacaccagaaggtggtgaagggcaaccagaagagactggagagcctgcgggagctggccggcaaggaaaacctggaataccctagcgtgaccctgccacctcagcctcacaccaaggagggcgttgatgcctacaacgaagtgatcgcccgggtgcgaatgtgggtgaacctgaacctgtggcagaagctgaagctaagcagagatgatgccaagcctctgctgagactgaagggattcccttcctttcctctggtcgagagacaggccaacgaagtggactggtgggacatggtgtgtaacgtgaagaagctgatcaacgagaaaaaggaggatggcaaggtgttttggcagaatctggctggctacaagagacaggaagccctgagaccatacctgagcagcgaggaagatcggaagaagggaaagaaattcgctcggtaccagctgggcgacctgctgctgcacctggaaaagaagcacggcgaggactggggaaaggtgtacgacgaggcctgggagcggattgacaagaaagtggaaggcctgagcaagcacatcaagctggaagaggaacggagaagcgaggacgcccagagcaaggccgccctgaccgactggctgcgggctaaggccagcttcgtgatcgagggcctgaaggaggccgacaaggacgagttctgcagatgcgagctgaagctgcagaagtggtacggggacctgcggggaaagcccttcgccatcgaagccgagaacagcatcctggacatcagcggcttcagcaagcagtacaactgtgccttcatctggcagaaggacggcgtgaagaagctgaacctgtacctgatcatcaactacttcaagggcggcaagctgcggttcaagaagatcaaacctgaagccttcgaagccaacagattctacaccgtgatcaacaaaaagagcggcgagatcgtgcccatggaggtgaacttcaacttcgacgaccccaacctgatcatcctgcctctggcctttggcaagagacagggcagagaattcatctggaacgacctgctgtccctggaaaccggcagcctgaagctggccaacggaagagtgatcgagaagacactgtacaacagaagaacccggcaggatgagcctgccctgttcgtggccctgaccttcgagcggcgggaggtcctggactcctccaatatcaaaccaatgaacctgatcggcgtggcaagaggcgaaaacatccccgccgtgatcgccctgaccgaccccgagggctgcccactgagccggtttaaggatagcctgggaaacccaacccacatcctgagaatcggcgagagctataaggagaagcagcggaccatccaggccaagaaggaggtggagcagcggagagccggcggctacagccggaagtacgccagcaaagccaagaatctggcagacgatatggtgagaaacaccgctagagatctgctgtactacgccgtgacccaggatgccatgctgatcttcgccaacctgagccggggcttcggccggcagggcaagcggaccttcatggccgagagacagtacacacggatggaggactggctgaccgccaagctggcctacgagggcctgagcaagacctacctgtccaagacactggcccagtacacctccaagacatgcagcaactgtgggtttaccatcaccagcgccgactacgacagggtgctggagaagctgaagaagacagcaacaggctggatgaccacaattaacggcaaggagctgaaggtggagggccagattacctactacaacagatacaagagacagaacgtagtcaaggacctgtccgtcgagctggatagactgagcgaagaatctgtgaacaacgacatctcctcctggacaaagggcagaagcggagaagctctgagcctcctgaagaaaagattctcccatagacccgtgcaggagaagttcgtgtgcctgaactgcggcttcgagacacacgcagccgagcaagccgccctgaacatcgccagatcctggctgttcctgcggagccaggagtacaagaaataccagacaaacaagacaaccggcaacaccgataagagagccttcgtcgagacctggcagtccttttaccggaagaagcttaaggaggtgtggaaacctgccgtgcggtctggcggatctggcggaggctcctatggccctgaggagcgtgatcttcagcgacatcagcatcgacttcagccccgaggagtgggagtacctggacctggagcagaaggacctgtacagggacgtgatgctggagaactacagcaacctggtgagcctgggctgcttcatcagcaagcccgacgtgatcagcctgctggagcagggcaaggagccctggaaggtggtgaggaagaggaggaggcagtaccccgacctggagaccaagggatctggctccggcagcggccccaagaaaaagagaaaagtctaagctgccttctgcggggcttgccttctggccatgcccttcttctctcccttgcacctgtacctcttggtctttgaataaagcctgagtaggaaggctagcaaaaaaaaaaaaaaaaaaaaaaaaaaaaaaaaaaaaaaaaaaaaaaaaaaaaaaaaaaaaaaaaaaaaaaaaaaaaaaaa

SEQ ID NO: 15323 - RNA, 9485 nt, synthetic construct
  source 1..9485: mol_type = other RNA
aggaaataagagagaaaagaagagtaagaagaaatataagagccaccatggcccctaagaagaagcgtaaagtgagccggatggaacgcctcgtctacgaggtgcggcagaagtgcagaaacatcgaggacatctgcatctcctgcggatctctgaacgtgaccctggagcacccactgttcatcggcggcatgtgccagaactgtaaaaactgttttctggagtgtgcctatcaatacgacgatgacggctaccagagctactgcaccatctgttgcggcggaagagaggtgctgatgtgtggaaataacaactgctgccggtgcttctgcgtggaatgcgtggacctgctggtgggccccggcgccgcccaggccgctattaaggaagatccttggaactgctacatgtgcggccacaagggcacatacggcctgctgagacggagagaggactggcctagcagactgcagatgttcttcgccaataaccacgaccaggagttcgacccccctaaggtgtaccctcccgtccccgccgagaagagaaagcccatccgggtcctgagcctgttcgatggcatcgccaccggtctgctggtgctgaaggacctgggcatccaggtggataggtacattgcctccgaggtgtgcgaggactccatcaccgtgggaatggtgcgtcatcagggcaagatcatgtacgtgggcgacgtgcggagcgtgacacagaagcatatccaggagtggggccctttcgacctggtgatcggcggcagcccttgcaatgacctgagcatcgtgaacccagcccggaagggcctgtacgagggaaccggcagactgttcttcgagttttacagactgctgcacgacgcccggcctaaggaaggcgacgaccggcccttcttttggctgttcgagaatgtggtggccatgggagtcagcgacaagcgggatattagccggttcctggagagcaaccccgtgatgatcgatgccaaggaagtgagcgccgcccaccgggccagatacttctggggcaatctgcctggcatgaacagacccctggccagcaccgtgaacgacaagctggagctgcaggagtgcctggagcacggccggatcgccaagttcagcaaggtgagaaccatcaccacccgaagcaacagcatcaaacaaggcaaggaccagcactttcctgtgttcatgaacgagaaggaggacatcctgtggtgtaccgagatggagagagtgttcgggttcccagtccactacacagatgtcagcaacatgtctagactggccagacagagactgctgggaagaagctggtccgtccctgtgatcagacacctgttcgcccctctgaaggagtacttcgcctgcgtgagcagcggcaacagcaacgccaacagccggggccccagcttctctagcggcctggtgccactgtccctgagagggagccacatgggccccatggagatctacaaaaccgtgagcgcctggaagcggcagcctgtgcgcgtgctgagcctgtttcggaatatcgataaagtcctgaaaagcctgggattcctggagagcggctctggctccggcggtggcaccctgaagtacgtggaggatgtgacaaacgtggtcagacgggatgtggagaagtggggccccttcgatctggtgtacggcagcacccaacccctgggcagctcttgtgaccggtgccctggctggtacatgtttcagttccaccggatcctgcagtacgccctgccgagacaggagtcccagcggccattcttttggattttcatggacaacttgctgctgaccgaggatgaccaggaaactaccactcggttcctgcagaccgaagccgtgaccctgcaggacgtgagaggccgggactaccagaacgccatgcgggtgtggtccaacatccctggactgaaaagcaagcacgcacctctgacccctaaagaagaggagtacctgcaggcccaggtgcggagcagaagcaagctggacgcccctaaggtggatctgctggtgaagaattgcctcctgcccctgagagagtacttcaagtatttcagccagaatagtctgcccctgggaggcagcggcggcggcgccctggtgacatttgaggacgtcgccgtgcggttcacccaggaggaatgggctctgctggatccttctcagaaaatcctgtaccgggacgtgatgagagagacataccggaatctgacctccgtgggcatcaactgggaatgttgggaccttgaagcctgcttcagaagcctgggaagaaacctgagagtgcaggtggtgaagagaaagtgcgagctgaccaacagcggcccctgcgccgagggcggcccaagcagcggcgcccctcctcccagcggcggcagcccagccggctccccaacctctaccgaggagggcacctctgagtccgccacccccgagagcggccctggcacctccaccgagcccagcgagggcagcgcacccggcagccctgccggcagccccacctccacagaggagggaaccagcaccgagcccagcgaaggcagcgccccaggcaccagcaccgagcctagtgagcaggagattaaacggatcaacaagatcagaagaagacttgtgaaagacagcaacaccaagaaggccggcaagacaggccccatgaaaaccctgctggttagagtgatgacacccgatctgagagagcggctggaaaacctgagaaagaagcctgaaaatatcccccagcccatcagcaatacatctagagccaacctgaataagctgctgaccgattacaccgaaatgaagaaggcgatcctgcatgtgtactgggaagagttccagaaggaccctgtgggcctgatgagccgggtggcccagcctgccagcaagaagatcgatcagaacaagctgaaacctgagatggacgagaagggcaacctgaccaccgccggctttgcctgctctcagtgtggccagcccctgttcgtgtacaagctggagcaggtgtctgagaagggcaaggcttacaccaactacttcggacggtgcaatgtggccgagcacgaaaagctgatcctgctggcccagctgaagcccgagaaggatagcgacgaagccgtgacatatagcctgggaaagtttgggcagagggccctggatttctacagcattcatgtgaccaaggagtccacccaccccgtgaagcccctggcccagatcgccggaaacagatacgcctccggacctgtgggaaaggccctgagcgacgcatgtatgggcacaatcgcctccttcctgtctaagtaccaggacatcatcatcgaacaccagaaggtggtgaagggcaaccagaagagactggagagcctgcgggagctggccggcaaggaaaacctggaataccctagcgtgaccctgccacctcagcctcacaccaaggagggcgttgatgcctacaacgaagtgatcgcccgggtgcgaatgtgggtgaacctgaacctgtggcagaagctgaagctaagcagagatgatgccaagcctctgctgagactgaagggattcccttcctttcctctggtcgagagacaggccaacgaagtggactggtgggacatggtgtgtaacgtgaagaagctgatcaacgagaaaaaggaggatggcaaggtgttttggcagaatctggctggctacaagagacaggaagccctgagaccatacctgagcagcgaggaagatcggaagaagggaaagaaattcgctcggtaccagctgggcgacctgctgctgcacctggaaaagaagcacggcgaggactggggaaaggtgtacgacgaggcctgggagcggattgacaagaaagtggaaggcctgagcaagcacatcaagctggaagaggaacggagaagcgaggacgcccagagcaaggccgccctgaccgactggctgcgggctaaggccagcttcgtgatcgagggcctgaaggaggccgacaaggacgagttctgcagatgcgagctgaagctgcagaagtggtacggggacctgcggggaaagcccttcgccatcgaagccgagaacagcatcctggacatcagcggcttcagcaagcagtacaactgtgccttcatctggcagaaggacggcgtgaagaagctgaacctgtacctgatcatcaactacttcaagggcggcaagctgcggttcaagaagatcaaacctgaagccttcgaagccaacagattctacaccgtgatcaacaaaaagagcggcgagatcgtgcccatggaggtgaacttcaacttcgacgaccccaacctgatcatcctgcctctggcctttggcaagagacagggcagagaattcatctggaacgacctgctgtccctggaaaccggcagcctgaagctggccaacggaagagtgatcgagaagacactgtacaacagaagaacccggcaggatgagcctgccctgttcgtggccctgaccttcgagcggcgggaggtcctggactcctccaatatcaaaccaatgaacctgatcggcgtggcaagaggcgaaaacatccccgccgtgatcgccctgaccgaccccgagggctgcccactgagccggtttaaggatagcctgggaaacccaacccacatcctgagaatcggcgagagctataaggagaagcagcggaccatccaggccaagaaggaggtggagcagcggagagccggcggctacagccggaagtacgccagcaaagccaagaatctggcagacgatatggtgagaaacaccgctagagatctgctgtactacgccgtgacccaggatgccatgctgatcttcgccaacctgagccggggcttcggccggcagggcaagcggaccttcatggccgagagacagtacacacggatggaggactggctgaccgccaagctggcctacgagggcctgagcaagacctacctgtccaagacactggcccagtacacctccaagacatgcagcaactgtgggtttaccatcaccagcgccgactacgacagggtgctggagaagctgaagaagacagcaacaggctggatgaccacaattaacggcaaggagctgaaggtggagggccagattacctactacaacagatacaagagacagaacgtagtcaaggacctgtccgtcgagctggatagactgagcgaagaatctgtgaacaacgacatctcctcctggacaaagggcagaagcggagaagctctgagcctcctgaagaaaagattctcccatagacccgtgcaggagaagttcgtgtgcctgaactgcggcttcgagacacacgcagccgagcaagccgccctgaacatcgccagatcctggctgttcctgcggagccaggagtacaagaaataccagacaaacaagacaaccggcaacaccgataagagagccttcgtcgagacctggcagtccttttaccggaagaagcttaaggaggtgtggaaacctgccgtgcggtctggcggatctggcggaggctccgcccacaggagcgtgatgttcaacgacgtgagcatcgacttcagcagggaggagtgggagtacctgaacctggagcagagggacctgtacagggacgtgatgctggagaactacagcaacctggtgagcctgggctacttcatcagcaagcccgacgtgatcagcctgctggagcagggcgaggagccctggaaggtggtgaggaagggcaggaggaggtaccccgacctgaagaccaactacggcggcccaagcagcggcgcccctcctcccagcggcggcagcccagccggctccccaacctctaccgaggagggcacctctgagtccgccacccccgagagcggccctggcacctccaccgagcccagcgagggcagcgcacccggcagccctgccggcagccccacctccacagaggagggaaccagcaccgagcccagcgaaggcagcgccccaggcaccagcaccgagcctagtgagcaggagattaaacggatcaacaagatcagaagaagacttgtgaaagacagcaacaccaagaaggccggcaagacaggccccatgaaaaccctgctggttagagtgatgacacccgatctgagagagcggctggaaaacctgagaaagaagcctgaaaatatcccccagcccatcagcaatacatctagagccaacctgaataagctgctgaccgattacaccgaaatgaagaaggcgatcctgcatgtgtactgggaagagttccagaaggaccctgtgggcctgatgagccgggtggcccagcctgccagcaagaagatcgatcagaacaagctgaaacctgagatggacgagaagggcaacctgaccaccgccggctttgcctgctctcagtgtggccagcccctgttcgtgtacaagctggagcaggtgtctgagaagggcaaggcttacaccaactacttcggacggtgcaatgtggccgagcacgaaaagctgatcctgctggcccagctgaagcccgagaaggatagcgacgaagccgtgacatatagcctgggaaagtttgggcagagggccctggatttctacagcattcatgtgaccaaggagtccacccaccccgtgaagcccctggcccagatcgccggaaacagatacgcctccggacctgtgggaaaggccctgagcgacgcatgtatgggcacaatcgcctccttcctgtctaagtaccaggacatcatcatcgaacaccagaaggtggtgaagggcaaccagaagagactggagagcctgcgggagctggccggcaaggaaaacctggaataccctagcgtgaccctgccacctcagcctcacaccaaggagggcgttgatgcctacaacgaagtgatcgcccgggtgcgaatgtgggtgaacctgaacctgtggcagaagctgaagctaagcagagatgatgccaagcctctgctgagactgaagggattcccttcctttcctctggtcgagagacaggccaacgaagtggactggtgggacatggtgtgtaacgtgaagaagctgatcaacgagaaaaaggaggatggcaaggtgttttggcagaatctggctggctacaagagacaggaagccctgagaccatacctgagcagcgaggaagatcggaagaagggaaagaaattcgctcggtaccagctgggcgacctgctgctgcacctggaaaagaagcacggcgaggactggggaaaggtgtacgacgaggcctgggagcggattgacaagaaagtggaaggcctgagcaagcacatcaagctggaagaggaacggagaagcgaggacgcccagagcaaggccgccctgaccgactggctgcgggctaaggccagcttcgtgatcgagggcctgaaggaggccgacaaggacgagttctgcagatgcgagctgaagctgcagaagtggtacggggacctgcggggaaagcccttcgccatcgaagccgagaacagcatcctggacatcagcggcttcagcaagcagtacaactgtgccttcatctggcagaaggacggcgtgaagaagctgaacctgtacctgatcatcaactacttcaagggcggcaagctgcggttcaagaagatcaaacctgaagccttcgaagccaacagattctacaccgtgatcaacaaaaagagcggcgagatcgtgcccatggaggtgaacttcaacttcgacgaccccaacctgatcatcctgcctctggcctttggcaagagacagggcagagaattcatctggaacgacctgctgtccctggaaaccggcagcctgaagctggccaacggaagagtgatcgagaagacactgtacaacagaagaacccggcaggatgagcctgccctgttcgtggccctgaccttcgagcggcgggaggtcctggactcctccaatatcaaaccaatgaacctgatcggcgtggcaagaggcgaaaacatccccgccgtgatcgccctgaccgaccccgagggctgcccactgagccggtttaaggatagcctgggaaacccaacccacatcctgagaatcggcgagagctataaggagaagcagcggaccatccaggccaagaaggaggtggagcagcggagagccggcggctacagccggaagtacgccagcaaagccaagaatctggcagacgatatggtgagaaacaccgctagagatctgctgtactacgccgtgacccaggatgccatgctgatcttcgccaacctgagccggggcttcggccggcagggcaagcggaccttcatggccgagagacagtacacacggatggaggactggctgaccgccaagctggcctacgagggcctgagcaagacctacctgtccaagacactggcccagtacacctccaagacatgcagcaactgtgggtttaccatcaccagcgccgactacgacagggtgctggagaagctgaagaagacagcaacaggctggatgaccacaattaacggcaaggagctgaaggtggagggccagattacctactacaacagatacaagagacagaacgtagtcaaggacctgtccgtcgagctggatagactgagcgaagaatctgtgaacaacgacatctcctcctggacaaagggcagaagcggagaagctctgagcctcctgaagaaaagattctcccatagacccgtgcaggagaagttcgtgtgcctgaactgcggcttcgagacacacgcagccgagcaagccgccctgaacatcgccagatcctggctgttcctgcggagccaggagtacaagaaataccagacaaacaagacaaccggcaacaccgataagagagccttcgtcgagacctggcagtccttttaccggaagaagcttaaggaggtgtggaaacctgccgtgcggtctggcggatctggcggaggctcctgcccacaggagcgtgatgttcaacgacgtgagcatcgacttcagcagggaggagtgggagtacctgaacctggagcagagggacctgtacagggacgtgatgctggagaactacagcaacctggtgagcctgggctacttcatcagcaagcccgacgtgatcagcctgctggagcagggcgaggagccctggaaggtggtgaggaagggcaggaggaggtaccccgacctgaagaccaactacggatctggctccggcagcggccccaagaaaaagagaaaagtctaagctgccttctgcggggcttgccttctggccatgcccttcttctctcccttgcacctgtacctcttggtctttgaataaagcctgagtaggaaggctagcaaaaaaaaaaaaaaaaaaaaaaaaaaaaaaaaaaaaaaaaaaaaaaaaaaaaaaaaaaaaaaaaaaaaaaaaaaaaaaaa

SEQ ID NO: 15324 - RNA, 9485 nt, synthetic construct
  source 1..9485: mol_type = other RNA
aggaaataagagagaaaagaagagtaagaagaaatataagagccaccatggcccctaagaagaagcgtaaagtgagccggatggaacgcctcgtctacgaggtgcggcagaagtgcagaaacatcgaggacatctgcatctcctgcggatctctgaacgtgaccctggagcacccactgttcatcggcggcatgtgccagaactgtaaaaactgttttctggagtgtgcctatcaatacgacgatgacggctaccagagctactgcaccatctgttgcggcggaagagaggtgctgatgtgtggaaataacaactgctgccggtgcttctgcgtggaatgcgtggacctgctggtgggccccggcgccgcccaggccgctattaaggaagatccttggaactgctacatgtgcggccacaagggcacatacggcctgctgagacggagagaggactggcctagcagactgcagatgttcttcgccaataaccacgaccaggagttcgacccccctaaggtgtaccctcccgtccccgccgagaagagaaagcccatccgggtcctgagcctgttcgatggcatcgccaccggtctgctggtgctgaaggacctgggcatccaggtggataggtacattgcctccgaggtgtgcgaggactccatcaccgtgggaatggtgcgtcatcagggcaagatcatgtacgtgggcgacgtgcggagcgtgacacagaagcatatccaggagtggggccctttcgacctggtgatcggcggcagcccttgcaatgacctgagcatcgtgaacccagcccggaagggcctgtacgagggaaccggcagactgttcttcgagttttacagactgctgcacgacgcccggcctaaggaaggcgacgaccggcccttcttttggctgttcgagaatgtggtggccatgggagtcagcgacaagcgggatattagccggttcctggagagcaaccccgtgatgatcgatgccaaggaagtgagcgccgcccaccgggccagatacttctggggcaatctgcctggcatgaacagacccctggccagcaccgtgaacgacaagctggagctgcaggagtgcctggagcacggccggatcgccaagttcagcaaggtgagaaccatcaccacccgaagcaacagcatcaaacaaggcaaggaccagcactttcctgtgttcatgaacgagaaggaggacatcctgtggtgtaccgagatggagagagtgttcgggttcccagtccactacacagatgtcagcaacatgtctagactggccagacagagactgctgggaagaagctggtccgtccctgtgatcagacacctgttcgcccctctgaaggagtacttcgcctgcgtgagcagcggcaacagcaacgccaacagccggggccccagcttctctagcggcctggtgccactgtccctgagagggagccacatgggccccatggagatctacaaaaccgtgagcgcctggaagcggcagcctgtgcgcgtgctgagcctgtttcggaatatcgataaagtcctgaaaagcctgggattcctggagagcggctctggctccggcggtggcaccctgaagtacgtggaggatgtgacaaacgtggtcagacgggatgtggagaagtggggccccttcgatctggtgtacggcagcacccaacccctgggcagctcttgtgaccggtgccctggctggtacatgtttcagttccaccggatcctgcagtacgccctgccgagacaggagtcccagcggccattcttttggattttcatggacaacttgctgctgaccgaggatgaccaggaaactaccactcggttcctgcagaccgaagccgtgaccctgcaggacgtgagaggccgggactaccagaacgccatgcgggtgtggtccaacatccctggactgaaaagcaagcacgcacctctgacccctaaagaagaggagtacctgcaggcccaggtgcggagcagaagcaagctggacgcccctaaggtggatctgctggtgaagaattgcctcctgcccctgagagagtacttcaagtatttcagccagaatagtctgcccctgggaggcagcggcggcggcgccctggtgacatttgaggacgtcgccgtgcggttcacccaggaggaatgggctctgctggatccttctcagaaaatcctgtaccgggacgtgatgagagagacataccggaatctgacctccgtgggcatcaactgggaatgttgggaccttgaagcctgcttcagaagcctgggaagaaacctgagagtgcaggtggtgaagagaaagtgcgagctgaccaacagcggcccctgcgccgagggcggcccaagcagcggcgcccctcctcccagcggcggcagcccagccggctccccaacctctaccgaggagggcacctctgagtccgccacccccgagagcggccctggcacctccaccgagcccagcgagggcagcgcacccggcagccctgccggcagccccacctccacagaggagggaaccagcaccgagcccagcgaaggcagcgccccaggcaccagcaccgagcctagtgagcaggagattaaacggatcaacaagatcagaagaagacttgtgaaagacagcaacaccaagaaggccggcaagacaggccccatgaaaaccctgctggttagagtgatgacacccgatctgagagagcggctggaaaacctgagaaagaagcctgaaaatatcccccagcccatcagcaatacatctagagccaacctgaataagctgctgaccgattacaccgaaatgaagaaggcgatcctgcatgtgtactgggaagagttccagaaggaccctgtgggcctgatgagccgggtggcccagcctgccagcaagaagatcgatcagaacaagctgaaacctgagatggacgagaagggcaacctgaccaccgccggctttgcctgctctcagtgtggccagcccctgttcgtgtacaagctggagcaggtgtctgagaagggcaaggcttacaccaactacttcggacggtgcaatgtggccgagcacgaaaagctgatcctgctggcccagctgaagcccgagaaggatagcgacgaagccgtgacatatagcctgggaaagtttgggcagagggccctggatttctacagcattcatgtgaccaaggagtccacccaccccgtgaagcccctggcccagatcgccggaaacagatacgcctccggacctgtgggaaaggccctgagcgacgcatgtatgggcacaatcgcctccttcctgtctaagtaccaggacatcatcatcgaacaccagaaggtggtgaagggcaaccagaagagactggagagcctgcgggagctggccggcaaggaaaacctggaataccctagcgtgaccctgccacctcagcctcacaccaaggagggcgttgatgcctacaacgaagtgatcgcccgggtgcgaatgtgggtgaacctgaacctgtggcagaagctgaagctaagcagagatgatgccaagcctctgctgagactgaagggattcccttcctttcctctggtcgagagacaggccaacgaagtggactggtgggacatggtgtgtaacgtgaagaagctgatcaacgagaaaaaggaggatggcaaggtgttttggcagaatctggctggctacaagagacaggaagccctgagaccatacctgagcagcgaggaagatcggaagaagggaaagaaattcgctcggtaccagctgggcgacctgctgctgcacctggaaaagaagcacggcgaggactggggaaaggtgtacgacgaggcctgggagcggattgacaagaaagtggaaggcctgagcaagcacatcaagctggaagaggaacggagaagcgaggacgcccagagcaaggccgccctgaccgactggctgcgggctaaggccagcttcgtgatcgagggcctgaaggaggccgacaaggacgagttctgcagatgcgagctgaagctgcagaagtggtacggggacctgcggggaaagcccttcgccatcgaagccgagaacagcatcctggacatcagcggcttcagcaagcagtacaactgtgccttcatctggcagaaggacggcgtgaagaagctgaacctgtacctgatcatcaactacttcaagggcggcaagctgcggttcaagaagatcaaacctgaagccttcgaagccaacagattctacaccgtgatcaacaaaaagagcggcgagatcgtgcccatggaggtgaacttcaacttcgacgaccccaacctgatcatcctgcctctggcctttggcaagagacagggcagagaattcatctggaacgacctgctgtccctggaaaccggcagcctgaagctggccaacggaagagtgatcgagaagacactgtacaacagaagaacccggcaggatgagcctgccctgttcgtggccctgaccttcgagcggcgggaggtcctggactcctccaatatcaaaccaatgaacctgatcggcgtggcaagaggcgaaaacatccccgccgtgatcgccctgaccgaccccgagggctgcccactgagccggtttaaggatagcctgggaaacccaacccacatcctgagaatcggcgagagctataaggagaagcagcggaccatccaggccaagaaggaggtggagcagcggagagccggcggctacagccggaagtacgccagcaaagccaagaatctggcagacgatatggtgagaaacaccgctagagatctgctgtactacgccgtgacccaggatgccatgctgatcttcgccaacctgagccggggcttcggccggcagggcaagcggaccttcatggccgagagacagtacacacggatggaggactggctgaccgccaagctggcctacgagggcctgagcaagacctacctgtccaagacactggcccagtacacctccaagacatgcagcaactgtgggtttaccatcaccagcgccgactacgacagggtgctggagaagctgaagaagacagcaacaggctggatgaccacaattaacggcaaggagctgaaggtggagggccagattacctactacaacagatacaagagacagaacgtagtcaaggacctgtccgtcgagctggatagactgagcgaagaatctgtgaacaacgacatctcctcctggacaaagggcagaagcggagaagctctgagcctcctgaagaaaagattctcccatagacccgtgcaggagaagttcgtgtgcctgaactgcggcttcgagacacacgcagccgagcaagccgccctgaacatcgccagatcctggctgttcctgcggagccaggagtacaagaaataccagacaaacaagacaaccggcaacaccgataagagagccttcgtcgagacctggcagtccttttaccggaagaagcttaaggaggtgtggaaacctgccgtgcggtctggcggatctggcggaggctccccccaggtgctggtgagcttcgaggaggtggccgtgctgctgagccaggaggagtggggccacctgggccccgcccagaagaggctgtacagggacgtgatgctggagacctacggcaacctggtgagcctgggcctgcagggcagcaagcccgacgtgatcagcaagctggagcagggcgaggagccctgggccccccacagccccaggatcgagggcagctggatctggaggaggaggaggggcggcccaagcagcggcgcccctcctcccagcggcggcagcccagccggctccccaacctctaccgaggagggcacctctgagtccgccacccccgagagcggccctggcacctccaccgagcccagcgagggcagcgcacccggcagccctgccggcagccccacctccacagaggagggaaccagcaccgagcccagcgaaggcagcgccccaggcaccagcaccgagcctagtgagcaggagattaaacggatcaacaagatcagaagaagacttgtgaaagacagcaacaccaagaaggccggcaagacaggccccatgaaaaccctgctggttagagtgatgacacccgatctgagagagcggctggaaaacctgagaaagaagcctgaaaatatcccccagcccatcagcaatacatctagagccaacctgaataagctgctgaccgattacaccgaaatgaagaaggcgatcctgcatgtgtactgggaagagttccagaaggaccctgtgggcctgatgagccgggtggcccagcctgccagcaagaagatcgatcagaacaagctgaaacctgagatggacgagaagggcaacctgaccaccgccggctttgcctgctctcagtgtggccagcccctgttcgtgtacaagctggagcaggtgtctgagaagggcaaggcttacaccaactacttcggacggtgcaatgtggccgagcacgaaaagctgatcctgctggcccagctgaagcccgagaaggatagcgacgaagccgtgacatatagcctgggaaagtttgggcagagggccctggatttctacagcattcatgtgaccaaggagtccacccaccccgtgaagcccctggcccagatcgccggaaacagatacgcctccggacctgtgggaaaggccctgagcgacgcatgtatgggcacaatcgcctccttcctgtctaagtaccaggacatcatcatcgaacaccagaaggtggtgaagggcaaccagaagagactggagagcctgcgggagctggccggcaaggaaaacctggaataccctagcgtgaccctgccacctcagcctcacaccaaggagggcgttgatgcctacaacgaagtgatcgcccgggtgcgaatgtgggtgaacctgaacctgtggcagaagctgaagctaagcagagatgatgccaagcctctgctgagactgaagggattcccttcctttcctctggtcgagagacaggccaacgaagtggactggtgggacatggtgtgtaacgtgaagaagctgatcaacgagaaaaaggaggatggcaaggtgttttggcagaatctggctggctacaagagacaggaagccctgagaccatacctgagcagcgaggaagatcggaagaagggaaagaaattcgctcggtaccagctgggcgacctgctgctgcacctggaaaagaagcacggcgaggactggggaaaggtgtacgacgaggcctgggagcggattgacaagaaagtggaaggcctgagcaagcacatcaagctggaagaggaacggagaagcgaggacgcccagagcaaggccgccctgaccgactggctgcgggctaaggccagcttcgtgatcgagggcctgaaggaggccgacaaggacgagttctgcagatgcgagctgaagctgcagaagtggtacggggacctgcggggaaagcccttcgccatcgaagccgagaacagcatcctggacatcagcggcttcagcaagcagtacaactgtgccttcatctggcagaaggacggcgtgaagaagctgaacctgtacctgatcatcaactacttcaagggcggcaagctgcggttcaagaagatcaaacctgaagccttcgaagccaacagattctacaccgtgatcaacaaaaagagcggcgagatcgtgcccatggaggtgaacttcaacttcgacgaccccaacctgatcatcctgcctctggcctttggcaagagacagggcagagaattcatctggaacgacctgctgtccctggaaaccggcagcctgaagctggccaacggaagagtgatcgagaagacactgtacaacagaagaacccggcaggatgagcctgccctgttcgtggccctgaccttcgagcggcgggaggtcctggactcctccaatatcaaaccaatgaacctgatcggcgtggcaagaggcgaaaacatccccgccgtgatcgccctgaccgaccccgagggctgcccactgagccggtttaaggatagcctgggaaacccaacccacatcctgagaatcggcgagagctataaggagaagcagcggaccatccaggccaagaaggaggtggagcagcggagagccggcggctacagccggaagtacgccagcaaagccaagaatctggcagacgatatggtgagaaacaccgctagagatctgctgtactacgccgtgacccaggatgccatgctgatcttcgccaacctgagccggggcttcggccggcagggcaagcggaccttcatggccgagagacagtacacacggatggaggactggctgaccgccaagctggcctacgagggcctgagcaagacctacctgtccaagacactggcccagtacacctccaagacatgcagcaactgtgggtttaccatcaccagcgccgactacgacagggtgctggagaagctgaagaagacagcaacaggctggatgaccacaattaacggcaaggagctgaaggtggagggccagattacctactacaacagatacaagagacagaacgtagtcaaggacctgtccgtcgagctggatagactgagcgaagaatctgtgaacaacgacatctcctcctggacaaagggcagaagcggagaagctctgagcctcctgaagaaaagattctcccatagacccgtgcaggagaagttcgtgtgcctgaactgcggcttcgagacacacgcagccgagcaagccgccctgaacatcgccagatcctggctgttcctgcggagccaggagtacaagaaataccagacaaacaagacaaccggcaacaccgataagagagccttcgtcgagacctggcagtccttttaccggaagaagcttaaggaggtgtggaaacctgccgtgcggtctggcggatctggcggaggctcctccccaggtgctggtgagcttcgaggaggtggccgtgctgctgagccaggaggagtggggccacctgggccccgcccagaagaggctgtacagggacgtgatgctggagacctacggcaacctggtgagcctgggcctgcagggcagcaagcccgacgtgatcagcaagctggagcagggcgaggagccctgggccccccacagccccaggatcgagggcagctggatctggaggaggaggaggggatctggctccggcagcggccccaagaaaaagagaaaagtctaagctgccttctgcggggcttgccttctggccatgcccttcttctctcccttgcacctgtacctcttggtctttgaataaagcctgagtaggaaggctagcaaaaaaaaaaaaaaaaaaaaaaaaaaaaaaaaaaaaaaaaaaaaaaaaaaaaaaaaaaaaaaaaaaaaaaaaaaaaaaaa

SEQ ID NO: 15325 - RNA, 9485 nt, synthetic construct
  source 1..9485: mol_type = other RNA
aggaaataagagagaaaagaagagtaagaagaaatataagagccaccatggcccctaagaagaagcgtaaagtgagccggatggaacgcctcgtctacgaggtgcggcagaagtgcagaaacatcgaggacatctgcatctcctgcggatctctgaacgtgaccctggagcacccactgttcatcggcggcatgtgccagaactgtaaaaactgttttctggagtgtgcctatcaatacgacgatgacggctaccagagctactgcaccatctgttgcggcggaagagaggtgctgatgtgtggaaataacaactgctgccggtgcttctgcgtggaatgcgtggacctgctggtgggccccggcgccgcccaggccgctattaaggaagatccttggaactgctacatgtgcggccacaagggcacatacggcctgctgagacggagagaggactggcctagcagactgcagatgttcttcgccaataaccacgaccaggagttcgacccccctaaggtgtaccctcccgtccccgccgagaagagaaagcccatccgggtcctgagcctgttcgatggcatcgccaccggtctgctggtgctgaaggacctgggcatccaggtggataggtacattgcctccgaggtgtgcgaggactccatcaccgtgggaatggtgcgtcatcagggcaagatcatgtacgtgggcgacgtgcggagcgtgacacagaagcatatccaggagtggggccctttcgacctggtgatcggcggcagcccttgcaatgacctgagcatcgtgaacccagcccggaagggcctgtacgagggaaccggcagactgttcttcgagttttacagactgctgcacgacgcccggcctaaggaaggcgacgaccggcccttcttttggctgttcgagaatgtggtggccatgggagtcagcgacaagcgggatattagccggttcctggagagcaaccccgtgatgatcgatgccaaggaagtgagcgccgcccaccgggccagatacttctggggcaatctgcctggcatgaacagacccctggccagcaccgtgaacgacaagctggagctgcaggagtgcctggagcacggccggatcgccaagttcagcaaggtgagaaccatcaccacccgaagcaacagcatcaaacaaggcaaggaccagcactttcctgtgttcatgaacgagaaggaggacatcctgtggtgtaccgagatggagagagtgttcgggttcccagtccactacacagatgtcagcaacatgtctagactggccagacagagactgctgggaagaagctggtccgtccctgtgatcagacacctgttcgcccctctgaaggagtacttcgcctgcgtgagcagcggcaacagcaacgccaacagccggggccccagcttctctagcggcctggtgccactgtccctgagagggagccacatgggccccatggagatctacaaaaccgtgagcgcctggaagcggcagcctgtgcgcgtgctgagcctgtttcggaatatcgataaagtcctgaaaagcctgggattcctggagagcggctctggctccggcggtggcaccctgaagtacgtggaggatgtgacaaacgtggtcagacgggatgtggagaagtggggccccttcgatctggtgtacggcagcacccaacccctgggcagctcttgtgaccggtgccctggctggtacatgtttcagttccaccggatcctgcagtacgccctgccgagacaggagtcccagcggccattcttttggattttcatggacaacttgctgctgaccgaggatgaccaggaaactaccactcggttcctgcagaccgaagccgtgaccctgcaggacgtgagaggccgggactaccagaacgccatgcgggtgtggtccaacatccctggactgaaaagcaagcacgcacctctgacccctaaagaagaggagtacctgcaggcccaggtgcggagcagaagcaagctggacgcccctaaggtggatctgctggtgaagaattgcctcctgcccctgagagagtacttcaagtatttcagccagaatagtctgcccctgggaggcagcggcggcggcgccctggtgacatttgaggacgtcgccgtgcggttcacccaggaggaatgggctctgctggatccttctcagaaaatcctgtaccgggacgtgatgagagagacataccggaatctgacctccgtgggcatcaactgggaatgttgggaccttgaagcctgcttcagaagcctgggaagaaacctgagagtgcaggtggtgaagagaaagtgcgagctgaccaacagcggcccctgcgccgagggcggcccaagcagcggcgcccctcctcccagcggcggcagcccagccggctccccaacctctaccgaggagggcacctctgagtccgccacccccgagagcggccctggcacctccaccgagcccagcgagggcagcgcacccggcagccctgccggcagccccacctccacagaggagggaaccagcaccgagcccagcgaaggcagcgccccaggcaccagcaccgagcctagtgagcaggagattaaacggatcaacaagatcagaagaagacttgtgaaagacagcaacaccaagaaggccggcaagacaggccccatgaaaaccctgctggttagagtgatgacacccgatctgagagagcggctggaaaacctgagaaagaagcctgaaaatatcccccagcccatcagcaatacatctagagccaacctgaataagctgctgaccgattacaccgaaatgaagaaggcgatcctgcatgtgtactgggaagagttccagaaggaccctgtgggcctgatgagccgggtggcccagcctgccagcaagaagatcgatcagaacaagctgaaacctgagatggacgagaagggcaacctgaccaccgccggctttgcctgctctcagtgtggccagcccctgttcgtgtacaagctggagcaggtgtctgagaagggcaaggcttacaccaactacttcggacggtgcaatgtggccgagcacgaaaagctgatcctgctggcccagctgaagcccgagaaggatagcgacgaagccgtgacatatagcctgggaaagtttgggcagagggccctggatttctacagcattcatgtgaccaaggagtccacccaccccgtgaagcccctggcccagatcgccggaaacagatacgcctccggacctgtgggaaaggccctgagcgacgcatgtatgggcacaatcgcctccttcctgtctaagtaccaggacatcatcatcgaacaccagaaggtggtgaagggcaaccagaagagactggagagcctgcgggagctggccggcaaggaaaacctggaataccctagcgtgaccctgccacctcagcctcacaccaaggagggcgttgatgcctacaacgaagtgatcgcccgggtgcgaatgtgggtgaacctgaacctgtggcagaagctgaagctaagcagagatgatgccaagcctctgctgagactgaagggattcccttcctttcctctggtcgagagacaggccaacgaagtggactggtgggacatggtgtgtaacgtgaagaagctgatcaacgagaaaaaggaggatggcaaggtgttttggcagaatctggctggctacaagagacaggaagccctgagaccatacctgagcagcgaggaagatcggaagaagggaaagaaattcgctcggtaccagctgggcgacctgctgctgcacctggaaaagaagcacggcgaggactggggaaaggtgtacgacgaggcctgggagcggattgacaagaaagtggaaggcctgagcaagcacatcaagctggaagaggaacggagaagcgaggacgcccagagcaaggccgccctgaccgactggctgcgggctaaggccagcttcgtgatcgagggcctgaaggaggccgacaaggacgagttctgcagatgcgagctgaagctgcagaagtggtacggggacctgcggggaaagcccttcgccatcgaagccgagaacagcatcctggacatcagcggcttcagcaagcagtacaactgtgccttcatctggcagaaggacggcgtgaagaagctgaacctgtacctgatcatcaactacttcaagggcggcaagctgcggttcaagaagatcaaacctgaagccttcgaagccaacagattctacaccgtgatcaacaaaaagagcggcgagatcgtgcccatggaggtgaacttcaacttcgacgaccccaacctgatcatcctgcctctggcctttggcaagagacagggcagagaattcatctggaacgacctgctgtccctggaaaccggcagcctgaagctggccaacggaagagtgatcgagaagacactgtacaacagaagaacccggcaggatgagcctgccctgttcgtggccctgaccttcgagcggcgggaggtcctggactcctccaatatcaaaccaatgaacctgatcggcgtggcaagaggcgaaaacatccccgccgtgatcgccctgaccgaccccgagggctgcccactgagccggtttaaggatagcctgggaaacccaacccacatcctgagaatcggcgagagctataaggagaagcagcggaccatccaggccaagaaggaggtggagcagcggagagccggcggctacagccggaagtacgccagcaaagccaagaatctggcagacgatatggtgagaaacaccgctagagatctgctgtactacgccgtgacccaggatgccatgctgatcttcgccaacctgagccggggcttcggccggcagggcaagcggaccttcatggccgagagacagtacacacggatggaggactggctgaccgccaagctggcctacgagggcctgagcaagacctacctgtccaagacactggcccagtacacctccaagacatgcagcaactgtgggtttaccatcaccagcgccgactacgacagggtgctggagaagctgaagaagacagcaacaggctggatgaccacaattaacggcaaggagctgaaggtggagggccagattacctactacaacagatacaagagacagaacgtagtcaaggacctgtccgtcgagctggatagactgagcgaagaatctgtgaacaacgacatctcctcctggacaaagggcagaagcggagaagctctgagcctcctgaagaaaagattctcccatagacccgtgcaggagaagttcgtgtgcctgaactgcggcttcgagacacacgcagccgagcaagccgccctgaacatcgccagatcctggctgttcctgcggagccaggagtacaagaaataccagacaaacaagacaaccggcaacaccgataagagagccttcgtcgagacctggcagtccttttaccggaagaagcttaaggaggtgtggaaacctgccgtgcggtctggcggatctggcggaggctccagcaaggcccccatcaccttcggcgacctggccatctacttcagccaggaggagtgggagtggctgagccccatccagaaggacctgtacgaggacgtgatgctggagaactacaggaacctggtgagcctgggcctgagcttcaggaggcccaacgtgatcaccctgctggagaagggcaaggccccctggatggtggagcccgccaggaggaggaggggccccgacagcggcagcaaggtgggcggcccaagcagcggcgcccctcctcccagcggcggcagcccagccggctccccaacctctaccgaggagggcacctctgagtccgccacccccgagagcggccctggcacctccaccgagcccagcgagggcagcgcacccggcagccctgccggcagccccacctccacagaggagggaaccagcaccgagcccagcgaaggcagcgccccaggcaccagcaccgagcctagtgagcaggagattaaacggatcaacaagatcagaagaagacttgtgaaagacagcaacaccaagaaggccggcaagacaggccccatgaaaaccctgctggttagagtgatgacacccgatctgagagagcggctggaaaacctgagaaagaagcctgaaaatatcccccagcccatcagcaatacatctagagccaacctgaataagctgctgaccgattacaccgaaatgaagaaggcgatcctgcatgtgtactgggaagagttccagaaggaccctgtgggcctgatgagccgggtggcccagcctgccagcaagaagatcgatcagaacaagctgaaacctgagatggacgagaagggcaacctgaccaccgccggctttgcctgctctcagtgtggccagcccctgttcgtgtacaagctggagcaggtgtctgagaagggcaaggcttacaccaactacttcggacggtgcaatgtggccgagcacgaaaagctgatcctgctggcccagctgaagcccgagaaggatagcgacgaagccgtgacatatagcctgggaaagtttgggcagagggccctggatttctacagcattcatgtgaccaaggagtccacccaccccgtgaagcccctggcccagatcgccggaaacagatacgcctccggacctgtgggaaaggccctgagcgacgcatgtatgggcacaatcgcctccttcctgtctaagtaccaggacatcatcatcgaacaccagaaggtggtgaagggcaaccagaagagactggagagcctgcgggagctggccggcaaggaaaacctggaataccctagcgtgaccctgccacctcagcctcacaccaaggagggcgttgatgcctacaacgaagtgatcgcccgggtgcgaatgtgggtgaacctgaacctgtggcagaagctgaagctaagcagagatgatgccaagcctctgctgagactgaagggattcccttcctttcctctggtcgagagacaggccaacgaagtggactggtgggacatggtgtgtaacgtgaagaagctgatcaacgagaaaaaggaggatggcaaggtgttttggcagaatctggctggctacaagagacaggaagccctgagaccatacctgagcagcgaggaagatcggaagaagggaaagaaattcgctcggtaccagctgggcgacctgctgctgcacctggaaaagaagcacggcgaggactggggaaaggtgtacgacgaggcctgggagcggattgacaagaaagtggaaggcctgagcaagcacatcaagctggaagaggaacggagaagcgaggacgcccagagcaaggccgccctgaccgactggctgcgggctaaggccagcttcgtgatcgagggcctgaaggaggccgacaaggacgagttctgcagatgcgagctgaagctgcagaagtggtacggggacctgcggggaaagcccttcgccatcgaagccgagaacagcatcctggacatcagcggcttcagcaagcagtacaactgtgccttcatctggcagaaggacggcgtgaagaagctgaacctgtacctgatcatcaactacttcaagggcggcaagctgcggttcaagaagatcaaacctgaagccttcgaagccaacagattctacaccgtgatcaacaaaaagagcggcgagatcgtgcccatggaggtgaacttcaacttcgacgaccccaacctgatcatcctgcctctggcctttggcaagagacagggcagagaattcatctggaacgacctgctgtccctggaaaccggcagcctgaagctggccaacggaagagtgatcgagaagacactgtacaacagaagaacccggcaggatgagcctgccctgttcgtggccctgaccttcgagcggcgggaggtcctggactcctccaatatcaaaccaatgaacctgatcggcgtggcaagaggcgaaaacatccccgccgtgatcgccctgaccgaccccgagggctgcccactgagccggtttaaggatagcctgggaaacccaacccacatcctgagaatcggcgagagctataaggagaagcagcggaccatccaggccaagaaggaggtggagcagcggagagccggcggctacagccggaagtacgccagcaaagccaagaatctggcagacgatatggtgagaaacaccgctagagatctgctgtactacgccgtgacccaggatgccatgctgatcttcgccaacctgagccggggcttcggccggcagggcaagcggaccttcatggccgagagacagtacacacggatggaggactggctgaccgccaagctggcctacgagggcctgagcaagacctacctgtccaagacactggcccagtacacctccaagacatgcagcaactgtgggtttaccatcaccagcgccgactacgacagggtgctggagaagctgaagaagacagcaacaggctggatgaccacaattaacggcaaggagctgaaggtggagggccagattacctactacaacagatacaagagacagaacgtagtcaaggacctgtccgtcgagctggatagactgagcgaagaatctgtgaacaacgacatctcctcctggacaaagggcagaagcggagaagctctgagcctcctgaagaaaagattctcccatagacccgtgcaggagaagttcgtgtgcctgaactgcggcttcgagacacacgcagccgagcaagccgccctgaacatcgccagatcctggctgttcctgcggagccaggagtacaagaaataccagacaaacaagacaaccggcaacaccgataagagagccttcgtcgagacctggcagtccttttaccggaagaagcttaaggaggtgtggaaacctgccgtgcggtctggcggatctggcggaggctcctagcaaggcccccatcaccttcggcgacctggccatctacttcagccaggaggagtgggagtggctgagccccatccagaaggacctgtacgaggacgtgatgctggagaactacaggaacctggtgagcctgggcctgagcttcaggaggcccaacgtgatcaccctgctggagaagggcaaggccccctggatggtggagcccgccaggaggaggaggggccccgacagcggcagcaaggtgggatctggctccggcagcggccccaagaaaaagagaaaagtctaagctgccttctgcggggcttgccttctggccatgcccttcttctctcccttgcacctgtacctcttggtctttgaataaagcctgagtaggaaggctagcaaaaaaaaaaaaaaaaaaaaaaaaaaaaaaaaaaaaaaaaaaaaaaaaaaaaaaaaaaaaaaaaaaaaaaaaaaaaaaaa

SEQ ID NO: 15326 - RNA, 9485 nt, synthetic construct
  source 1..9485: mol_type = other RNA
aggaaataagagagaaaagaagagtaagaagaaatataagagccaccatggcccctaagaagaagcgtaaagtgagccggatggaacgcctcgtctacgaggtgcggcagaagtgcagaaacatcgaggacatctgcatctcctgcggatctctgaacgtgaccctggagcacccactgttcatcggcggcatgtgccagaactgtaaaaactgttttctggagtgtgcctatcaatacgacgatgacggctaccagagctactgcaccatctgttgcggcggaagagaggtgctgatgtgtggaaataacaactgctgccggtgcttctgcgtggaatgcgtggacctgctggtgggccccggcgccgcccaggccgctattaaggaagatccttggaactgctacatgtgcggccacaagggcacatacggcctgctgagacggagagaggactggcctagcagactgcagatgttcttcgccaataaccacgaccaggagttcgacccccctaaggtgtaccctcccgtccccgccgagaagagaaagcccatccgggtcctgagcctgttcgatggcatcgccaccggtctgctggtgctgaaggacctgggcatccaggtggataggtacattgcctccgaggtgtgcgaggactccatcaccgtgggaatggtgcgtcatcagggcaagatcatgtacgtgggcgacgtgcggagcgtgacacagaagcatatccaggagtggggccctttcgacctggtgatcggcggcagcccttgcaatgacctgagcatcgtgaacccagcccggaagggcctgtacgagggaaccggcagactgttcttcgagttttacagactgctgcacgacgcccggcctaaggaaggcgacgaccggcccttcttttggctgttcgagaatgtggtggccatgggagtcagcgacaagcgggatattagccggttcctggagagcaaccccgtgatgatcgatgccaaggaagtgagcgccgcccaccgggccagatacttctggggcaatctgcctggcatgaacagacccctggccagcaccgtgaacgacaagctggagctgcaggagtgcctggagcacggccggatcgccaagttcagcaaggtgagaaccatcaccacccgaagcaacagcatcaaacaaggcaaggaccagcactttcctgtgttcatgaacgagaaggaggacatcctgtggtgtaccgagatggagagagtgttcgggttcccagtccactacacagatgtcagcaacatgtctagactggccagacagagactgctgggaagaagctggtccgtccctgtgatcagacacctgttcgcccctctgaaggagtacttcgcctgcgtgagcagcggcaacagcaacgccaacagccggggccccagcttctctagcggcctggtgccactgtccctgagagggagccacatgggccccatggagatctacaaaaccgtgagcgcctggaagcggcagcctgtgcgcgtgctgagcctgtttcggaatatcgataaagtcctgaaaagcctgggattcctggagagcggctctggctccggcggtggcaccctgaagtacgtggaggatgtgacaaacgtggtcagacgggatgtggagaagtggggccccttcgatctggtgtacggcagcacccaacccctgggcagctcttgtgaccggtgccctggctggtacatgtttcagttccaccggatcctgcagtacgccctgccgagacaggagtcccagcggccattcttttggattttcatggacaacttgctgctgaccgaggatgaccaggaaactaccactcggttcctgcagaccgaagccgtgaccctgcaggacgtgagaggccgggactaccagaacgccatgcgggtgtggtccaacatccctggactgaaaagcaagcacgcacctctgacccctaaagaagaggagtacctgcaggcccaggtgcggagcagaagcaagctggacgcccctaaggtggatctgctggtgaagaattgcctcctgcccctgagagagtacttcaagtatttcagccagaatagtctgcccctgggaggcagcggcggcggcgccctggtgacatttgaggacgtcgccgtgcggttcacccaggaggaatgggctctgctggatccttctcagaaaatcctgtaccgggacgtgatgagagagacataccggaatctgacctccgtgggcatcaactgggaatgttgggaccttgaagcctgcttcagaagcctgggaagaaacctgagagtgcaggtggtgaagagaaagtgcgagctgaccaacagcggcccctgcgccgagggcggcccaagcagcggcgcccctcctcccagcggcggcagcccagccggctccccaacctctaccgaggagggcacctctgagtccgccacccccgagagcggccctggcacctccaccgagcccagcgagggcagcgcacccggcagccctgccggcagccccacctccacagaggagggaaccagcaccgagcccagcgaaggcagcgccccaggcaccagcaccgagcctagtgagcaggagattaaacggatcaacaagatcagaagaagacttgtgaaagacagcaacaccaagaaggccggcaagacaggccccatgaaaaccctgctggttagagtgatgacacccgatctgagagagcggctggaaaacctgagaaagaagcctgaaaatatcccccagcccatcagcaatacatctagagccaacctgaataagctgctgaccgattacaccgaaatgaagaaggcgatcctgcatgtgtactgggaagagttccagaaggaccctgtgggcctgatgagccgggtggcccagcctgccagcaagaagatcgatcagaacaagctgaaacctgagatggacgagaagggcaacctgaccaccgccggctttgcctgctctcagtgtggccagcccctgttcgtgtacaagctggagcaggtgtctgagaagggcaaggcttacaccaactacttcggacggtgcaatgtggccgagcacgaaaagctgatcctgctggcccagctgaagcccgagaaggatagcgacgaagccgtgacatatagcctgggaaagtttgggcagagggccctggatttctacagcattcatgtgaccaaggagtccacccaccccgtgaagcccctggcccagatcgccggaaacagatacgcctccggacctgtgggaaaggccctgagcgacgcatgtatgggcacaatcgcctccttcctgtctaagtaccaggacatcatcatcgaacaccagaaggtggtgaagggcaaccagaagagactggagagcctgcgggagctggccggcaaggaaaacctggaataccctagcgtgaccctgccacctcagcctcacaccaaggagggcgttgatgcctacaacgaagtgatcgcccgggtgcgaatgtgggtgaacctgaacctgtggcagaagctgaagctaagcagagatgatgccaagcctctgctgagactgaagggattcccttcctttcctctggtcgagagacaggccaacgaagtggactggtgggacatggtgtgtaacgtgaagaagctgatcaacgagaaaaaggaggatggcaaggtgttttggcagaatctggctggctacaagagacaggaagccctgagaccatacctgagcagcgaggaagatcggaagaagggaaagaaattcgctcggtaccagctgggcgacctgctgctgcacctggaaaagaagcacggcgaggactggggaaaggtgtacgacgaggcctgggagcggattgacaagaaagtggaaggcctgagcaagcacatcaagctggaagaggaacggagaagcgaggacgcccagagcaaggccgccctgaccgactggctgcgggctaaggccagcttcgtgatcgagggcctgaaggaggccgacaaggacgagttctgcagatgcgagctgaagctgcagaagtggtacggggacctgcggggaaagcccttcgccatcgaagccgagaacagcatcctggacatcagcggcttcagcaagcagtacaactgtgccttcatctggcagaaggacggcgtgaagaagctgaacctgtacctgatcatcaactacttcaagggcggcaagctgcggttcaagaagatcaaacctgaagccttcgaagccaacagattctacaccgtgatcaacaaaaagagcggcgagatcgtgcccatggaggtgaacttcaacttcgacgaccccaacctgatcatcctgcctctggcctttggcaagagacagggcagagaattcatctggaacgacctgctgtccctggaaaccggcagcctgaagctggccaacggaagagtgatcgagaagacactgtacaacagaagaacccggcaggatgagcctgccctgttcgtggccctgaccttcgagcggcgggaggtcctggactcctccaatatcaaaccaatgaacctgatcggcgtggcaagaggcgaaaacatccccgccgtgatcgccctgaccgaccccgagggctgcccactgagccggtttaaggatagcctgggaaacccaacccacatcctgagaatcggcgagagctataaggagaagcagcggaccatccaggccaagaaggaggtggagcagcggagagccggcggctacagccggaagtacgccagcaaagccaagaatctggcagacgatatggtgagaaacaccgctagagatctgctgtactacgccgtgacccaggatgccatgctgatcttcgccaacctgagccggggcttcggccggcagggcaagcggaccttcatggccgagagacagtacacacggatggaggactggctgaccgccaagctggcctacgagggcctgagcaagacctacctgtccaagacactggcccagtacacctccaagacatgcagcaactgtgggtttaccatcaccagcgccgactacgacagggtgctggagaagctgaagaagacagcaacaggctggatgaccacaattaacggcaaggagctgaaggtggagggccagattacctactacaacagatacaagagacagaacgtagtcaaggacctgtccgtcgagctggatagactgagcgaagaatctgtgaacaacgacatctcctcctggacaaagggcagaagcggagaagctctgagcctcctgaagaaaagattctcccatagacccgtgcaggagaagttcgtgtgcctgaactgcggcttcgagacacacgcagccgagcaagccgccctgaacatcgccagatcctggctgttcctgcggagccaggagtacaagaaataccagacaaacaagacaaccggcaacaccgataagagagccttcgtcgagacctggcagtccttttaccggaagaagcttaaggaggtgtggaaacctgccgtgcggtctggcggatctggcggaggctccttccaggagagcgtggtgttcagcgacgtgagcatcgccttcagccaggaggagtgggcccacctggacctggagcagaaggacctgtacagggacgtgatgctggagaactacagcaacctggtgagcctgggctgcttcgtgagcaagcccgacgtgatcagcctgctggagcagggcaaggagccctggaagatcgtgaggaagggcaggaggaggtaccccgacctggagaccaggtacggcggcccaagcagcggcgcccctcctcccagcggcggcagcccagccggctccccaacctctaccgaggagggcacctctgagtccgccacccccgagagcggccctggcacctccaccgagcccagcgagggcagcgcacccggcagccctgccggcagccccacctccacagaggagggaaccagcaccgagcccagcgaaggcagcgccccaggcaccagcaccgagcctagtgagcaggagattaaacggatcaacaagatcagaagaagacttgtgaaagacagcaacaccaagaaggccggcaagacaggccccatgaaaaccctgctggttagagtgatgacacccgatctgagagagcggctggaaaacctgagaaagaagcctgaaaatatcccccagcccatcagcaatacatctagagccaacctgaataagctgctgaccgattacaccgaaatgaagaaggcgatcctgcatgtgtactgggaagagttccagaaggaccctgtgggcctgatgagccgggtggcccagcctgccagcaagaagatcgatcagaacaagctgaaacctgagatggacgagaagggcaacctgaccaccgccggctttgcctgctctcagtgtggccagcccctgttcgtgtacaagctggagcaggtgtctgagaagggcaaggcttacaccaactacttcggacggtgcaatgtggccgagcacgaaaagctgatcctgctggcccagctgaagcccgagaaggatagcgacgaagccgtgacatatagcctgggaaagtttgggcagagggccctggatttctacagcattcatgtgaccaaggagtccacccaccccgtgaagcccctggcccagatcgccggaaacagatacgcctccggacctgtgggaaaggccctgagcgacgcatgtatgggcacaatcgcctccttcctgtctaagtaccaggacatcatcatcgaacaccagaaggtggtgaagggcaaccagaagagactggagagcctgcgggagctggccggcaaggaaaacctggaataccctagcgtgaccctgccacctcagcctcacaccaaggagggcgttgatgcctacaacgaagtgatcgcccgggtgcgaatgtgggtgaacctgaacctgtggcagaagctgaagctaagcagagatgatgccaagcctctgctgagactgaagggattcccttcctttcctctggtcgagagacaggccaacgaagtggactggtgggacatggtgtgtaacgtgaagaagctgatcaacgagaaaaaggaggatggcaaggtgttttggcagaatctggctggctacaagagacaggaagccctgagaccatacctgagcagcgaggaagatcggaagaagggaaagaaattcgctcggtaccagctgggcgacctgctgctgcacctggaaaagaagcacggcgaggactggggaaaggtgtacgacgaggcctgggagcggattgacaagaaagtggaaggcctgagcaagcacatcaagctggaagaggaacggagaagcgaggacgcccagagcaaggccgccctgaccgactggctgcgggctaaggccagcttcgtgatcgagggcctgaaggaggccgacaaggacgagttctgcagatgcgagctgaagctgcagaagtggtacggggacctgcggggaaagcccttcgccatcgaagccgagaacagcatcctggacatcagcggcttcagcaagcagtacaactgtgccttcatctggcagaaggacggcgtgaagaagctgaacctgtacctgatcatcaactacttcaagggcggcaagctgcggttcaagaagatcaaacctgaagccttcgaagccaacagattctacaccgtgatcaacaaaaagagcggcgagatcgtgcccatggaggtgaacttcaacttcgacgaccccaacctgatcatcctgcctctggcctttggcaagagacagggcagagaattcatctggaacgacctgctgtccctggaaaccggcagcctgaagctggccaacggaagagtgatcgagaagacactgtacaacagaagaacccggcaggatgagcctgccctgttcgtggccctgaccttcgagcggcgggaggtcctggactcctccaatatcaaaccaatgaacctgatcggcgtggcaagaggcgaaaacatccccgccgtgatcgccctgaccgaccccgagggctgcccactgagccggtttaaggatagcctgggaaacccaacccacatcctgagaatcggcgagagctataaggagaagcagcggaccatccaggccaagaaggaggtggagcagcggagagccggcggctacagccggaagtacgccagcaaagccaagaatctggcagacgatatggtgagaaacaccgctagagatctgctgtactacgccgtgacccaggatgccatgctgatcttcgccaacctgagccggggcttcggccggcagggcaagcggaccttcatggccgagagacagtacacacggatggaggactggctgaccgccaagctggcctacgagggcctgagcaagacctacctgtccaagacactggcccagtacacctccaagacatgcagcaactgtgggtttaccatcaccagcgccgactacgacagggtgctggagaagctgaagaagacagcaacaggctggatgaccacaattaacggcaaggagctgaaggtggagggccagattacctactacaacagatacaagagacagaacgtagtcaaggacctgtccgtcgagctggatagactgagcgaagaatctgtgaacaacgacatctcctcctggacaaagggcagaagcggagaagctctgagcctcctgaagaaaagattctcccatagacccgtgcaggagaagttcgtgtgcctgaactgcggcttcgagacacacgcagccgagcaagccgccctgaacatcgccagatcctggctgttcctgcggagccaggagtacaagaaataccagacaaacaagacaaccggcaacaccgataagagagccttcgtcgagacctggcagtccttttaccggaagaagcttaaggaggtgtggaaacctgccgtgcggtctggcggatctggcggaggctcctttccaggagagcgtggtgttcagcgacgtgagcatcgccttcagccaggaggagtgggcccacctggacctggagcagaaggacctgtacagggacgtgatgctggagaactacagcaacctggtgagcctgggctgcttcgtgagcaagcccgacgtgatcagcctgctggagcagggcaaggagccctggaagatcgtgaggaagggcaggaggaggtaccccgacctggagaccaggtacggatctggctccggcagcggccccaagaaaaagagaaaagtctaagctgccttctgcggggcttgccttctggccatgcccttcttctctcccttgcacctgtacctcttggtctttgaataaagcctgagtaggaaggctagcaaaaaaaaaaaaaaaaaaaaaaaaaaaaaaaaaaaaaaaaaaaaaaaaaaaaaaaaaaaaaaaaaaaaaaaaaaaaaaaa

SEQ ID NO: 15327 - RNA, 9485 nt, synthetic construct
  source 1..9485: mol_type = other RNA
aggaaataagagagaaaagaagagtaagaagaaatataagagccaccatggcccctaagaagaagcgtaaagtgagccggatggaacgcctcgtctacgaggtgcggcagaagtgcagaaacatcgaggacatctgcatctcctgcggatctctgaacgtgaccctggagcacccactgttcatcggcggcatgtgccagaactgtaaaaactgttttctggagtgtgcctatcaatacgacgatgacggctaccagagctactgcaccatctgttgcggcggaagagaggtgctgatgtgtggaaataacaactgctgccggtgcttctgcgtggaatgcgtggacctgctggtgggccccggcgccgcccaggccgctattaaggaagatccttggaactgctacatgtgcggccacaagggcacatacggcctgctgagacggagagaggactggcctagcagactgcagatgttcttcgccaataaccacgaccaggagttcgacccccctaaggtgtaccctcccgtccccgccgagaagagaaagcccatccgggtcctgagcctgttcgatggcatcgccaccggtctgctggtgctgaaggacctgggcatccaggtggataggtacattgcctccgaggtgtgcgaggactccatcaccgtgggaatggtgcgtcatcagggcaagatcatgtacgtgggcgacgtgcggagcgtgacacagaagcatatccaggagtggggccctttcgacctggtgatcggcggcagcccttgcaatgacctgagcatcgtgaacccagcccggaagggcctgtacgagggaaccggcagactgttcttcgagttttacagactgctgcacgacgcccggcctaaggaaggcgacgaccggcccttcttttggctgttcgagaatgtggtggccatgggagtcagcgacaagcgggatattagccggttcctggagagcaaccccgtgatgatcgatgccaaggaagtgagcgccgcccaccgggccagatacttctggggcaatctgcctggcatgaacagacccctggccagcaccgtgaacgacaagctggagctgcaggagtgcctggagcacggccggatcgccaagttcagcaaggtgagaaccatcaccacccgaagcaacagcatcaaacaaggcaaggaccagcactttcctgtgttcatgaacgagaaggaggacatcctgtggtgtaccgagatggagagagtgttcgggttcccagtccactacacagatgtcagcaacatgtctagactggccagacagagactgctgggaagaagctggtccgtccctgtgatcagacacctgttcgcccctctgaaggagtacttcgcctgcgtgagcagcggcaacagcaacgccaacagccggggccccagcttctctagcggcctggtgccactgtccctgagagggagccacatgggccccatggagatctacaaaaccgtgagcgcctggaagcggcagcctgtgcgcgtgctgagcctgtttcggaatatcgataaagtcctgaaaagcctgggattcctggagagcggctctggctccggcggtggcaccctgaagtacgtggaggatgtgacaaacgtggtcagacgggatgtggagaagtggggccccttcgatctggtgtacggcagcacccaacccctgggcagctcttgtgaccggtgccctggctggtacatgtttcagttccaccggatcctgcagtacgccctgccgagacaggagtcccagcggccattcttttggattttcatggacaacttgctgctgaccgaggatgaccaggaaactaccactcggttcctgcagaccgaagccgtgaccctgcaggacgtgagaggccgggactaccagaacgccatgcgggtgtggtccaacatccctggactgaaaagcaagcacgcacctctgacccctaaagaagaggagtacctgcaggcccaggtgcggagcagaagcaagctggacgcccctaaggtggatctgctggtgaagaattgcctcctgcccctgagagagtacttcaagtatttcagccagaatagtctgcccctgggaggcagcggcggcggcgccctggtgacatttgaggacgtcgccgtgcggttcacccaggaggaatgggctctgctggatccttctcagaaaatcctgtaccgggacgtgatgagagagacataccggaatctgacctccgtgggcatcaactgggaatgttgggaccttgaagcctgcttcagaagcctgggaagaaacctgagagtgcaggtggtgaagagaaagtgcgagctgaccaacagcggcccctgcgccgagggcggcccaagcagcggcgcccctcctcccagcggcggcagcccagccggctccccaacctctaccgaggagggcacctctgagtccgccacccccgagagcggccctggcacctccaccgagcccagcgagggcagcgcacccggcagccctgccggcagccccacctccacagaggagggaaccagcaccgagcccagcgaaggcagcgccccaggcaccagcaccgagcctagtgagcaggagattaaacggatcaacaagatcagaagaagacttgtgaaagacagcaacaccaagaaggccggcaagacaggccccatgaaaaccctgctggttagagtgatgacacccgatctgagagagcggctggaaaacctgagaaagaagcctgaaaatatcccccagcccatcagcaatacatctagagccaacctgaataagctgctgaccgattacaccgaaatgaagaaggcgatcctgcatgtgtactgggaagagttccagaaggaccctgtgggcctgatgagccgggtggcccagcctgccagcaagaagatcgatcagaacaagctgaaacctgagatggacgagaagggcaacctgaccaccgccggctttgcctgctctcagtgtggccagcccctgttcgtgtacaagctggagcaggtgtctgagaagggcaaggcttacaccaactacttcggacggtgcaatgtggccgagcacgaaaagctgatcctgctggcccagctgaagcccgagaaggatagcgacgaagccgtgacatatagcctgggaaagtttgggcagagggccctggatttctacagcattcatgtgaccaaggagtccacccaccccgtgaagcccctggcccagatcgccggaaacagatacgcctccggacctgtgggaaaggccctgagcgacgcatgtatgggcacaatcgcctccttcctgtctaagtaccaggacatcatcatcgaacaccagaaggtggtgaagggcaaccagaagagactggagagcctgcgggagctggccggcaaggaaaacctggaataccctagcgtgaccctgccacctcagcctcacaccaaggagggcgttgatgcctacaacgaagtgatcgcccgggtgcgaatgtgggtgaacctgaacctgtggcagaagctgaagctaagcagagatgatgccaagcctctgctgagactgaagggattcccttcctttcctctggtcgagagacaggccaacgaagtggactggtgggacatggtgtgtaacgtgaagaagctgatcaacgagaaaaaggaggatggcaaggtgttttggcagaatctggctggctacaagagacaggaagccctgagaccatacctgagcagcgaggaagatcggaagaagggaaagaaattcgctcggtaccagctgggcgacctgctgctgcacctggaaaagaagcacggcgaggactggggaaaggtgtacgacgaggcctgggagcggattgacaagaaagtggaaggcctgagcaagcacatcaagctggaagaggaacggagaagcgaggacgcccagagcaaggccgccctgaccgactggctgcgggctaaggccagcttcgtgatcgagggcctgaaggaggccgacaaggacgagttctgcagatgcgagctgaagctgcagaagtggtacggggacctgcggggaaagcccttcgccatcgaagccgagaacagcatcctggacatcagcggcttcagcaagcagtacaactgtgccttcatctggcagaaggacggcgtgaagaagctgaacctgtacctgatcatcaactacttcaagggcggcaagctgcggttcaagaagatcaaacctgaagccttcgaagccaacagattctacaccgtgatcaacaaaaagagcggcgagatcgtgcccatggaggtgaacttcaacttcgacgaccccaacctgatcatcctgcctctggcctttggcaagagacagggcagagaattcatctggaacgacctgctgtccctggaaaccggcagcctgaagctggccaacggaagagtgatcgagaagacactgtacaacagaagaacccggcaggatgagcctgccctgttcgtggccctgaccttcgagcggcgggaggtcctggactcctccaatatcaaaccaatgaacctgatcggcgtggcaagaggcgaaaacatccccgccgtgatcgccctgaccgaccccgagggctgcccactgagccggtttaaggatagcctgggaaacccaacccacatcctgagaatcggcgagagctataaggagaagcagcggaccatccaggccaagaaggaggtggagcagcggagagccggcggctacagccggaagtacgccagcaaagccaagaatctggcagacgatatggtgagaaacaccgctagagatctgctgtactacgccgtgacccaggatgccatgctgatcttcgccaacctgagccggggcttcggccggcagggcaagcggaccttcatggccgagagacagtacacacggatggaggactggctgaccgccaagctggcctacgagggcctgagcaagacctacctgtccaagacactggcccagtacacctccaagacatgcagcaactgtgggtttaccatcaccagcgccgactacgacagggtgctggagaagctgaagaagacagcaacaggctggatgaccacaattaacggcaaggagctgaaggtggagggccagattacctactacaacagatacaagagacagaacgtagtcaaggacctgtccgtcgagctggatagactgagcgaagaatctgtgaacaacgacatctcctcctggacaaagggcagaagcggagaagctctgagcctcctgaagaaaagattctcccatagacccgtgcaggagaagttcgtgtgcctgaactgcggcttcgagacacacgcagccgagcaagccgccctgaacatcgccagatcctggctgttcctgcggagccaggagtacaagaaataccagacaaacaagacaaccggcaacaccgataagagagccttcgtcgagacctggcagtccttttaccggaagaagcttaaggaggtgtggaaacctgccgtgcggtctggcggatctggcggaggctccagcaaggcccccatcaccttcggcgacctggccatctacttcagccaggaggagtgggagtggctgagccccatccagaaggacctgtacgaggacgtgatgctggagaactacaggaacctggtgagcctgggcctgagcttcaggaggcccaacgtgatcaccctgctggagaagggcaaggccccctggatgatcgagcccgtgaggaggaggagggcccccgagctgaccgaggccagcggcggcccaagcagcggcgcccctcctcccagcggcggcagcccagccggctccccaacctctaccgaggagggcacctctgagtccgccacccccgagagcggccctggcacctccaccgagcccagcgagggcagcgcacccggcagccctgccggcagccccacctccacagaggagggaaccagcaccgagcccagcgaaggcagcgccccaggcaccagcaccgagcctagtgagcaggagattaaacggatcaacaagatcagaagaagacttgtgaaagacagcaacaccaagaaggccggcaagacaggccccatgaaaaccctgctggttagagtgatgacacccgatctgagagagcggctggaaaacctgagaaagaagcctgaaaatatcccccagcccatcagcaatacatctagagccaacctgaataagctgctgaccgattacaccgaaatgaagaaggcgatcctgcatgtgtactgggaagagttccagaaggaccctgtgggcctgatgagccgggtggcccagcctgccagcaagaagatcgatcagaacaagctgaaacctgagatggacgagaagggcaacctgaccaccgccggctttgcctgctctcagtgtggccagcccctgttcgtgtacaagctggagcaggtgtctgagaagggcaaggcttacaccaactacttcggacggtgcaatgtggccgagcacgaaaagctgatcctgctggcccagctgaagcccgagaaggatagcgacgaagccgtgacatatagcctgggaaagtttgggcagagggccctggatttctacagcattcatgtgaccaaggagtccacccaccccgtgaagcccctggcccagatcgccggaaacagatacgcctccggacctgtgggaaaggccctgagcgacgcatgtatgggcacaatcgcctccttcctgtctaagtaccaggacatcatcatcgaacaccagaaggtggtgaagggcaaccagaagagactggagagcctgcgggagctggccggcaaggaaaacctggaataccctagcgtgaccctgccacctcagcctcacaccaaggagggcgttgatgcctacaacgaagtgatcgcccgggtgcgaatgtgggtgaacctgaacctgtggcagaagctgaagctaagcagagatgatgccaagcctctgctgagactgaagggattcccttcctttcctctggtcgagagacaggccaacgaagtggactggtgggacatggtgtgtaacgtgaagaagctgatcaacgagaaaaaggaggatggcaaggtgttttggcagaatctggctggctacaagagacaggaagccctgagaccatacctgagcagcgaggaagatcggaagaagggaaagaaattcgctcggtaccagctgggcgacctgctgctgcacctggaaaagaagcacggcgaggactggggaaaggtgtacgacgaggcctgggagcggattgacaagaaagtggaaggcctgagcaagcacatcaagctggaagaggaacggagaagcgaggacgcccagagcaaggccgccctgaccgactggctgcgggctaaggccagcttcgtgatcgagggcctgaaggaggccgacaaggacgagttctgcagatgcgagctgaagctgcagaagtggtacggggacctgcggggaaagcccttcgccatcgaagccgagaacagcatcctggacatcagcggcttcagcaagcagtacaactgtgccttcatctggcagaaggacggcgtgaagaagctgaacctgtacctgatcatcaactacttcaagggcggcaagctgcggttcaagaagatcaaacctgaagccttcgaagccaacagattctacaccgtgatcaacaaaaagagcggcgagatcgtgcccatggaggtgaacttcaacttcgacgaccccaacctgatcatcctgcctctggcctttggcaagagacagggcagagaattcatctggaacgacctgctgtccctggaaaccggcagcctgaagctggccaacggaagagtgatcgagaagacactgtacaacagaagaacccggcaggatgagcctgccctgttcgtggccctgaccttcgagcggcgggaggtcctggactcctccaatatcaaaccaatgaacctgatcggcgtggcaagaggcgaaaacatccccgccgtgatcgccctgaccgaccccgagggctgcccactgagccggtttaaggatagcctgggaaacccaacccacatcctgagaatcggcgagagctataaggagaagcagcggaccatccaggccaagaaggaggtggagcagcggagagccggcggctacagccggaagtacgccagcaaagccaagaatctggcagacgatatggtgagaaacaccgctagagatctgctgtactacgccgtgacccaggatgccatgctgatcttcgccaacctgagccggggcttcggccggcagggcaagcggaccttcatggccgagagacagtacacacggatggaggactggctgaccgccaagctggcctacgagggcctgagcaagacctacctgtccaagacactggcccagtacacctccaagacatgcagcaactgtgggtttaccatcaccagcgccgactacgacagggtgctggagaagctgaagaagacagcaacaggctggatgaccacaattaacggcaaggagctgaaggtggagggccagattacctactacaacagatacaagagacagaacgtagtcaaggacctgtccgtcgagctggatagactgagcgaagaatctgtgaacaacgacatctcctcctggacaaagggcagaagcggagaagctctgagcctcctgaagaaaagattctcccatagacccgtgcaggagaagttcgtgtgcctgaactgcggcttcgagacacacgcagccgagcaagccgccctgaacatcgccagatcctggctgttcctgcggagccaggagtacaagaaataccagacaaacaagacaaccggcaacaccgataagagagccttcgtcgagacctggcagtccttttaccggaagaagcttaaggaggtgtggaaacctgccgtgcggtctggcggatctggcggaggctcctagcaaggcccccatcaccttcggcgacctggccatctacttcagccaggaggagtgggagtggctgagccccatccagaaggacctgtacgaggacgtgatgctggagaactacaggaacctggtgagcctgggcctgagcttcaggaggcccaacgtgatcaccctgctggagaagggcaaggccccctggatgatcgagcccgtgaggaggaggagggcccccgagctgaccgaggccagcggatctggctccggcagcggccccaagaaaaagagaaaagtctaagctgccttctgcggggcttgccttctggccatgcccttcttctctcccttgcacctgtacctcttggtctttgaataaagcctgagtaggaaggctagcaaaaaaaaaaaaaaaaaaaaaaaaaaaaaaaaaaaaaaaaaaaaaaaaaaaaaaaaaaaaaaaaaaaaaaaaaaaaaaaa

SEQ ID NO: 15328 - RNA, 9485 nt, synthetic construct
  source 1..9485: mol_type = other RNA
aggaaataagagagaaaagaagagtaagaagaaatataagagccaccatggcccctaagaagaagcgtaaagtgagccggatggaacgcctcgtctacgaggtgcggcagaagtgcagaaacatcgaggacatctgcatctcctgcggatctctgaacgtgaccctggagcacccactgttcatcggcggcatgtgccagaactgtaaaaactgttttctggagtgtgcctatcaatacgacgatgacggctaccagagctactgcaccatctgttgcggcggaagagaggtgctgatgtgtggaaataacaactgctgccggtgcttctgcgtggaatgcgtggacctgctggtgggccccggcgccgcccaggccgctattaaggaagatccttggaactgctacatgtgcggccacaagggcacatacggcctgctgagacggagagaggactggcctagcagactgcagatgttcttcgccaataaccacgaccaggagttcgacccccctaaggtgtaccctcccgtccccgccgagaagagaaagcccatccgggtcctgagcctgttcgatggcatcgccaccggtctgctggtgctgaaggacctgggcatccaggtggataggtacattgcctccgaggtgtgcgaggactccatcaccgtgggaatggtgcgtcatcagggcaagatcatgtacgtgggcgacgtgcggagcgtgacacagaagcatatccaggagtggggccctttcgacctggtgatcggcggcagcccttgcaatgacctgagcatcgtgaacccagcccggaagggcctgtacgagggaaccggcagactgttcttcgagttttacagactgctgcacgacgcccggcctaaggaaggcgacgaccggcccttcttttggctgttcgagaatgtggtggccatgggagtcagcgacaagcgggatattagccggttcctggagagcaaccccgtgatgatcgatgccaaggaagtgagcgccgcccaccgggccagatacttctggggcaatctgcctggcatgaacagacccctggccagcaccgtgaacgacaagctggagctgcaggagtgcctggagcacggccggatcgccaagttcagcaaggtgagaaccatcaccacccgaagcaacagcatcaaacaaggcaaggaccagcactttcctgtgttcatgaacgagaaggaggacatcctgtggtgtaccgagatggagagagtgttcgggttcccagtccactacacagatgtcagcaacatgtctagactggccagacagagactgctgggaagaagctggtccgtccctgtgatcagacacctgttcgcccctctgaaggagtacttcgcctgcgtgagcagcggcaacagcaacgccaacagccggggccccagcttctctagcggcctggtgccactgtccctgagagggagccacatgggccccatggagatctacaaaaccgtgagcgcctggaagcggcagcctgtgcgcgtgctgagcctgtttcggaatatcgataaagtcctgaaaagcctgggattcctggagagcggctctggctccggcggtggcaccctgaagtacgtggaggatgtgacaaacgtggtcagacgggatgtggagaagtggggccccttcgatctggtgtacggcagcacccaacccctgggcagctcttgtgaccggtgccctggctggtacatgtttcagttccaccggatcctgcagtacgccctgccgagacaggagtcccagcggccattcttttggattttcatggacaacttgctgctgaccgaggatgaccaggaaactaccactcggttcctgcagaccgaagccgtgaccctgcaggacgtgagaggccgggactaccagaacgccatgcgggtgtggtccaacatccctggactgaaaagcaagcacgcacctctgacccctaaagaagaggagtacctgcaggcccaggtgcggagcagaagcaagctggacgcccctaaggtggatctgctggtgaagaattgcctcctgcccctgagagagtacttcaagtatttcagccagaatagtctgcccctgggaggcagcggcggcggcgccctggtgacatttgaggacgtcgccgtgcggttcacccaggaggaatgggctctgctggatccttctcagaaaatcctgtaccgggacgtgatgagagagacataccggaatctgacctccgtgggcatcaactgggaatgttgggaccttgaagcctgcttcagaagcctgggaagaaacctgagagtgcaggtggtgaagagaaagtgcgagctgaccaacagcggcccctgcgccgagggcggcccaagcagcggcgcccctcctcccagcggcggcagcccagccggctccccaacctctaccgaggagggcacctctgagtccgccacccccgagagcggccctggcacctccaccgagcccagcgagggcagcgcacccggcagccctgccggcagccccacctccacagaggagggaaccagcaccgagcccagcgaaggcagcgccccaggcaccagcaccgagcctagtgagcaggagattaaacggatcaacaagatcagaagaagacttgtgaaagacagcaacaccaagaaggccggcaagacaggccccatgaaaaccctgctggttagagtgatgacacccgatctgagagagcggctggaaaacctgagaaagaagcctgaaaatatcccccagcccatcagcaatacatctagagccaacctgaataagctgctgaccgattacaccgaaatgaagaaggcgatcctgcatgtgtactgggaagagttccagaaggaccctgtgggcctgatgagccgggtggcccagcctgccagcaagaagatcgatcagaacaagctgaaacctgagatggacgagaagggcaacctgaccaccgccggctttgcctgctctcagtgtggccagcccctgttcgtgtacaagctggagcaggtgtctgagaagggcaaggcttacaccaactacttcggacggtgcaatgtggccgagcacgaaaagctgatcctgctggcccagctgaagcccgagaaggatagcgacgaagccgtgacatatagcctgggaaagtttgggcagagggccctggatttctacagcattcatgtgaccaaggagtccacccaccccgtgaagcccctggcccagatcgccggaaacagatacgcctccggacctgtgggaaaggccctgagcgacgcatgtatgggcacaatcgcctccttcctgtctaagtaccaggacatcatcatcgaacaccagaaggtggtgaagggcaaccagaagagactggagagcctgcgggagctggccggcaaggaaaacctggaataccctagcgtgaccctgccacctcagcctcacaccaaggagggcgttgatgcctacaacgaagtgatcgcccgggtgcgaatgtgggtgaacctgaacctgtggcagaagctgaagctaagcagagatgatgccaagcctctgctgagactgaagggattcccttcctttcctctggtcgagagacaggccaacgaagtggactggtgggacatggtgtgtaacgtgaagaagctgatcaacgagaaaaaggaggatggcaaggtgttttggcagaatctggctggctacaagagacaggaagccctgagaccatacctgagcagcgaggaagatcggaagaagggaaagaaattcgctcggtaccagctgggcgacctgctgctgcacctggaaaagaagcacggcgaggactggggaaaggtgtacgacgaggcctgggagcggattgacaagaaagtggaaggcctgagcaagcacatcaagctggaagaggaacggagaagcgaggacgcccagagcaaggccgccctgaccgactggctgcgggctaaggccagcttcgtgatcgagggcctgaaggaggccgacaaggacgagttctgcagatgcgagctgaagctgcagaagtggtacggggacctgcggggaaagcccttcgccatcgaagccgagaacagcatcctggacatcagcggcttcagcaagcagtacaactgtgccttcatctggcagaaggacggcgtgaagaagctgaacctgtacctgatcatcaactacttcaagggcggcaagctgcggttcaagaagatcaaacctgaagccttcgaagccaacagattctacaccgtgatcaacaaaaagagcggcgagatcgtgcccatggaggtgaacttcaacttcgacgaccccaacctgatcatcctgcctctggcctttggcaagagacagggcagagaattcatctggaacgacctgctgtccctggaaaccggcagcctgaagctggccaacggaagagtgatcgagaagacactgtacaacagaagaacccggcaggatgagcctgccctgttcgtggccctgaccttcgagcggcgggaggtcctggactcctccaatatcaaaccaatgaacctgatcggcgtggcaagaggcgaaaacatccccgccgtgatcgccctgaccgaccccgagggctgcccactgagccggtttaaggatagcctgggaaacccaacccacatcctgagaatcggcgagagctataaggagaagcagcggaccatccaggccaagaaggaggtggagcagcggagagccggcggctacagccggaagtacgccagcaaagccaagaatctggcagacgatatggtgagaaacaccgctagagatctgctgtactacgccgtgacccaggatgccatgctgatcttcgccaacctgagccggggcttcggccggcagggcaagcggaccttcatggccgagagacagtacacacggatggaggactggctgaccgccaagctggcctacgagggcctgagcaagacctacctgtccaagacactggcccagtacacctccaagacatgcagcaactgtgggtttaccatcaccagcgccgactacgacagggtgctggagaagctgaagaagacagcaacaggctggatgaccacaattaacggcaaggagctgaaggtggagggccagattacctactacaacagatacaagagacagaacgtagtcaaggacctgtccgtcgagctggatagactgagcgaagaatctgtgaacaacgacatctcctcctggacaaagggcagaagcggagaagctctgagcctcctgaagaaaagattctcccatagacccgtgcaggagaagttcgtgtgcctgaactgcggcttcgagacacacgcagccgagcaagccgccctgaacatcgccagatcctggctgttcctgcggagccaggagtacaagaaataccagacaaacaagacaaccggcaacaccgataagagagccttcgtcgagacctggcagtccttttaccggaagaagcttaaggaggtgtggaaacctgccgtgcggtctggcggatctggcggaggctccagcaaggcccccgtgaccttcggcgacctggccatctacttcagccaggaggagtgggagtggctgagccccatccagaaggacctgtacgaggacgtgatgctggagaactacaggaacctggtgagcctgggcctgagcttcaggaggcccaacgtgatcaccctgctggagaagggcaaggccccctggatggtggagcccgtgaggaggaggagggcccccgacagcggcagcaagtgcggcggcccaagcagcggcgcccctcctcccagcggcggcagcccagccggctccccaacctctaccgaggagggcacctctgagtccgccacccccgagagcggccctggcacctccaccgagcccagcgagggcagcgcacccggcagccctgccggcagccccacctccacagaggagggaaccagcaccgagcccagcgaaggcagcgccccaggcaccagcaccgagcctagtgagcaggagattaaacggatcaacaagatcagaagaagacttgtgaaagacagcaacaccaagaaggccggcaagacaggccccatgaaaaccctgctggttagagtgatgacacccgatctgagagagcggctggaaaacctgagaaagaagcctgaaaatatcccccagcccatcagcaatacatctagagccaacctgaataagctgctgaccgattacaccgaaatgaagaaggcgatcctgcatgtgtactgggaagagttccagaaggaccctgtgggcctgatgagccgggtggcccagcctgccagcaagaagatcgatcagaacaagctgaaacctgagatggacgagaagggcaacctgaccaccgccggctttgcctgctctcagtgtggccagcccctgttcgtgtacaagctggagcaggtgtctgagaagggcaaggcttacaccaactacttcggacggtgcaatgtggccgagcacgaaaagctgatcctgctggcccagctgaagcccgagaaggatagcgacgaagccgtgacatatagcctgggaaagtttgggcagagggccctggatttctacagcattcatgtgaccaaggagtccacccaccccgtgaagcccctggcccagatcgccggaaacagatacgcctccggacctgtgggaaaggccctgagcgacgcatgtatgggcacaatcgcctccttcctgtctaagtaccaggacatcatcatcgaacaccagaaggtggtgaagggcaaccagaagagactggagagcctgcgggagctggccggcaaggaaaacctggaataccctagcgtgaccctgccacctcagcctcacaccaaggagggcgttgatgcctacaacgaagtgatcgcccgggtgcgaatgtgggtgaacctgaacctgtggcagaagctgaagctaagcagagatgatgccaagcctctgctgagactgaagggattcccttcctttcctctggtcgagagacaggccaacgaagtggactggtgggacatggtgtgtaacgtgaagaagctgatcaacgagaaaaaggaggatggcaaggtgttttggcagaatctggctggctacaagagacaggaagccctgagaccatacctgagcagcgaggaagatcggaagaagggaaagaaattcgctcggtaccagctgggcgacctgctgctgcacctggaaaagaagcacggcgaggactggggaaaggtgtacgacgaggcctgggagcggattgacaagaaagtggaaggcctgagcaagcacatcaagctggaagaggaacggagaagcgaggacgcccagagcaaggccgccctgaccgactggctgcgggctaaggccagcttcgtgatcgagggcctgaaggaggccgacaaggacgagttctgcagatgcgagctgaagctgcagaagtggtacggggacctgcggggaaagcccttcgccatcgaagccgagaacagcatcctggacatcagcggcttcagcaagcagtacaactgtgccttcatctggcagaaggacggcgtgaagaagctgaacctgtacctgatcatcaactacttcaagggcggcaagctgcggttcaagaagatcaaacctgaagccttcgaagccaacagattctacaccgtgatcaacaaaaagagcggcgagatcgtgcccatggaggtgaacttcaacttcgacgaccccaacctgatcatcctgcctctggcctttggcaagagacagggcagagaattcatctggaacgacctgctgtccctggaaaccggcagcctgaagctggccaacggaagagtgatcgagaagacactgtacaacagaagaacccggcaggatgagcctgccctgttcgtggccctgaccttcgagcggcgggaggtcctggactcctccaatatcaaaccaatgaacctgatcggcgtggcaagaggcgaaaacatccccgccgtgatcgccctgaccgaccccgagggctgcccactgagccggtttaaggatagcctgggaaacccaacccacatcctgagaatcggcgagagctataaggagaagcagcggaccatccaggccaagaaggaggtggagcagcggagagccggcggctacagccggaagtacgccagcaaagccaagaatctggcagacgatatggtgagaaacaccgctagagatctgctgtactacgccgtgacccaggatgccatgctgatcttcgccaacctgagccggggcttcggccggcagggcaagcggaccttcatggccgagagacagtacacacggatggaggactggctgaccgccaagctggcctacgagggcctgagcaagacctacctgtccaagacactggcccagtacacctccaagacatgcagcaactgtgggtttaccatcaccagcgccgactacgacagggtgctggagaagctgaagaagacagcaacaggctggatgaccacaattaacggcaaggagctgaaggtggagggccagattacctactacaacagatacaagagacagaacgtagtcaaggacctgtccgtcgagctggatagactgagcgaagaatctgtgaacaacgacatctcctcctggacaaagggcagaagcggagaagctctgagcctcctgaagaaaagattctcccatagacccgtgcaggagaagttcgtgtgcctgaactgcggcttcgagacacacgcagccgagcaagccgccctgaacatcgccagatcctggctgttcctgcggagccaggagtacaagaaataccagacaaacaagacaaccggcaacaccgataagagagccttcgtcgagacctggcagtccttttaccggaagaagcttaaggaggtgtggaaacctgccgtgcggtctggcggatctggcggaggctcctagcaaggcccccgtgaccttcggcgacctggccatctacttcagccaggaggagtgggagtggctgagccccatccagaaggacctgtacgaggacgtgatgctggagaactacaggaacctggtgagcctgggcctgagcttcaggaggcccaacgtgatcaccctgctggagaagggcaaggccccctggatggtggagcccgtgaggaggaggagggcccccgacagcggcagcaagtgcggatctggctccggcagcggccccaagaaaaagagaaaagtctaagctgccttctgcggggcttgccttctggccatgcccttcttctctcccttgcacctgtacctcttggtctttgaataaagcctgagtaggaaggctagcaaaaaaaaaaaaaaaaaaaaaaaaaaaaaaaaaaaaaaaaaaaaaaaaaaaaaaaaaaaaaaaaaaaaaaaaaaaaaaaa

SEQ ID NO: 15329 - RNA, 9485 nt, synthetic construct
  source 1..9485: mol_type = other RNA
aggaaataagagagaaaagaagagtaagaagaaatataagagccaccatggcccctaagaagaagcgtaaagtgagccggatggaacgcctcgtctacgaggtgcggcagaagtgcagaaacatcgaggacatctgcatctcctgcggatctctgaacgtgaccctggagcacccactgttcatcggcggcatgtgccagaactgtaaaaactgttttctggagtgtgcctatcaatacgacgatgacggctaccagagctactgcaccatctgttgcggcggaagagaggtgctgatgtgtggaaataacaactgctgccggtgcttctgcgtggaatgcgtggacctgctggtgggccccggcgccgcccaggccgctattaaggaagatccttggaactgctacatgtgcggccacaagggcacatacggcctgctgagacggagagaggactggcctagcagactgcagatgttcttcgccaataaccacgaccaggagttcgacccccctaaggtgtaccctcccgtccccgccgagaagagaaagcccatccgggtcctgagcctgttcgatggcatcgccaccggtctgctggtgctgaaggacctgggcatccaggtggataggtacattgcctccgaggtgtgcgaggactccatcaccgtgggaatggtgcgtcatcagggcaagatcatgtacgtgggcgacgtgcggagcgtgacacagaagcatatccaggagtggggccctttcgacctggtgatcggcggcagcccttgcaatgacctgagcatcgtgaacccagcccggaagggcctgtacgagggaaccggcagactgttcttcgagttttacagactgctgcacgacgcccggcctaaggaaggcgacgaccggcccttcttttggctgttcgagaatgtggtggccatgggagtcagcgacaagcgggatattagccggttcctggagagcaaccccgtgatgatcgatgccaaggaagtgagcgccgcccaccgggccagatacttctggggcaatctgcctggcatgaacagacccctggccagcaccgtgaacgacaagctggagctgcaggagtgcctggagcacggccggatcgccaagttcagcaaggtgagaaccatcaccacccgaagcaacagcatcaaacaaggcaaggaccagcactttcctgtgttcatgaacgagaaggaggacatcctgtggtgtaccgagatggagagagtgttcgggttcccagtccactacacagatgtcagcaacatgtctagactggccagacagagactgctgggaagaagctggtccgtccctgtgatcagacacctgttcgcccctctgaaggagtacttcgcctgcgtgagcagcggcaacagcaacgccaacagccggggccccagcttctctagcggcctggtgccactgtccctgagagggagccacatgggccccatggagatctacaaaaccgtgagcgcctggaagcggcagcctgtgcgcgtgctgagcctgtttcggaatatcgataaagtcctgaaaagcctgggattcctggagagcggctctggctccggcggtggcaccctgaagtacgtggaggatgtgacaaacgtggtcagacgggatgtggagaagtggggccccttcgatctggtgtacggcagcacccaacccctgggcagctcttgtgaccggtgccctggctggtacatgtttcagttccaccggatcctgcagtacgccctgccgagacaggagtcccagcggccattcttttggattttcatggacaacttgctgctgaccgaggatgaccaggaaactaccactcggttcctgcagaccgaagccgtgaccctgcaggacgtgagaggccgggactaccagaacgccatgcgggtgtggtccaacatccctggactgaaaagcaagcacgcacctctgacccctaaagaagaggagtacctgcaggcccaggtgcggagcagaagcaagctggacgcccctaaggtggatctgctggtgaagaattgcctcctgcccctgagagagtacttcaagtatttcagccagaatagtctgcccctgggaggcagcggcggcggcgccctggtgacatttgaggacgtcgccgtgcggttcacccaggaggaatgggctctgctggatccttctcagaaaatcctgtaccgggacgtgatgagagagacataccggaatctgacctccgtgggcatcaactgggaatgttgggaccttgaagcctgcttcagaagcctgggaagaaacctgagagtgcaggtggtgaagagaaagtgcgagctgaccaacagcggcccctgcgccgagggcggcccaagcagcggcgcccctcctcccagcggcggcagcccagccggctccccaacctctaccgaggagggcacctctgagtccgccacccccgagagcggccctggcacctccaccgagcccagcgagggcagcgcacccggcagccctgccggcagccccacctccacagaggagggaaccagcaccgagcccagcgaaggcagcgccccaggcaccagcaccgagcctagtgagcaggagattaaacggatcaacaagatcagaagaagacttgtgaaagacagcaacaccaagaaggccggcaagacaggccccatgaaaaccctgctggttagagtgatgacacccgatctgagagagcggctggaaaacctgagaaagaagcctgaaaatatcccccagcccatcagcaatacatctagagccaacctgaataagctgctgaccgattacaccgaaatgaagaaggcgatcctgcatgtgtactgggaagagttccagaaggaccctgtgggcctgatgagccgggtggcccagcctgccagcaagaagatcgatcagaacaagctgaaacctgagatggacgagaagggcaacctgaccaccgccggctttgcctgctctcagtgtggccagcccctgttcgtgtacaagctggagcaggtgtctgagaagggcaaggcttacaccaactacttcggacggtgcaatgtggccgagcacgaaaagctgatcctgctggcccagctgaagcccgagaaggatagcgacgaagccgtgacatatagcctgggaaagtttgggcagagggccctggatttctacagcattcatgtgaccaaggagtccacccaccccgtgaagcccctggcccagatcgccggaaacagatacgcctccggacctgtgggaaaggccctgagcgacgcatgtatgggcacaatcgcctccttcctgtctaagtaccaggacatcatcatcgaacaccagaaggtggtgaagggcaaccagaagagactggagagcctgcgggagctggccggcaaggaaaacctggaataccctagcgtgaccctgccacctcagcctcacaccaaggagggcgttgatgcctacaacgaagtgatcgcccgggtgcgaatgtgggtgaacctgaacctgtggcagaagctgaagctaagcagagatgatgccaagcctctgctgagactgaagggattcccttcctttcctctggtcgagagacaggccaacgaagtggactggtgggacatggtgtgtaacgtgaagaagctgatcaacgagaaaaaggaggatggcaaggtgttttggcagaatctggctggctacaagagacaggaagccctgagaccatacctgagcagcgaggaagatcggaagaagggaaagaaattcgctcggtaccagctgggcgacctgctgctgcacctggaaaagaagcacggcgaggactggggaaaggtgtacgacgaggcctgggagcggattgacaagaaagtggaaggcctgagcaagcacatcaagctggaagaggaacggagaagcgaggacgcccagagcaaggccgccctgaccgactggctgcgggctaaggccagcttcgtgatcgagggcctgaaggaggccgacaaggacgagttctgcagatgcgagctgaagctgcagaagtggtacggggacctgcggggaaagcccttcgccatcgaagccgagaacagcatcctggacatcagcggcttcagcaagcagtacaactgtgccttcatctggcagaaggacggcgtgaagaagctgaacctgtacctgatcatcaactacttcaagggcggcaagctgcggttcaagaagatcaaacctgaagccttcgaagccaacagattctacaccgtgatcaacaaaaagagcggcgagatcgtgcccatggaggtgaacttcaacttcgacgaccccaacctgatcatcctgcctctggcctttggcaagagacagggcagagaattcatctggaacgacctgctgtccctggaaaccggcagcctgaagctggccaacggaagagtgatcgagaagacactgtacaacagaagaacccggcaggatgagcctgccctgttcgtggccctgaccttcgagcggcgggaggtcctggactcctccaatatcaaaccaatgaacctgatcggcgtggcaagaggcgaaaacatccccgccgtgatcgccctgaccgaccccgagggctgcccactgagccggtttaaggatagcctgggaaacccaacccacatcctgagaatcggcgagagctataaggagaagcagcggaccatccaggccaagaaggaggtggagcagcggagagccggcggctacagccggaagtacgccagcaaagccaagaatctggcagacgatatggtgagaaacaccgctagagatctgctgtactacgccgtgacccaggatgccatgctgatcttcgccaacctgagccggggcttcggccggcagggcaagcggaccttcatggccgagagacagtacacacggatggaggactggctgaccgccaagctggcctacgagggcctgagcaagacctacctgtccaagacactggcccagtacacctccaagacatgcagcaactgtgggtttaccatcaccagcgccgactacgacagggtgctggagaagctgaagaagacagcaacaggctggatgaccacaattaacggcaaggagctgaaggtggagggccagattacctactacaacagatacaagagacagaacgtagtcaaggacctgtccgtcgagctggatagactgagcgaagaatctgtgaacaacgacatctcctcctggacaaagggcagaagcggagaagctctgagcctcctgaagaaaagattctcccatagacccgtgcaggagaagttcgtgtgcctgaactgcggcttcgagacacacgcagccgagcaagccgccctgaacatcgccagatcctggctgttcctgcggagccaggagtacaagaaataccagacaaacaagacaaccggcaacaccgataagagagccttcgtcgagacctggcagtccttttaccggaagaagcttaaggaggtgtggaaacctgccgtgcggtctggcggatctggcggaggctccatggtgagcttcgaggacgtggccgtgctgctgagccaggaggagtgggactgcctgatccccgcccagaggggcctgtacagggacgtgatgctggagacctacggcaacctggtgagcctgggcctgcaggccagcaagcccgacgtgatcagcaggctggagcagggcgacgagccctggaccacccacaccctgaggacccagggcagctggagctggaggcacaagagggagggctacggcggcccaagcagcggcgcccctcctcccagcggcggcagcccagccggctccccaacctctaccgaggagggcacctctgagtccgccacccccgagagcggccctggcacctccaccgagcccagcgagggcagcgcacccggcagccctgccggcagccccacctccacagaggagggaaccagcaccgagcccagcgaaggcagcgccccaggcaccagcaccgagcctagtgagcaggagattaaacggatcaacaagatcagaagaagacttgtgaaagacagcaacaccaagaaggccggcaagacaggccccatgaaaaccctgctggttagagtgatgacacccgatctgagagagcggctggaaaacctgagaaagaagcctgaaaatatcccccagcccatcagcaatacatctagagccaacctgaataagctgctgaccgattacaccgaaatgaagaaggcgatcctgcatgtgtactgggaagagttccagaaggaccctgtgggcctgatgagccgggtggcccagcctgccagcaagaagatcgatcagaacaagctgaaacctgagatggacgagaagggcaacctgaccaccgccggctttgcctgctctcagtgtggccagcccctgttcgtgtacaagctggagcaggtgtctgagaagggcaaggcttacaccaactacttcggacggtgcaatgtggccgagcacgaaaagctgatcctgctggcccagctgaagcccgagaaggatagcgacgaagccgtgacatatagcctgggaaagtttgggcagagggccctggatttctacagcattcatgtgaccaaggagtccacccaccccgtgaagcccctggcccagatcgccggaaacagatacgcctccggacctgtgggaaaggccctgagcgacgcatgtatgggcacaatcgcctccttcctgtctaagtaccaggacatcatcatcgaacaccagaaggtggtgaagggcaaccagaagagactggagagcctgcgggagctggccggcaaggaaaacctggaataccctagcgtgaccctgccacctcagcctcacaccaaggagggcgttgatgcctacaacgaagtgatcgcccgggtgcgaatgtgggtgaacctgaacctgtggcagaagctgaagctaagcagagatgatgccaagcctctgctgagactgaagggattcccttcctttcctctggtcgagagacaggccaacgaagtggactggtgggacatggtgtgtaacgtgaagaagctgatcaacgagaaaaaggaggatggcaaggtgttttggcagaatctggctggctacaagagacaggaagccctgagaccatacctgagcagcgaggaagatcggaagaagggaaagaaattcgctcggtaccagctgggcgacctgctgctgcacctggaaaagaagcacggcgaggactggggaaaggtgtacgacgaggcctgggagcggattgacaagaaagtggaaggcctgagcaagcacatcaagctggaagaggaacggagaagcgaggacgcccagagcaaggccgccctgaccgactggctgcgggctaaggccagcttcgtgatcgagggcctgaaggaggccgacaaggacgagttctgcagatgcgagctgaagctgcagaagtggtacggggacctgcggggaaagcccttcgccatcgaagccgagaacagcatcctggacatcagcggcttcagcaagcagtacaactgtgccttcatctggcagaaggacggcgtgaagaagctgaacctgtacctgatcatcaactacttcaagggcggcaagctgcggttcaagaagatcaaacctgaagccttcgaagccaacagattctacaccgtgatcaacaaaaagagcggcgagatcgtgcccatggaggtgaacttcaacttcgacgaccccaacctgatcatcctgcctctggcctttggcaagagacagggcagagaattcatctggaacgacctgctgtccctggaaaccggcagcctgaagctggccaacggaagagtgatcgagaagacactgtacaacagaagaacccggcaggatgagcctgccctgttcgtggccctgaccttcgagcggcgggaggtcctggactcctccaatatcaaaccaatgaacctgatcggcgtggcaagaggcgaaaacatccccgccgtgatcgccctgaccgaccccgagggctgcccactgagccggtttaaggatagcctgggaaacccaacccacatcctgagaatcggcgagagctataaggagaagcagcggaccatccaggccaagaaggaggtggagcagcggagagccggcggctacagccggaagtacgccagcaaagccaagaatctggcagacgatatggtgagaaacaccgctagagatctgctgtactacgccgtgacccaggatgccatgctgatcttcgccaacctgagccggggcttcggccggcagggcaagcggaccttcatggccgagagacagtacacacggatggaggactggctgaccgccaagctggcctacgagggcctgagcaagacctacctgtccaagacactggcccagtacacctccaagacatgcagcaactgtgggtttaccatcaccagcgccgactacgacagggtgctggagaagctgaagaagacagcaacaggctggatgaccacaattaacggcaaggagctgaaggtggagggccagattacctactacaacagatacaagagacagaacgtagtcaaggacctgtccgtcgagctggatagactgagcgaagaatctgtgaacaacgacatctcctcctggacaaagggcagaagcggagaagctctgagcctcctgaagaaaagattctcccatagacccgtgcaggagaagttcgtgtgcctgaactgcggcttcgagacacacgcagccgagcaagccgccctgaacatcgccagatcctggctgttcctgcggagccaggagtacaagaaataccagacaaacaagacaaccggcaacaccgataagagagccttcgtcgagacctggcagtccttttaccggaagaagcttaaggaggtgtggaaacctgccgtgcggtctggcggatctggcggaggctcctatggtgagcttcgaggacgtggccgtgctgctgagccaggaggagtgggactgcctgatccccgcccagaggggcctgtacagggacgtgatgctggagacctacggcaacctggtgagcctgggcctgcaggccagcaagcccgacgtgatcagcaggctggagcagggcgacgagccctggaccacccacaccctgaggacccagggcagctggagctggaggcacaagagggagggctacggatctggctccggcagcggccccaagaaaaagagaaaagtctaagctgccttctgcggggcttgccttctggccatgcccttcttctctcccttgcacctgtacctcttggtctttgaataaagcctgagtaggaaggctagcaaaaaaaaaaaaaaaaaaaaaaaaaaaaaaaaaaaaaaaaaaaaaaaaaaaaaaaaaaaaaaaaaaaaaaaaaaaaaaaa

SEQ ID NO: 15330 - RNA, 9485 nt, synthetic construct
  source 1..9485: mol_type = other RNA
aggaaataagagagaaaagaagagtaagaagaaatataagagccaccatggcccctaagaagaagcgtaaagtgagccggatggaacgcctcgtctacgaggtgcggcagaagtgcagaaacatcgaggacatctgcatctcctgcggatctctgaacgtgaccctggagcacccactgttcatcggcggcatgtgccagaactgtaaaaactgttttctggagtgtgcctatcaatacgacgatgacggctaccagagctactgcaccatctgttgcggcggaagagaggtgctgatgtgtggaaataacaactgctgccggtgcttctgcgtggaatgcgtggacctgctggtgggccccggcgccgcccaggccgctattaaggaagatccttggaactgctacatgtgcggccacaagggcacatacggcctgctgagacggagagaggactggcctagcagactgcagatgttcttcgccaataaccacgaccaggagttcgacccccctaaggtgtaccctcccgtccccgccgagaagagaaagcccatccgggtcctgagcctgttcgatggcatcgccaccggtctgctggtgctgaaggacctgggcatccaggtggataggtacattgcctccgaggtgtgcgaggactccatcaccgtgggaatggtgcgtcatcagggcaagatcatgtacgtgggcgacgtgcggagcgtgacacagaagcatatccaggagtggggccctttcgacctggtgatcggcggcagcccttgcaatgacctgagcatcgtgaacccagcccggaagggcctgtacgagggaaccggcagactgttcttcgagttttacagactgctgcacgacgcccggcctaaggaaggcgacgaccggcccttcttttggctgttcgagaatgtggtggccatgggagtcagcgacaagcgggatattagccggttcctggagagcaaccccgtgatgatcgatgccaaggaagtgagcgccgcccaccgggccagatacttctggggcaatctgcctggcatgaacagacccctggccagcaccgtgaacgacaagctggagctgcaggagtgcctggagcacggccggatcgccaagttcagcaaggtgagaaccatcaccacccgaagcaacagcatcaaacaaggcaaggaccagcactttcctgtgttcatgaacgagaaggaggacatcctgtggtgtaccgagatggagagagtgttcgggttcccagtccactacacagatgtcagcaacatgtctagactggccagacagagactgctgggaagaagctggtccgtccctgtgatcagacacctgttcgcccctctgaaggagtacttcgcctgcgtgagcagcggcaacagcaacgccaacagccggggccccagcttctctagcggcctggtgccactgtccctgagagggagccacatgggccccatggagatctacaaaaccgtgagcgcctggaagcggcagcctgtgcgcgtgctgagcctgtttcggaatatcgataaagtcctgaaaagcctgggattcctggagagcggctctggctccggcggtggcaccctgaagtacgtggaggatgtgacaaacgtggtcagacgggatgtggagaagtggggccccttcgatctggtgtacggcagcacccaacccctgggcagctcttgtgaccggtgccctggctggtacatgtttcagttccaccggatcctgcagtacgccctgccgagacaggagtcccagcggccattcttttggattttcatggacaacttgctgctgaccgaggatgaccaggaaactaccactcggttcctgcagaccgaagccgtgaccctgcaggacgtgagaggccgggactaccagaacgccatgcgggtgtggtccaacatccctggactgaaaagcaagcacgcacctctgacccctaaagaagaggagtacctgcaggcccaggtgcggagcagaagcaagctggacgcccctaaggtggatctgctggtgaagaattgcctcctgcccctgagagagtacttcaagtatttcagccagaatagtctgcccctgggaggcagcggcggcggcgccctggtgacatttgaggacgtcgccgtgcggttcacccaggaggaatgggctctgctggatccttctcagaaaatcctgtaccgggacgtgatgagagagacataccggaatctgacctccgtgggcatcaactgggaatgttgggaccttgaagcctgcttcagaagcctgggaagaaacctgagagtgcaggtggtgaagagaaagtgcgagctgaccaacagcggcccctgcgccgagggcggcccaagcagcggcgcccctcctcccagcggcggcagcccagccggctccccaacctctaccgaggagggcacctctgagtccgccacccccgagagcggccctggcacctccaccgagcccagcgagggcagcgcacccggcagccctgccggcagccccacctccacagaggagggaaccagcaccgagcccagcgaaggcagcgccccaggcaccagcaccgagcctagtgagcaggagattaaacggatcaacaagatcagaagaagacttgtgaaagacagcaacaccaagaaggccggcaagacaggccccatgaaaaccctgctggttagagtgatgacacccgatctgagagagcggctggaaaacctgagaaagaagcctgaaaatatcccccagcccatcagcaatacatctagagccaacctgaataagctgctgaccgattacaccgaaatgaagaaggcgatcctgcatgtgtactgggaagagttccagaaggaccctgtgggcctgatgagccgggtggcccagcctgccagcaagaagatcgatcagaacaagctgaaacctgagatggacgagaagggcaacctgaccaccgccggctttgcctgctctcagtgtggccagcccctgttcgtgtacaagctggagcaggtgtctgagaagggcaaggcttacaccaactacttcggacggtgcaatgtggccgagcacgaaaagctgatcctgctggcccagctgaagcccgagaaggatagcgacgaagccgtgacatatagcctgggaaagtttgggcagagggccctggatttctacagcattcatgtgaccaaggagtccacccaccccgtgaagcccctggcccagatcgccggaaacagatacgcctccggacctgtgggaaaggccctgagcgacgcatgtatgggcacaatcgcctccttcctgtctaagtaccaggacatcatcatcgaacaccagaaggtggtgaagggcaaccagaagagactggagagcctgcgggagctggccggcaaggaaaacctggaataccctagcgtgaccctgccacctcagcctcacaccaaggagggcgttgatgcctacaacgaagtgatcgcccgggtgcgaatgtgggtgaacctgaacctgtggcagaagctgaagctaagcagagatgatgccaagcctctgctgagactgaagggattcccttcctttcctctggtcgagagacaggccaacgaagtggactggtgggacatggtgtgtaacgtgaagaagctgatcaacgagaaaaaggaggatggcaaggtgttttggcagaatctggctggctacaagagacaggaagccctgagaccatacctgagcagcgaggaagatcggaagaagggaaagaaattcgctcggtaccagctgggcgacctgctgctgcacctggaaaagaagcacggcgaggactggggaaaggtgtacgacgaggcctgggagcggattgacaagaaagtggaaggcctgagcaagcacatcaagctggaagaggaacggagaagcgaggacgcccagagcaaggccgccctgaccgactggctgcgggctaaggccagcttcgtgatcgagggcctgaaggaggccgacaaggacgagttctgcagatgcgagctgaagctgcagaagtggtacggggacctgcggggaaagcccttcgccatcgaagccgagaacagcatcctggacatcagcggcttcagcaagcagtacaactgtgccttcatctggcagaaggacggcgtgaagaagctgaacctgtacctgatcatcaactacttcaagggcggcaagctgcggttcaagaagatcaaacctgaagccttcgaagccaacagattctacaccgtgatcaacaaaaagagcggcgagatcgtgcccatggaggtgaacttcaacttcgacgaccccaacctgatcatcctgcctctggcctttggcaagagacagggcagagaattcatctggaacgacctgctgtccctggaaaccggcagcctgaagctggccaacggaagagtgatcgagaagacactgtacaacagaagaacccggcaggatgagcctgccctgttcgtggccctgaccttcgagcggcgggaggtcctggactcctccaatatcaaaccaatgaacctgatcggcgtggcaagaggcgaaaacatccccgccgtgatcgccctgaccgaccccgagggctgcccactgagccggtttaaggatagcctgggaaacccaacccacatcctgagaatcggcgagagctataaggagaagcagcggaccatccaggccaagaaggaggtggagcagcggagagccggcggctacagccggaagtacgccagcaaagccaagaatctggcagacgatatggtgagaaacaccgctagagatctgctgtactacgccgtgacccaggatgccatgctgatcttcgccaacctgagccggggcttcggccggcagggcaagcggaccttcatggccgagagacagtacacacggatggaggactggctgaccgccaagctggcctacgagggcctgagcaagacctacctgtccaagacactggcccagtacacctccaagacatgcagcaactgtgggtttaccatcaccagcgccgactacgacagggtgctggagaagctgaagaagacagcaacaggctggatgaccacaattaacggcaaggagctgaaggtggagggccagattacctactacaacagatacaagagacagaacgtagtcaaggacctgtccgtcgagctggatagactgagcgaagaatctgtgaacaacgacatctcctcctggacaaagggcagaagcggagaagctctgagcctcctgaagaaaagattctcccatagacccgtgcaggagaagttcgtgtgcctgaactgcggcttcgagacacacgcagccgagcaagccgccctgaacatcgccagatcctggctgttcctgcggagccaggagtacaagaaataccagacaaacaagacaaccggcaacaccgataagagagccttcgtcgagacctggcagtccttttaccggaagaagcttaaggaggtgtggaaacctgccgtgcggtctggcggatctggcggaggctccaagcccggcgccgtgagcttcgccgacgtggccgtgtacttcagccccgaggagtggggctgcctgaggcccgcccagagggccctgtacagggacgtgatgagggagacctacggccacctgggcgccctgggcctgcccggccccaagcccgccctgatcagctggatggagggcgagagcgaggcctggaaccccgccgcccaggaccccgaggagggcgagaacctgggcggcgccctgggcggcccaagcagcggcgcccctcctcccagcggcggcagcccagccggctccccaacctctaccgaggagggcacctctgagtccgccacccccgagagcggccctggcacctccaccgagcccagcgagggcagcgcacccggcagccctgccggcagccccacctccacagaggagggaaccagcaccgagcccagcgaaggcagcgccccaggcaccagcaccgagcctagtgagcaggagattaaacggatcaacaagatcagaagaagacttgtgaaagacagcaacaccaagaaggccggcaagacaggccccatgaaaaccctgctggttagagtgatgacacccgatctgagagagcggctggaaaacctgagaaagaagcctgaaaatatcccccagcccatcagcaatacatctagagccaacctgaataagctgctgaccgattacaccgaaatgaagaaggcgatcctgcatgtgtactgggaagagttccagaaggaccctgtgggcctgatgagccgggtggcccagcctgccagcaagaagatcgatcagaacaagctgaaacctgagatggacgagaagggcaacctgaccaccgccggctttgcctgctctcagtgtggccagcccctgttcgtgtacaagctggagcaggtgtctgagaagggcaaggcttacaccaactacttcggacggtgcaatgtggccgagcacgaaaagctgatcctgctggcccagctgaagcccgagaaggatagcgacgaagccgtgacatatagcctgggaaagtttgggcagagggccctggatttctacagcattcatgtgaccaaggagtccacccaccccgtgaagcccctggcccagatcgccggaaacagatacgcctccggacctgtgggaaaggccctgagcgacgcatgtatgggcacaatcgcctccttcctgtctaagtaccaggacatcatcatcgaacaccagaaggtggtgaagggcaaccagaagagactggagagcctgcgggagctggccggcaaggaaaacctggaataccctagcgtgaccctgccacctcagcctcacaccaaggagggcgttgatgcctacaacgaagtgatcgcccgggtgcgaatgtgggtgaacctgaacctgtggcagaagctgaagctaagcagagatgatgccaagcctctgctgagactgaagggattcccttcctttcctctggtcgagagacaggccaacgaagtggactggtgggacatggtgtgtaacgtgaagaagctgatcaacgagaaaaaggaggatggcaaggtgttttggcagaatctggctggctacaagagacaggaagccctgagaccatacctgagcagcgaggaagatcggaagaagggaaagaaattcgctcggtaccagctgggcgacctgctgctgcacctggaaaagaagcacggcgaggactggggaaaggtgtacgacgaggcctgggagcggattgacaagaaagtggaaggcctgagcaagcacatcaagctggaagaggaacggagaagcgaggacgcccagagcaaggccgccctgaccgactggctgcgggctaaggccagcttcgtgatcgagggcctgaaggaggccgacaaggacgagttctgcagatgcgagctgaagctgcagaagtggtacggggacctgcggggaaagcccttcgccatcgaagccgagaacagcatcctggacatcagcggcttcagcaagcagtacaactgtgccttcatctggcagaaggacggcgtgaagaagctgaacctgtacctgatcatcaactacttcaagggcggcaagctgcggttcaagaagatcaaacctgaagccttcgaagccaacagattctacaccgtgatcaacaaaaagagcggcgagatcgtgcccatggaggtgaacttcaacttcgacgaccccaacctgatcatcctgcctctggcctttggcaagagacagggcagagaattcatctggaacgacctgctgtccctggaaaccggcagcctgaagctggccaacggaagagtgatcgagaagacactgtacaacagaagaacccggcaggatgagcctgccctgttcgtggccctgaccttcgagcggcgggaggtcctggactcctccaatatcaaaccaatgaacctgatcggcgtggcaagaggcgaaaacatccccgccgtgatcgccctgaccgaccccgagggctgcccactgagccggtttaaggatagcctgggaaacccaacccacatcctgagaatcggcgagagctataaggagaagcagcggaccatccaggccaagaaggaggtggagcagcggagagccggcggctacagccggaagtacgccagcaaagccaagaatctggcagacgatatggtgagaaacaccgctagagatctgctgtactacgccgtgacccaggatgccatgctgatcttcgccaacctgagccggggcttcggccggcagggcaagcggaccttcatggccgagagacagtacacacggatggaggactggctgaccgccaagctggcctacgagggcctgagcaagacctacctgtccaagacactggcccagtacacctccaagacatgcagcaactgtgggtttaccatcaccagcgccgactacgacagggtgctggagaagctgaagaagacagcaacaggctggatgaccacaattaacggcaaggagctgaaggtggagggccagattacctactacaacagatacaagagacagaacgtagtcaaggacctgtccgtcgagctggatagactgagcgaagaatctgtgaacaacgacatctcctcctggacaaagggcagaagcggagaagctctgagcctcctgaagaaaagattctcccatagacccgtgcaggagaagttcgtgtgcctgaactgcggcttcgagacacacgcagccgagcaagccgccctgaacatcgccagatcctggctgttcctgcggagccaggagtacaagaaataccagacaaacaagacaaccggcaacaccgataagagagccttcgtcgagacctggcagtccttttaccggaagaagcttaaggaggtgtggaaacctgccgtgcggtctggcggatctggcggaggctcctaagcccggcgccgtgagcttcgccgacgtggccgtgtacttcagccccgaggagtggggctgcctgaggcccgcccagagggccctgtacagggacgtgatgagggagacctacggccacctgggcgccctgggcctgcccggccccaagcccgccctgatcagctggatggagggcgagagcgaggcctggaaccccgccgcccaggaccccgaggagggcgagaacctgggcggcgccctgggatctggctccggcagcggccccaagaaaaagagaaaagtctaagctgccttctgcggggcttgccttctggccatgcccttcttctctcccttgcacctgtacctcttggtctttgaataaagcctgagtaggaaggctagcaaaaaaaaaaaaaaaaaaaaaaaaaaaaaaaaaaaaaaaaaaaaaaaaaaaaaaaaaaaaaaaaaaaaaaaaaaaaaaaa

SEQ ID NO: 15331 - RNA, 9485 nt, synthetic construct
  source 1..9485: mol_type = other RNA
aggaaataagagagaaaagaagagtaagaagaaatataagagccaccatggcccctaagaagaagcgtaaagtgagccggatggaacgcctcgtctacgaggtgcggcagaagtgcagaaacatcgaggacatctgcatctcctgcggatctctgaacgtgaccctggagcacccactgttcatcggcggcatgtgccagaactgtaaaaactgttttctggagtgtgcctatcaatacgacgatgacggctaccagagctactgcaccatctgttgcggcggaagagaggtgctgatgtgtggaaataacaactgctgccggtgcttctgcgtggaatgcgtggacctgctggtgggccccggcgccgcccaggccgctattaaggaagatccttggaactgctacatgtgcggccacaagggcacatacggcctgctgagacggagagaggactggcctagcagactgcagatgttcttcgccaataaccacgaccaggagttcgacccccctaaggtgtaccctcccgtccccgccgagaagagaaagcccatccgggtcctgagcctgttcgatggcatcgccaccggtctgctggtgctgaaggacctgggcatccaggtggataggtacattgcctccgaggtgtgcgaggactccatcaccgtgggaatggtgcgtcatcagggcaagatcatgtacgtgggcgacgtgcggagcgtgacacagaagcatatccaggagtggggccctttcgacctggtgatcggcggcagcccttgcaatgacctgagcatcgtgaacccagcccggaagggcctgtacgagggaaccggcagactgttcttcgagttttacagactgctgcacgacgcccggcctaaggaaggcgacgaccggcccttcttttggctgttcgagaatgtggtggccatgggagtcagcgacaagcgggatattagccggttcctggagagcaaccccgtgatgatcgatgccaaggaagtgagcgccgcccaccgggccagatacttctggggcaatctgcctggcatgaacagacccctggccagcaccgtgaacgacaagctggagctgcaggagtgcctggagcacggccggatcgccaagttcagcaaggtgagaaccatcaccacccgaagcaacagcatcaaacaaggcaaggaccagcactttcctgtgttcatgaacgagaaggaggacatcctgtggtgtaccgagatggagagagtgttcgggttcccagtccactacacagatgtcagcaacatgtctagactggccagacagagactgctgggaagaagctggtccgtccctgtgatcagacacctgttcgcccctctgaaggagtacttcgcctgcgtgagcagcggcaacagcaacgccaacagccggggccccagcttctctagcggcctggtgccactgtccctgagagggagccacatgggccccatggagatctacaaaaccgtgagcgcctggaagcggcagcctgtgcgcgtgctgagcctgtttcggaatatcgataaagtcctgaaaagcctgggattcctggagagcggctctggctccggcggtggcaccctgaagtacgtggaggatgtgacaaacgtggtcagacgggatgtggagaagtggggccccttcgatctggtgtacggcagcacccaacccctgggcagctcttgtgaccggtgccctggctggtacatgtttcagttccaccggatcctgcagtacgccctgccgagacaggagtcccagcggccattcttttggattttcatggacaacttgctgctgaccgaggatgaccaggaaactaccactcggttcctgcagaccgaagccgtgaccctgcaggacgtgagaggccgggactaccagaacgccatgcgggtgtggtccaacatccctggactgaaaagcaagcacgcacctctgacccctaaagaagaggagtacctgcaggcccaggtgcggagcagaagcaagctggacgcccctaaggtggatctgctggtgaagaattgcctcctgcccctgagagagtacttcaagtatttcagccagaatagtctgcccctgggaggcagcggcggcggcgccctggtgacatttgaggacgtcgccgtgcggttcacccaggaggaatgggctctgctggatccttctcagaaaatcctgtaccgggacgtgatgagagagacataccggaatctgacctccgtgggcatcaactgggaatgttgggaccttgaagcctgcttcagaagcctgggaagaaacctgagagtgcaggtggtgaagagaaagtgcgagctgaccaacagcggcccctgcgccgagggcggcccaagcagcggcgcccctcctcccagcggcggcagcccagccggctccccaacctctaccgaggagggcacctctgagtccgccacccccgagagcggccctggcacctccaccgagcccagcgagggcagcgcacccggcagccctgccggcagccccacctccacagaggagggaaccagcaccgagcccagcgaaggcagcgccccaggcaccagcaccgagcctagtgagcaggagattaaacggatcaacaagatcagaagaagacttgtgaaagacagcaacaccaagaaggccggcaagacaggccccatgaaaaccctgctggttagagtgatgacacccgatctgagagagcggctggaaaacctgagaaagaagcctgaaaatatcccccagcccatcagcaatacatctagagccaacctgaataagctgctgaccgattacaccgaaatgaagaaggcgatcctgcatgtgtactgggaagagttccagaaggaccctgtgggcctgatgagccgggtggcccagcctgccagcaagaagatcgatcagaacaagctgaaacctgagatggacgagaagggcaacctgaccaccgccggctttgcctgctctcagtgtggccagcccctgttcgtgtacaagctggagcaggtgtctgagaagggcaaggcttacaccaactacttcggacggtgcaatgtggccgagcacgaaaagctgatcctgctggcccagctgaagcccgagaaggatagcgacgaagccgtgacatatagcctgggaaagtttgggcagagggccctggatttctacagcattcatgtgaccaaggagtccacccaccccgtgaagcccctggcccagatcgccggaaacagatacgcctccggacctgtgggaaaggccctgagcgacgcatgtatgggcacaatcgcctccttcctgtctaagtaccaggacatcatcatcgaacaccagaaggtggtgaagggcaaccagaagagactggagagcctgcgggagctggccggcaaggaaaacctggaataccctagcgtgaccctgccacctcagcctcacaccaaggagggcgttgatgcctacaacgaagtgatcgcccgggtgcgaatgtgggtgaacctgaacctgtggcagaagctgaagctaagcagagatgatgccaagcctctgctgagactgaagggattcccttcctttcctctggtcgagagacaggccaacgaagtggactggtgggacatggtgtgtaacgtgaagaagctgatcaacgagaaaaaggaggatggcaaggtgttttggcagaatctggctggctacaagagacaggaagccctgagaccatacctgagcagcgaggaagatcggaagaagggaaagaaattcgctcggtaccagctgggcgacctgctgctgcacctggaaaagaagcacggcgaggactggggaaaggtgtacgacgaggcctgggagcggattgacaagaaagtggaaggcctgagcaagcacatcaagctggaagaggaacggagaagcgaggacgcccagagcaaggccgccctgaccgactggctgcgggctaaggccagcttcgtgatcgagggcctgaaggaggccgacaaggacgagttctgcagatgcgagctgaagctgcagaagtggtacggggacctgcggggaaagcccttcgccatcgaagccgagaacagcatcctggacatcagcggcttcagcaagcagtacaactgtgccttcatctggcagaaggacggcgtgaagaagctgaacctgtacctgatcatcaactacttcaagggcggcaagctgcggttcaagaagatcaaacctgaagccttcgaagccaacagattctacaccgtgatcaacaaaaagagcggcgagatcgtgcccatggaggtgaacttcaacttcgacgaccccaacctgatcatcctgcctctggcctttggcaagagacagggcagagaattcatctggaacgacctgctgtccctggaaaccggcagcctgaagctggccaacggaagagtgatcgagaagacactgtacaacagaagaacccggcaggatgagcctgccctgttcgtggccctgaccttcgagcggcgggaggtcctggactcctccaatatcaaaccaatgaacctgatcggcgtggcaagaggcgaaaacatccccgccgtgatcgccctgaccgaccccgagggctgcccactgagccggtttaaggatagcctgggaaacccaacccacatcctgagaatcggcgagagctataaggagaagcagcggaccatccaggccaagaaggaggtggagcagcggagagccggcggctacagccggaagtacgccagcaaagccaagaatctggcagacgatatggtgagaaacaccgctagagatctgctgtactacgccgtgacccaggatgccatgctgatcttcgccaacctgagccggggcttcggccggcagggcaagcggaccttcatggccgagagacagtacacacggatggaggactggctgaccgccaagctggcctacgagggcctgagcaagacctacctgtccaagacactggcccagtacacctccaagacatgcagcaactgtgggtttaccatcaccagcgccgactacgacagggtgctggagaagctgaagaagacagcaacaggctggatgaccacaattaacggcaaggagctgaaggtggagggccagattacctactacaacagatacaagagacagaacgtagtcaaggacctgtccgtcgagctggatagactgagcgaagaatctgtgaacaacgacatctcctcctggacaaagggcagaagcggagaagctctgagcctcctgaagaaaagattctcccatagacccgtgcaggagaagttcgtgtgcctgaactgcggcttcgagacacacgcagccgagcaagccgccctgaacatcgccagatcctggctgttcctgcggagccaggagtacaagaaataccagacaaacaagacaaccggcaacaccgataagagagccttcgtcgagacctggcagtccttttaccggaagaagcttaaggaggtgtggaaacctgccgtgcggtctggcggatctggcggaggctccttccagaggagcgtgctgttcagcgacgtgagcatcgacttcagccccgaggagtgggagtacctggacctggagcagaaggacctgtacagggacgtgatgctggagaactacagcaacctggtgagcctgggctgcttcatcagcaagcccgacgtgatcagcctgctggagcagggcaaggagccctggaaggtggtgaggaagggcaggaggcagtaccccgacctggagaccaagtacggcggcccaagcagcggcgcccctcctcccagcggcggcagcccagccggctccccaacctctaccgaggagggcacctctgagtccgccacccccgagagcggccctggcacctccaccgagcccagcgagggcagcgcacccggcagccctgccggcagccccacctccacagaggagggaaccagcaccgagcccagcgaaggcagcgccccaggcaccagcaccgagcctagtgagcaggagattaaacggatcaacaagatcagaagaagacttgtgaaagacagcaacaccaagaaggccggcaagacaggccccatgaaaaccctgctggttagagtgatgacacccgatctgagagagcggctggaaaacctgagaaagaagcctgaaaatatcccccagcccatcagcaatacatctagagccaacctgaataagctgctgaccgattacaccgaaatgaagaaggcgatcctgcatgtgtactgggaagagttccagaaggaccctgtgggcctgatgagccgggtggcccagcctgccagcaagaagatcgatcagaacaagctgaaacctgagatggacgagaagggcaacctgaccaccgccggctttgcctgctctcagtgtggccagcccctgttcgtgtacaagctggagcaggtgtctgagaagggcaaggcttacaccaactacttcggacggtgcaatgtggccgagcacgaaaagctgatcctgctggcccagctgaagcccgagaaggatagcgacgaagccgtgacatatagcctgggaaagtttgggcagagggccctggatttctacagcattcatgtgaccaaggagtccacccaccccgtgaagcccctggcccagatcgccggaaacagatacgcctccggacctgtgggaaaggccctgagcgacgcatgtatgggcacaatcgcctccttcctgtctaagtaccaggacatcatcatcgaacaccagaaggtggtgaagggcaaccagaagagactggagagcctgcgggagctggccggcaaggaaaacctggaataccctagcgtgaccctgccacctcagcctcacaccaaggagggcgttgatgcctacaacgaagtgatcgcccgggtgcgaatgtgggtgaacctgaacctgtggcagaagctgaagctaagcagagatgatgccaagcctctgctgagactgaagggattcccttcctttcctctggtcgagagacaggccaacgaagtggactggtgggacatggtgtgtaacgtgaagaagctgatcaacgagaaaaaggaggatggcaaggtgttttggcagaatctggctggctacaagagacaggaagccctgagaccatacctgagcagcgaggaagatcggaagaagggaaagaaattcgctcggtaccagctgggcgacctgctgctgcacctggaaaagaagcacggcgaggactggggaaaggtgtacgacgaggcctgggagcggattgacaagaaagtggaaggcctgagcaagcacatcaagctggaagaggaacggagaagcgaggacgcccagagcaaggccgccctgaccgactggctgcgggctaaggccagcttcgtgatcgagggcctgaaggaggccgacaaggacgagttctgcagatgcgagctgaagctgcagaagtggtacggggacctgcggggaaagcccttcgccatcgaagccgagaacagcatcctggacatcagcggcttcagcaagcagtacaactgtgccttcatctggcagaaggacggcgtgaagaagctgaacctgtacctgatcatcaactacttcaagggcggcaagctgcggttcaagaagatcaaacctgaagccttcgaagccaacagattctacaccgtgatcaacaaaaagagcggcgagatcgtgcccatggaggtgaacttcaacttcgacgaccccaacctgatcatcctgcctctggcctttggcaagagacagggcagagaattcatctggaacgacctgctgtccctggaaaccggcagcctgaagctggccaacggaagagtgatcgagaagacactgtacaacagaagaacccggcaggatgagcctgccctgttcgtggccctgaccttcgagcggcgggaggtcctggactcctccaatatcaaaccaatgaacctgatcggcgtggcaagaggcgaaaacatccccgccgtgatcgccctgaccgaccccgagggctgcccactgagccggtttaaggatagcctgggaaacccaacccacatcctgagaatcggcgagagctataaggagaagcagcggaccatccaggccaagaaggaggtggagcagcggagagccggcggctacagccggaagtacgccagcaaagccaagaatctggcagacgatatggtgagaaacaccgctagagatctgctgtactacgccgtgacccaggatgccatgctgatcttcgccaacctgagccggggcttcggccggcagggcaagcggaccttcatggccgagagacagtacacacggatggaggactggctgaccgccaagctggcctacgagggcctgagcaagacctacctgtccaagacactggcccagtacacctccaagacatgcagcaactgtgggtttaccatcaccagcgccgactacgacagggtgctggagaagctgaagaagacagcaacaggctggatgaccacaattaacggcaaggagctgaaggtggagggccagattacctactacaacagatacaagagacagaacgtagtcaaggacctgtccgtcgagctggatagactgagcgaagaatctgtgaacaacgacatctcctcctggacaaagggcagaagcggagaagctctgagcctcctgaagaaaagattctcccatagacccgtgcaggagaagttcgtgtgcctgaactgcggcttcgagacacacgcagccgagcaagccgccctgaacatcgccagatcctggctgttcctgcggagccaggagtacaagaaataccagacaaacaagacaaccggcaacaccgataagagagccttcgtcgagacctggcagtccttttaccggaagaagcttaaggaggtgtggaaacctgccgtgcggtctggcggatctggcggaggctcctttccagaggagcgtgctgttcagcgacgtgagcatcgacttcagccccgaggagtgggagtacctggacctggagcagaaggacctgtacagggacgtgatgctggagaactacagcaacctggtgagcctgggctgcttcatcagcaagcccgacgtgatcagcctgctggagcagggcaaggagccctggaaggtggtgaggaagggcaggaggcagtaccccgacctggagaccaagtacggatctggctccggcagcggccccaagaaaaagagaaaagtctaagctgccttctgcggggcttgccttctggccatgcccttcttctctcccttgcacctgtacctcttggtctttgaataaagcctgagtaggaaggctagcaaaaaaaaaaaaaaaaaaaaaaaaaaaaaaaaaaaaaaaaaaaaaaaaaaaaaaaaaaaaaaaaaaaaaaaaaaaaaaaa

SEQ ID NO: 15332 - RNA, 9485 nt, synthetic construct
  source 1..9485: mol_type = other RNA
aggaaataagagagaaaagaagagtaagaagaaatataagagccaccatggcccctaagaagaagcgtaaagtgagccggatggaacgcctcgtctacgaggtgcggcagaagtgcagaaacatcgaggacatctgcatctcctgcggatctctgaacgtgaccctggagcacccactgttcatcggcggcatgtgccagaactgtaaaaactgttttctggagtgtgcctatcaatacgacgatgacggctaccagagctactgcaccatctgttgcggcggaagagaggtgctgatgtgtggaaataacaactgctgccggtgcttctgcgtggaatgcgtggacctgctggtgggccccggcgccgcccaggccgctattaaggaagatccttggaactgctacatgtgcggccacaagggcacatacggcctgctgagacggagagaggactggcctagcagactgcagatgttcttcgccaataaccacgaccaggagttcgacccccctaaggtgtaccctcccgtccccgccgagaagagaaagcccatccgggtcctgagcctgttcgatggcatcgccaccggtctgctggtgctgaaggacctgggcatccaggtggataggtacattgcctccgaggtgtgcgaggactccatcaccgtgggaatggtgcgtcatcagggcaagatcatgtacgtgggcgacgtgcggagcgtgacacagaagcatatccaggagtggggccctttcgacctggtgatcggcggcagcccttgcaatgacctgagcatcgtgaacccagcccggaagggcctgtacgagggaaccggcagactgttcttcgagttttacagactgctgcacgacgcccggcctaaggaaggcgacgaccggcccttcttttggctgttcgagaatgtggtggccatgggagtcagcgacaagcgggatattagccggttcctggagagcaaccccgtgatgatcgatgccaaggaagtgagcgccgcccaccgggccagatacttctggggcaatctgcctggcatgaacagacccctggccagcaccgtgaacgacaagctggagctgcaggagtgcctggagcacggccggatcgccaagttcagcaaggtgagaaccatcaccacccgaagcaacagcatcaaacaaggcaaggaccagcactttcctgtgttcatgaacgagaaggaggacatcctgtggtgtaccgagatggagagagtgttcgggttcccagtccactacacagatgtcagcaacatgtctagactggccagacagagactgctgggaagaagctggtccgtccctgtgatcagacacctgttcgcccctctgaaggagtacttcgcctgcgtgagcagcggcaacagcaacgccaacagccggggccccagcttctctagcggcctggtgccactgtccctgagagggagccacatgggccccatggagatctacaaaaccgtgagcgcctggaagcggcagcctgtgcgcgtgctgagcctgtttcggaatatcgataaagtcctgaaaagcctgggattcctggagagcggctctggctccggcggtggcaccctgaagtacgtggaggatgtgacaaacgtggtcagacgggatgtggagaagtggggccccttcgatctggtgtacggcagcacccaacccctgggcagctcttgtgaccggtgccctggctggtacatgtttcagttccaccggatcctgcagtacgccctgccgagacaggagtcccagcggccattcttttggattttcatggacaacttgctgctgaccgaggatgaccaggaaactaccactcggttcctgcagaccgaagccgtgaccctgcaggacgtgagaggccgggactaccagaacgccatgcgggtgtggtccaacatccctggactgaaaagcaagcacgcacctctgacccctaaagaagaggagtacctgcaggcccaggtgcggagcagaagcaagctggacgcccctaaggtggatctgctggtgaagaattgcctcctgcccctgagagagtacttcaagtatttcagccagaatagtctgcccctgggaggcagcggcggcggcgccctggtgacatttgaggacgtcgccgtgcggttcacccaggaggaatgggctctgctggatccttctcagaaaatcctgtaccgggacgtgatgagagagacataccggaatctgacctccgtgggcatcaactgggaatgttgggaccttgaagcctgcttcagaagcctgggaagaaacctgagagtgcaggtggtgaagagaaagtgcgagctgaccaacagcggcccctgcgccgagggcggcccaagcagcggcgcccctcctcccagcggcggcagcccagccggctccccaacctctaccgaggagggcacctctgagtccgccacccccgagagcggccctggcacctccaccgagcccagcgagggcagcgcacccggcagccctgccggcagccccacctccacagaggagggaaccagcaccgagcccagcgaaggcagcgccccaggcaccagcaccgagcctagtgagcaggagattaaacggatcaacaagatcagaagaagacttgtgaaagacagcaacaccaagaaggccggcaagacaggccccatgaaaaccctgctggttagagtgatgacacccgatctgagagagcggctggaaaacctgagaaagaagcctgaaaatatcccccagcccatcagcaatacatctagagccaacctgaataagctgctgaccgattacaccgaaatgaagaaggcgatcctgcatgtgtactgggaagagttccagaaggaccctgtgggcctgatgagccgggtggcccagcctgccagcaagaagatcgatcagaacaagctgaaacctgagatggacgagaagggcaacctgaccaccgccggctttgcctgctctcagtgtggccagcccctgttcgtgtacaagctggagcaggtgtctgagaagggcaaggcttacaccaactacttcggacggtgcaatgtggccgagcacgaaaagctgatcctgctggcccagctgaagcccgagaaggatagcgacgaagccgtgacatatagcctgggaaagtttgggcagagggccctggatttctacagcattcatgtgaccaaggagtccacccaccccgtgaagcccctggcccagatcgccggaaacagatacgcctccggacctgtgggaaaggccctgagcgacgcatgtatgggcacaatcgcctccttcctgtctaagtaccaggacatcatcatcgaacaccagaaggtggtgaagggcaaccagaagagactggagagcctgcgggagctggccggcaaggaaaacctggaataccctagcgtgaccctgccacctcagcctcacaccaaggagggcgttgatgcctacaacgaagtgatcgcccgggtgcgaatgtgggtgaacctgaacctgtggcagaagctgaagctaagcagagatgatgccaagcctctgctgagactgaagggattcccttcctttcctctggtcgagagacaggccaacgaagtggactggtgggacatggtgtgtaacgtgaagaagctgatcaacgagaaaaaggaggatggcaaggtgttttggcagaatctggctggctacaagagacaggaagccctgagaccatacctgagcagcgaggaagatcggaagaagggaaagaaattcgctcggtaccagctgggcgacctgctgctgcacctggaaaagaagcacggcgaggactggggaaaggtgtacgacgaggcctgggagcggattgacaagaaagtggaaggcctgagcaagcacatcaagctggaagaggaacggagaagcgaggacgcccagagcaaggccgccctgaccgactggctgcgggctaaggccagcttcgtgatcgagggcctgaaggaggccgacaaggacgagttctgcagatgcgagctgaagctgcagaagtggtacggggacctgcggggaaagcccttcgccatcgaagccgagaacagcatcctggacatcagcggcttcagcaagcagtacaactgtgccttcatctggcagaaggacggcgtgaagaagctgaacctgtacctgatcatcaactacttcaagggcggcaagctgcggttcaagaagatcaaacctgaagccttcgaagccaacagattctacaccgtgatcaacaaaaagagcggcgagatcgtgcccatggaggtgaacttcaacttcgacgaccccaacctgatcatcctgcctctggcctttggcaagagacagggcagagaattcatctggaacgacctgctgtccctggaaaccggcagcctgaagctggccaacggaagagtgatcgagaagacactgtacaacagaagaacccggcaggatgagcctgccctgttcgtggccctgaccttcgagcggcgggaggtcctggactcctccaatatcaaaccaatgaacctgatcggcgtggcaagaggcgaaaacatccccgccgtgatcgccctgaccgaccccgagggctgcccactgagccggtttaaggatagcctgggaaacccaacccacatcctgagaatcggcgagagctataaggagaagcagcggaccatccaggccaagaaggaggtggagcagcggagagccggcggctacagccggaagtacgccagcaaagccaagaatctggcagacgatatggtgagaaacaccgctagagatctgctgtactacgccgtgacccaggatgccatgctgatcttcgccaacctgagccggggcttcggccggcagggcaagcggaccttcatggccgagagacagtacacacggatggaggactggctgaccgccaagctggcctacgagggcctgagcaagacctacctgtccaagacactggcccagtacacctccaagacatgcagcaactgtgggtttaccatcaccagcgccgactacgacagggtgctggagaagctgaagaagacagcaacaggctggatgaccacaattaacggcaaggagctgaaggtggagggccagattacctactacaacagatacaagagacagaacgtagtcaaggacctgtccgtcgagctggatagactgagcgaagaatctgtgaacaacgacatctcctcctggacaaagggcagaagcggagaagctctgagcctcctgaagaaaagattctcccatagacccgtgcaggagaagttcgtgtgcctgaactgcggcttcgagacacacgcagccgagcaagccgccctgaacatcgccagatcctggctgttcctgcggagccaggagtacaagaaataccagacaaacaagacaaccggcaacaccgataagagagccttcgtcgagacctggcagtccttttaccggaagaagcttaaggaggtgtggaaacctgccgtgcggtctggcggatctggcggaggctccatggccttcgaggacgtggccgtgtacttcagccaggaggagtggggcctgctggacaccgcccagagggccctgtacaggagggtgatgctggacaacttcgccctggtggccagcctgggcctgagcaccagcaggcccagggtggtgatccagctggagaggggcgaggagccctgggtgcccagcggcaccgacaccatcctgagcaggaacacctacaggaggaggaaccccggcagcggcggcccaagcagcggcgcccctcctcccagcggcggcagcccagccggctccccaacctctaccgaggagggcacctctgagtccgccacccccgagagcggccctggcacctccaccgagcccagcgagggcagcgcacccggcagccctgccggcagccccacctccacagaggagggaaccagcaccgagcccagcgaaggcagcgccccaggcaccagcaccgagcctagtgagcaggagattaaacggatcaacaagatcagaagaagacttgtgaaagacagcaacaccaagaaggccggcaagacaggccccatgaaaaccctgctggttagagtgatgacacccgatctgagagagcggctggaaaacctgagaaagaagcctgaaaatatcccccagcccatcagcaatacatctagagccaacctgaataagctgctgaccgattacaccgaaatgaagaaggcgatcctgcatgtgtactgggaagagttccagaaggaccctgtgggcctgatgagccgggtggcccagcctgccagcaagaagatcgatcagaacaagctgaaacctgagatggacgagaagggcaacctgaccaccgccggctttgcctgctctcagtgtggccagcccctgttcgtgtacaagctggagcaggtgtctgagaagggcaaggcttacaccaactacttcggacggtgcaatgtggccgagcacgaaaagctgatcctgctggcccagctgaagcccgagaaggatagcgacgaagccgtgacatatagcctgggaaagtttgggcagagggccctggatttctacagcattcatgtgaccaaggagtccacccaccccgtgaagcccctggcccagatcgccggaaacagatacgcctccggacctgtgggaaaggccctgagcgacgcatgtatgggcacaatcgcctccttcctgtctaagtaccaggacatcatcatcgaacaccagaaggtggtgaagggcaaccagaagagactggagagcctgcgggagctggccggcaaggaaaacctggaataccctagcgtgaccctgccacctcagcctcacaccaaggagggcgttgatgcctacaacgaagtgatcgcccgggtgcgaatgtgggtgaacctgaacctgtggcagaagctgaagctaagcagagatgatgccaagcctctgctgagactgaagggattcccttcctttcctctggtcgagagacaggccaacgaagtggactggtgggacatggtgtgtaacgtgaagaagctgatcaacgagaaaaaggaggatggcaaggtgttttggcagaatctggctggctacaagagacaggaagccctgagaccatacctgagcagcgaggaagatcggaagaagggaaagaaattcgctcggtaccagctgggcgacctgctgctgcacctggaaaagaagcacggcgaggactggggaaaggtgtacgacgaggcctgggagcggattgacaagaaagtggaaggcctgagcaagcacatcaagctggaagaggaacggagaagcgaggacgcccagagcaaggccgccctgaccgactggctgcgggctaaggccagcttcgtgatcgagggcctgaaggaggccgacaaggacgagttctgcagatgcgagctgaagctgcagaagtggtacggggacctgcggggaaagcccttcgccatcgaagccgagaacagcatcctggacatcagcggcttcagcaagcagtacaactgtgccttcatctggcagaaggacggcgtgaagaagctgaacctgtacctgatcatcaactacttcaagggcggcaagctgcggttcaagaagatcaaacctgaagccttcgaagccaacagattctacaccgtgatcaacaaaaagagcggcgagatcgtgcccatggaggtgaacttcaacttcgacgaccccaacctgatcatcctgcctctggcctttggcaagagacagggcagagaattcatctggaacgacctgctgtccctggaaaccggcagcctgaagctggccaacggaagagtgatcgagaagacactgtacaacagaagaacccggcaggatgagcctgccctgttcgtggccctgaccttcgagcggcgggaggtcctggactcctccaatatcaaaccaatgaacctgatcggcgtggcaagaggcgaaaacatccccgccgtgatcgccctgaccgaccccgagggctgcccactgagccggtttaaggatagcctgggaaacccaacccacatcctgagaatcggcgagagctataaggagaagcagcggaccatccaggccaagaaggaggtggagcagcggagagccggcggctacagccggaagtacgccagcaaagccaagaatctggcagacgatatggtgagaaacaccgctagagatctgctgtactacgccgtgacccaggatgccatgctgatcttcgccaacctgagccggggcttcggccggcagggcaagcggaccttcatggccgagagacagtacacacggatggaggactggctgaccgccaagctggcctacgagggcctgagcaagacctacctgtccaagacactggcccagtacacctccaagacatgcagcaactgtgggtttaccatcaccagcgccgactacgacagggtgctggagaagctgaagaagacagcaacaggctggatgaccacaattaacggcaaggagctgaaggtggagggccagattacctactacaacagatacaagagacagaacgtagtcaaggacctgtccgtcgagctggatagactgagcgaagaatctgtgaacaacgacatctcctcctggacaaagggcagaagcggagaagctctgagcctcctgaagaaaagattctcccatagacccgtgcaggagaagttcgtgtgcctgaactgcggcttcgagacacacgcagccgagcaagccgccctgaacatcgccagatcctggctgttcctgcggagccaggagtacaagaaataccagacaaacaagacaaccggcaacaccgataagagagccttcgtcgagacctggcagtccttttaccggaagaagcttaaggaggtgtggaaacctgccgtgcggtctggcggatctggcggaggctcctatggccttcgaggacgtggccgtgtacttcagccaggaggagtggggcctgctggacaccgcccagagggccctgtacaggagggtgatgctggacaacttcgccctggtggccagcctgggcctgagcaccagcaggcccagggtggtgatccagctggagaggggcgaggagccctgggtgcccagcggcaccgacaccatcctgagcaggaacacctacaggaggaggaaccccggcagcggatctggctccggcagcggccccaagaaaaagagaaaagtctaagctgccttctgcggggcttgccttctggccatgcccttcttctctcccttgcacctgtacctcttggtctttgaataaagcctgagtaggaaggctagcaaaaaaaaaaaaaaaaaaaaaaaaaaaaaaaaaaaaaaaaaaaaaaaaaaaaaaaaaaaaaaaaaaaaaaaaaaaaaaaa

SEQ ID NO: 15333 - RNA, 9485 nt, synthetic construct
  source 1..9485: mol_type = other RNA
aggaaataagagagaaaagaagagtaagaagaaatataagagccaccatggcccctaagaagaagcgtaaagtgagccggatggaacgcctcgtctacgaggtgcggcagaagtgcagaaacatcgaggacatctgcatctcctgcggatctctgaacgtgaccctggagcacccactgttcatcggcggcatgtgccagaactgtaaaaactgttttctggagtgtgcctatcaatacgacgatgacggctaccagagctactgcaccatctgttgcggcggaagagaggtgctgatgtgtggaaataacaactgctgccggtgcttctgcgtggaatgcgtggacctgctggtgggccccggcgccgcccaggccgctattaaggaagatccttggaactgctacatgtgcggccacaagggcacatacggcctgctgagacggagagaggactggcctagcagactgcagatgttcttcgccaataaccacgaccaggagttcgacccccctaaggtgtaccctcccgtccccgccgagaagagaaagcccatccgggtcctgagcctgttcgatggcatcgccaccggtctgctggtgctgaaggacctgggcatccaggtggataggtacattgcctccgaggtgtgcgaggactccatcaccgtgggaatggtgcgtcatcagggcaagatcatgtacgtgggcgacgtgcggagcgtgacacagaagcatatccaggagtggggccctttcgacctggtgatcggcggcagcccttgcaatgacctgagcatcgtgaacccagcccggaagggcctgtacgagggaaccggcagactgttcttcgagttttacagactgctgcacgacgcccggcctaaggaaggcgacgaccggcccttcttttggctgttcgagaatgtggtggccatgggagtcagcgacaagcgggatattagccggttcctggagagcaaccccgtgatgatcgatgccaaggaagtgagcgccgcccaccgggccagatacttctggggcaatctgcctggcatgaacagacccctggccagcaccgtgaacgacaagctggagctgcaggagtgcctggagcacggccggatcgccaagttcagcaaggtgagaaccatcaccacccgaagcaacagcatcaaacaaggcaaggaccagcactttcctgtgttcatgaacgagaaggaggacatcctgtggtgtaccgagatggagagagtgttcgggttcccagtccactacacagatgtcagcaacatgtctagactggccagacagagactgctgggaagaagctggtccgtccctgtgatcagacacctgttcgcccctctgaaggagtacttcgcctgcgtgagcagcggcaacagcaacgccaacagccggggccccagcttctctagcggcctggtgccactgtccctgagagggagccacatgggccccatggagatctacaaaaccgtgagcgcctggaagcggcagcctgtgcgcgtgctgagcctgtttcggaatatcgataaagtcctgaaaagcctgggattcctggagagcggctctggctccggcggtggcaccctgaagtacgtggaggatgtgacaaacgtggtcagacgggatgtggagaagtggggccccttcgatctggtgtacggcagcacccaacccctgggcagctcttgtgaccggtgccctggctggtacatgtttcagttccaccggatcctgcagtacgccctgccgagacaggagtcccagcggccattcttttggattttcatggacaacttgctgctgaccgaggatgaccaggaaactaccactcggttcctgcagaccgaagccgtgaccctgcaggacgtgagaggccgggactaccagaacgccatgcgggtgtggtccaacatccctggactgaaaagcaagcacgcacctctgacccctaaagaagaggagtacctgcaggcccaggtgcggagcagaagcaagctggacgcccctaaggtggatctgctggtgaagaattgcctcctgcccctgagagagtacttcaagtatttcagccagaatagtctgcccctgggaggcagcggcggcggcgccctggtgacatttgaggacgtcgccgtgcggttcacccaggaggaatgggctctgctggatccttctcagaaaatcctgtaccgggacgtgatgagagagacataccggaatctgacctccgtgggcatcaactgggaatgttgggaccttgaagcctgcttcagaagcctgggaagaaacctgagagtgcaggtggtgaagagaaagtgcgagctgaccaacagcggcccctgcgccgagggcggcccaagcagcggcgcccctcctcccagcggcggcagcccagccggctccccaacctctaccgaggagggcacctctgagtccgccacccccgagagcggccctggcacctccaccgagcccagcgagggcagcgcacccggcagccctgccggcagccccacctccacagaggagggaaccagcaccgagcccagcgaaggcagcgccccaggcaccagcaccgagcctagtgagcaggagattaaacggatcaacaagatcagaagaagacttgtgaaagacagcaacaccaagaaggccggcaagacaggccccatgaaaaccctgctggttagagtgatgacacccgatctgagagagcggctggaaaacctgagaaagaagcctgaaaatatcccccagcccatcagcaatacatctagagccaacctgaataagctgctgaccgattacaccgaaatgaagaaggcgatcctgcatgtgtactgggaagagttccagaaggaccctgtgggcctgatgagccgggtggcccagcctgccagcaagaagatcgatcagaacaagctgaaacctgagatggacgagaagggcaacctgaccaccgccggctttgcctgctctcagtgtggccagcccctgttcgtgtacaagctggagcaggtgtctgagaagggcaaggcttacaccaactacttcggacggtgcaatgtggccgagcacgaaaagctgatcctgctggcccagctgaagcccgagaaggatagcgacgaagccgtgacatatagcctgggaaagtttgggcagagggccctggatttctacagcattcatgtgaccaaggagtccacccaccccgtgaagcccctggcccagatcgccggaaacagatacgcctccggacctgtgggaaaggccctgagcgacgcatgtatgggcacaatcgcctccttcctgtctaagtaccaggacatcatcatcgaacaccagaaggtggtgaagggcaaccagaagagactggagagcctgcgggagctggccggcaaggaaaacctggaataccctagcgtgaccctgccacctcagcctcacaccaaggagggcgttgatgcctacaacgaagtgatcgcccgggtgcgaatgtgggtgaacctgaacctgtggcagaagctgaagctaagcagagatgatgccaagcctctgctgagactgaagggattcccttcctttcctctggtcgagagacaggccaacgaagtggactggtgggacatggtgtgtaacgtgaagaagctgatcaacgagaaaaaggaggatggcaaggtgttttggcagaatctggctggctacaagagacaggaagccctgagaccatacctgagcagcgaggaagatcggaagaagggaaagaaattcgctcggtaccagctgggcgacctgctgctgcacctggaaaagaagcacggcgaggactggggaaaggtgtacgacgaggcctgggagcggattgacaagaaagtggaaggcctgagcaagcacatcaagctggaagaggaacggagaagcgaggacgcccagagcaaggccgccctgaccgactggctgcgggctaaggccagcttcgtgatcgagggcctgaaggaggccgacaaggacgagttctgcagatgcgagctgaagctgcagaagtggtacggggacctgcggggaaagcccttcgccatcgaagccgagaacagcatcctggacatcagcggcttcagcaagcagtacaactgtgccttcatctggcagaaggacggcgtgaagaagctgaacctgtacctgatcatcaactacttcaagggcggcaagctgcggttcaagaagatcaaacctgaagccttcgaagccaacagattctacaccgtgatcaacaaaaagagcggcgagatcgtgcccatggaggtgaacttcaacttcgacgaccccaacctgatcatcctgcctctggcctttggcaagagacagggcagagaattcatctggaacgacctgctgtccctggaaaccggcagcctgaagctggccaacggaagagtgatcgagaagacactgtacaacagaagaacccggcaggatgagcctgccctgttcgtggccctgaccttcgagcggcgggaggtcctggactcctccaatatcaaaccaatgaacctgatcggcgtggcaagaggcgaaaacatccccgccgtgatcgccctgaccgaccccgagggctgcccactgagccggtttaaggatagcctgggaaacccaacccacatcctgagaatcggcgagagctataaggagaagcagcggaccatccaggccaagaaggaggtggagcagcggagagccggcggctacagccggaagtacgccagcaaagccaagaatctggcagacgatatggtgagaaacaccgctagagatctgctgtactacgccgtgacccaggatgccatgctgatcttcgccaacctgagccggggcttcggccggcagggcaagcggaccttcatggccgagagacagtacacacggatggaggactggctgaccgccaagctggcctacgagggcctgagcaagacctacctgtccaagacactggcccagtacacctccaagacatgcagcaactgtgggtttaccatcaccagcgccgactacgacagggtgctggagaagctgaagaagacagcaacaggctggatgaccacaattaacggcaaggagctgaaggtggagggccagattacctactacaacagatacaagagacagaacgtagtcaaggacctgtccgtcgagctggatagactgagcgaagaatctgtgaacaacgacatctcctcctggacaaagggcagaagcggagaagctctgagcctcctgaagaaaagattctcccatagacccgtgcaggagaagttcgtgtgcctgaactgcggcttcgagacacacgcagccgagcaagccgccctgaacatcgccagatcctggctgttcctgcggagccaggagtacaagaaataccagacaaacaagacaaccggcaacaccgataagagagccttcgtcgagacctggcagtccttttaccggaagaagcttaaggaggtgtggaaacctgccgtgcggtctggcggatctggcggaggctccgtgcaggagcccgtgaccttcaaggacgtggccgtggacttcacccaggaggagtggggccagctggacctggtgcagaggaccctgtacagggacgtgatgctggagacctacggccacctgctgagcgtgggcaaccagatcgccaagcccgaggtgatcagcctgctggagcagggcgaggagccctggagcatggagcaggcctgcccccagaggacctgccccgagtggatgaggaacggcggcccaagcagcggcgcccctcctcccagcggcggcagcccagccggctccccaacctctaccgaggagggcacctctgagtccgccacccccgagagcggccctggcacctccaccgagcccagcgagggcagcgcacccggcagccctgccggcagccccacctccacagaggagggaaccagcaccgagcccagcgaaggcagcgccccaggcaccagcaccgagcctagtgagcaggagattaaacggatcaacaagatcagaagaagacttgtgaaagacagcaacaccaagaaggccggcaagacaggccccatgaaaaccctgctggttagagtgatgacacccgatctgagagagcggctggaaaacctgagaaagaagcctgaaaatatcccccagcccatcagcaatacatctagagccaacctgaataagctgctgaccgattacaccgaaatgaagaaggcgatcctgcatgtgtactgggaagagttccagaaggaccctgtgggcctgatgagccgggtggcccagcctgccagcaagaagatcgatcagaacaagctgaaacctgagatggacgagaagggcaacctgaccaccgccggctttgcctgctctcagtgtggccagcccctgttcgtgtacaagctggagcaggtgtctgagaagggcaaggcttacaccaactacttcggacggtgcaatgtggccgagcacgaaaagctgatcctgctggcccagctgaagcccgagaaggatagcgacgaagccgtgacatatagcctgggaaagtttgggcagagggccctggatttctacagcattcatgtgaccaaggagtccacccaccccgtgaagcccctggcccagatcgccggaaacagatacgcctccggacctgtgggaaaggccctgagcgacgcatgtatgggcacaatcgcctccttcctgtctaagtaccaggacatcatcatcgaacaccagaaggtggtgaagggcaaccagaagagactggagagcctgcgggagctggccggcaaggaaaacctggaataccctagcgtgaccctgccacctcagcctcacaccaaggagggcgttgatgcctacaacgaagtgatcgcccgggtgcgaatgtgggtgaacctgaacctgtggcagaagctgaagctaagcagagatgatgccaagcctctgctgagactgaagggattcccttcctttcctctggtcgagagacaggccaacgaagtggactggtgggacatggtgtgtaacgtgaagaagctgatcaacgagaaaaaggaggatggcaaggtgttttggcagaatctggctggctacaagagacaggaagccctgagaccatacctgagcagcgaggaagatcggaagaagggaaagaaattcgctcggtaccagctgggcgacctgctgctgcacctggaaaagaagcacggcgaggactggggaaaggtgtacgacgaggcctgggagcggattgacaagaaagtggaaggcctgagcaagcacatcaagctggaagaggaacggagaagcgaggacgcccagagcaaggccgccctgaccgactggctgcgggctaaggccagcttcgtgatcgagggcctgaaggaggccgacaaggacgagttctgcagatgcgagctgaagctgcagaagtggtacggggacctgcggggaaagcccttcgccatcgaagccgagaacagcatcctggacatcagcggcttcagcaagcagtacaactgtgccttcatctggcagaaggacggcgtgaagaagctgaacctgtacctgatcatcaactacttcaagggcggcaagctgcggttcaagaagatcaaacctgaagccttcgaagccaacagattctacaccgtgatcaacaaaaagagcggcgagatcgtgcccatggaggtgaacttcaacttcgacgaccccaacctgatcatcctgcctctggcctttggcaagagacagggcagagaattcatctggaacgacctgctgtccctggaaaccggcagcctgaagctggccaacggaagagtgatcgagaagacactgtacaacagaagaacccggcaggatgagcctgccctgttcgtggccctgaccttcgagcggcgggaggtcctggactcctccaatatcaaaccaatgaacctgatcggcgtggcaagaggcgaaaacatccccgccgtgatcgccctgaccgaccccgagggctgcccactgagccggtttaaggatagcctgggaaacccaacccacatcctgagaatcggcgagagctataaggagaagcagcggaccatccaggccaagaaggaggtggagcagcggagagccggcggctacagccggaagtacgccagcaaagccaagaatctggcagacgatatggtgagaaacaccgctagagatctgctgtactacgccgtgacccaggatgccatgctgatcttcgccaacctgagccggggcttcggccggcagggcaagcggaccttcatggccgagagacagtacacacggatggaggactggctgaccgccaagctggcctacgagggcctgagcaagacctacctgtccaagacactggcccagtacacctccaagacatgcagcaactgtgggtttaccatcaccagcgccgactacgacagggtgctggagaagctgaagaagacagcaacaggctggatgaccacaattaacggcaaggagctgaaggtggagggccagattacctactacaacagatacaagagacagaacgtagtcaaggacctgtccgtcgagctggatagactgagcgaagaatctgtgaacaacgacatctcctcctggacaaagggcagaagcggagaagctctgagcctcctgaagaaaagattctcccatagacccgtgcaggagaagttcgtgtgcctgaactgcggcttcgagacacacgcagccgagcaagccgccctgaacatcgccagatcctggctgttcctgcggagccaggagtacaagaaataccagacaaacaagacaaccggcaacaccgataagagagccttcgtcgagacctggcagtccttttaccggaagaagcttaaggaggtgtggaaacctgccgtgcggtctggcggatctggcggaggctcctgtgcaggagcccgtgaccttcaaggacgtggccgtggacttcacccaggaggagtggggccagctggacctggtgcagaggaccctgtacagggacgtgatgctggagacctacggccacctgctgagcgtgggcaaccagatcgccaagcccgaggtgatcagcctgctggagcagggcgaggagccctggagcatggagcaggcctgcccccagaggacctgccccgagtggatgaggaacggatctggctccggcagcggccccaagaaaaagagaaaagtctaagctgccttctgcggggcttgccttctggccatgcccttcttctctcccttgcacctgtacctcttggtctttgaataaagcctgagtaggaaggctagcaaaaaaaaaaaaaaaaaaaaaaaaaaaaaaaaaaaaaaaaaaaaaaaaaaaaaaaaaaaaaaaaaaaaaaaaaaaaaaaa

SEQ ID NO: 15334 - RNA, 9485 nt, synthetic construct
  source 1..9485: mol_type = other RNA
aggaaataagagagaaaagaagagtaagaagaaatataagagccaccatggcccctaagaagaagcgtaaagtgagccggatggaacgcctcgtctacgaggtgcggcagaagtgcagaaacatcgaggacatctgcatctcctgcggatctctgaacgtgaccctggagcacccactgttcatcggcggcatgtgccagaactgtaaaaactgttttctggagtgtgcctatcaatacgacgatgacggctaccagagctactgcaccatctgttgcggcggaagagaggtgctgatgtgtggaaataacaactgctgccggtgcttctgcgtggaatgcgtggacctgctggtgggccccggcgccgcccaggccgctattaaggaagatccttggaactgctacatgtgcggccacaagggcacatacggcctgctgagacggagagaggactggcctagcagactgcagatgttcttcgccaataaccacgaccaggagttcgacccccctaaggtgtaccctcccgtccccgccgagaagagaaagcccatccgggtcctgagcctgttcgatggcatcgccaccggtctgctggtgctgaaggacctgggcatccaggtggataggtacattgcctccgaggtgtgcgaggactccatcaccgtgggaatggtgcgtcatcagggcaagatcatgtacgtgggcgacgtgcggagcgtgacacagaagcatatccaggagtggggccctttcgacctggtgatcggcggcagcccttgcaatgacctgagcatcgtgaacccagcccggaagggcctgtacgagggaaccggcagactgttcttcgagttttacagactgctgcacgacgcccggcctaaggaaggcgacgaccggcccttcttttggctgttcgagaatgtggtggccatgggagtcagcgacaagcgggatattagccggttcctggagagcaaccccgtgatgatcgatgccaaggaagtgagcgccgcccaccgggccagatacttctggggcaatctgcctggcatgaacagacccctggccagcaccgtgaacgacaagctggagctgcaggagtgcctggagcacggccggatcgccaagttcagcaaggtgagaaccatcaccacccgaagcaacagcatcaaacaaggcaaggaccagcactttcctgtgttcatgaacgagaaggaggacatcctgtggtgtaccgagatggagagagtgttcgggttcccagtccactacacagatgtcagcaacatgtctagactggccagacagagactgctgggaagaagctggtccgtccctgtgatcagacacctgttcgcccctctgaaggagtacttcgcctgcgtgagcagcggcaacagcaacgccaacagccggggccccagcttctctagcggcctggtgccactgtccctgagagggagccacatgggccccatggagatctacaaaaccgtgagcgcctggaagcggcagcctgtgcgcgtgctgagcctgtttcggaatatcgataaagtcctgaaaagcctgggattcctggagagcggctctggctccggcggtggcaccctgaagtacgtggaggatgtgacaaacgtggtcagacgggatgtggagaagtggggccccttcgatctggtgtacggcagcacccaacccctgggcagctcttgtgaccggtgccctggctggtacatgtttcagttccaccggatcctgcagtacgccctgccgagacaggagtcccagcggccattcttttggattttcatggacaacttgctgctgaccgaggatgaccaggaaactaccactcggttcctgcagaccgaagccgtgaccctgcaggacgtgagaggccgggactaccagaacgccatgcgggtgtggtccaacatccctggactgaaaagcaagcacgcacctctgacccctaaagaagaggagtacctgcaggcccaggtgcggagcagaagcaagctggacgcccctaaggtggatctgctggtgaagaattgcctcctgcccctgagagagtacttcaagtatttcagccagaatagtctgcccctgggaggcagcggcggcggcgccctggtgacatttgaggacgtcgccgtgcggttcacccaggaggaatgggctctgctggatccttctcagaaaatcctgtaccgggacgtgatgagagagacataccggaatctgacctccgtgggcatcaactgggaatgttgggaccttgaagcctgcttcagaagcctgggaagaaacctgagagtgcaggtggtgaagagaaagtgcgagctgaccaacagcggcccctgcgccgagggcggcccaagcagcggcgcccctcctcccagcggcggcagcccagccggctccccaacctctaccgaggagggcacctctgagtccgccacccccgagagcggccctggcacctccaccgagcccagcgagggcagcgcacccggcagccctgccggcagccccacctccacagaggagggaaccagcaccgagcccagcgaaggcagcgccccaggcaccagcaccgagcctagtgagcaggagattaaacggatcaacaagatcagaagaagacttgtgaaagacagcaacaccaagaaggccggcaagacaggccccatgaaaaccctgctggttagagtgatgacacccgatctgagagagcggctggaaaacctgagaaagaagcctgaaaatatcccccagcccatcagcaatacatctagagccaacctgaataagctgctgaccgattacaccgaaatgaagaaggcgatcctgcatgtgtactgggaagagttccagaaggaccctgtgggcctgatgagccgggtggcccagcctgccagcaagaagatcgatcagaacaagctgaaacctgagatggacgagaagggcaacctgaccaccgccggctttgcctgctctcagtgtggccagcccctgttcgtgtacaagctggagcaggtgtctgagaagggcaaggcttacaccaactacttcggacggtgcaatgtggccgagcacgaaaagctgatcctgctggcccagctgaagcccgagaaggatagcgacgaagccgtgacatatagcctgggaaagtttgggcagagggccctggatttctacagcattcatgtgaccaaggagtccacccaccccgtgaagcccctggcccagatcgccggaaacagatacgcctccggacctgtgggaaaggccctgagcgacgcatgtatgggcacaatcgcctccttcctgtctaagtaccaggacatcatcatcgaacaccagaaggtggtgaagggcaaccagaagagactggagagcctgcgggagctggccggcaaggaaaacctggaataccctagcgtgaccctgccacctcagcctcacaccaaggagggcgttgatgcctacaacgaagtgatcgcccgggtgcgaatgtgggtgaacctgaacctgtggcagaagctgaagctaagcagagatgatgccaagcctctgctgagactgaagggattcccttcctttcctctggtcgagagacaggccaacgaagtggactggtgggacatggtgtgtaacgtgaagaagctgatcaacgagaaaaaggaggatggcaaggtgttttggcagaatctggctggctacaagagacaggaagccctgagaccatacctgagcagcgaggaagatcggaagaagggaaagaaattcgctcggtaccagctgggcgacctgctgctgcacctggaaaagaagcacggcgaggactggggaaaggtgtacgacgaggcctgggagcggattgacaagaaagtggaaggcctgagcaagcacatcaagctggaagaggaacggagaagcgaggacgcccagagcaaggccgccctgaccgactggctgcgggctaaggccagcttcgtgatcgagggcctgaaggaggccgacaaggacgagttctgcagatgcgagctgaagctgcagaagtggtacggggacctgcggggaaagcccttcgccatcgaagccgagaacagcatcctggacatcagcggcttcagcaagcagtacaactgtgccttcatctggcagaaggacggcgtgaagaagctgaacctgtacctgatcatcaactacttcaagggcggcaagctgcggttcaagaagatcaaacctgaagccttcgaagccaacagattctacaccgtgatcaacaaaaagagcggcgagatcgtgcccatggaggtgaacttcaacttcgacgaccccaacctgatcatcctgcctctggcctttggcaagagacagggcagagaattcatctggaacgacctgctgtccctggaaaccggcagcctgaagctggccaacggaagagtgatcgagaagacactgtacaacagaagaacccggcaggatgagcctgccctgttcgtggccctgaccttcgagcggcgggaggtcctggactcctccaatatcaaaccaatgaacctgatcggcgtggcaagaggcgaaaacatccccgccgtgatcgccctgaccgaccccgagggctgcccactgagccggtttaaggatagcctgggaaacccaacccacatcctgagaatcggcgagagctataaggagaagcagcggaccatccaggccaagaaggaggtggagcagcggagagccggcggctacagccggaagtacgccagcaaagccaagaatctggcagacgatatggtgagaaacaccgctagagatctgctgtactacgccgtgacccaggatgccatgctgatcttcgccaacctgagccggggcttcggccggcagggcaagcggaccttcatggccgagagacagtacacacggatggaggactggctgaccgccaagctggcctacgagggcctgagcaagacctacctgtccaagacactggcccagtacacctccaagacatgcagcaactgtgggtttaccatcaccagcgccgactacgacagggtgctggagaagctgaagaagacagcaacaggctggatgaccacaattaacggcaaggagctgaaggtggagggccagattacctactacaacagatacaagagacagaacgtagtcaaggacctgtccgtcgagctggatagactgagcgaagaatctgtgaacaacgacatctcctcctggacaaagggcagaagcggagaagctctgagcctcctgaagaaaagattctcccatagacccgtgcaggagaagttcgtgtgcctgaactgcggcttcgagacacacgcagccgagcaagccgccctgaacatcgccagatcctggctgttcctgcggagccaggagtacaagaaataccagacaaacaagacaaccggcaacaccgataagagagccttcgtcgagacctggcagtccttttaccggaagaagcttaaggaggtgtggaaacctgccgtgcggtctggcggatctggcggaggctccatgagccagggcagcgtgaccttcagggacgtggccatcgacttcagccaggaggagtggaagtggctgcagcccgcccagagggacctgtacaggtgcgtgatgctggagaactacggccacctggtgagcctgggcctgagcatcagcaagcccgacgtggtgagcctgctggagcagggcaaggagccctggctgggcaagaggaacgtgaacagggacctgttcagcgtgagcgagagcggcggcccaagcagcggcgcccctcctcccagcggcggcagcccagccggctccccaacctctaccgaggagggcacctctgagtccgccacccccgagagcggccctggcacctccaccgagcccagcgagggcagcgcacccggcagccctgccggcagccccacctccacagaggagggaaccagcaccgagcccagcgaaggcagcgccccaggcaccagcaccgagcctagtgagcaggagattaaacggatcaacaagatcagaagaagacttgtgaaagacagcaacaccaagaaggccggcaagacaggccccatgaaaaccctgctggttagagtgatgacacccgatctgagagagcggctggaaaacctgagaaagaagcctgaaaatatcccccagcccatcagcaatacatctagagccaacctgaataagctgctgaccgattacaccgaaatgaagaaggcgatcctgcatgtgtactgggaagagttccagaaggaccctgtgggcctgatgagccgggtggcccagcctgccagcaagaagatcgatcagaacaagctgaaacctgagatggacgagaagggcaacctgaccaccgccggctttgcctgctctcagtgtggccagcccctgttcgtgtacaagctggagcaggtgtctgagaagggcaaggcttacaccaactacttcggacggtgcaatgtggccgagcacgaaaagctgatcctgctggcccagctgaagcccgagaaggatagcgacgaagccgtgacatatagcctgggaaagtttgggcagagggccctggatttctacagcattcatgtgaccaaggagtccacccaccccgtgaagcccctggcccagatcgccggaaacagatacgcctccggacctgtgggaaaggccctgagcgacgcatgtatgggcacaatcgcctccttcctgtctaagtaccaggacatcatcatcgaacaccagaaggtggtgaagggcaaccagaagagactggagagcctgcgggagctggccggcaaggaaaacctggaataccctagcgtgaccctgccacctcagcctcacaccaaggagggcgttgatgcctacaacgaagtgatcgcccgggtgcgaatgtgggtgaacctgaacctgtggcagaagctgaagctaagcagagatgatgccaagcctctgctgagactgaagggattcccttcctttcctctggtcgagagacaggccaacgaagtggactggtgggacatggtgtgtaacgtgaagaagctgatcaacgagaaaaaggaggatggcaaggtgttttggcagaatctggctggctacaagagacaggaagccctgagaccatacctgagcagcgaggaagatcggaagaagggaaagaaattcgctcggtaccagctgggcgacctgctgctgcacctggaaaagaagcacggcgaggactggggaaaggtgtacgacgaggcctgggagcggattgacaagaaagtggaaggcctgagcaagcacatcaagctggaagaggaacggagaagcgaggacgcccagagcaaggccgccctgaccgactggctgcgggctaaggccagcttcgtgatcgagggcctgaaggaggccgacaaggacgagttctgcagatgcgagctgaagctgcagaagtggtacggggacctgcggggaaagcccttcgccatcgaagccgagaacagcatcctggacatcagcggcttcagcaagcagtacaactgtgccttcatctggcagaaggacggcgtgaagaagctgaacctgtacctgatcatcaactacttcaagggcggcaagctgcggttcaagaagatcaaacctgaagccttcgaagccaacagattctacaccgtgatcaacaaaaagagcggcgagatcgtgcccatggaggtgaacttcaacttcgacgaccccaacctgatcatcctgcctctggcctttggcaagagacagggcagagaattcatctggaacgacctgctgtccctggaaaccggcagcctgaagctggccaacggaagagtgatcgagaagacactgtacaacagaagaacccggcaggatgagcctgccctgttcgtggccctgaccttcgagcggcgggaggtcctggactcctccaatatcaaaccaatgaacctgatcggcgtggcaagaggcgaaaacatccccgccgtgatcgccctgaccgaccccgagggctgcccactgagccggtttaaggatagcctgggaaacccaacccacatcctgagaatcggcgagagctataaggagaagcagcggaccatccaggccaagaaggaggtggagcagcggagagccggcggctacagccggaagtacgccagcaaagccaagaatctggcagacgatatggtgagaaacaccgctagagatctgctgtactacgccgtgacccaggatgccatgctgatcttcgccaacctgagccggggcttcggccggcagggcaagcggaccttcatggccgagagacagtacacacggatggaggactggctgaccgccaagctggcctacgagggcctgagcaagacctacctgtccaagacactggcccagtacacctccaagacatgcagcaactgtgggtttaccatcaccagcgccgactacgacagggtgctggagaagctgaagaagacagcaacaggctggatgaccacaattaacggcaaggagctgaaggtggagggccagattacctactacaacagatacaagagacagaacgtagtcaaggacctgtccgtcgagctggatagactgagcgaagaatctgtgaacaacgacatctcctcctggacaaagggcagaagcggagaagctctgagcctcctgaagaaaagattctcccatagacccgtgcaggagaagttcgtgtgcctgaactgcggcttcgagacacacgcagccgagcaagccgccctgaacatcgccagatcctggctgttcctgcggagccaggagtacaagaaataccagacaaacaagacaaccggcaacaccgataagagagccttcgtcgagacctggcagtccttttaccggaagaagcttaaggaggtgtggaaacctgccgtgcggtctggcggatctggcggaggctcctatgagccagggcagcgtgaccttcagggacgtggccatcgacttcagccaggaggagtggaagtggctgcagcccgcccagagggacctgtacaggtgcgtgatgctggagaactacggccacctggtgagcctgggcctgagcatcagcaagcccgacgtggtgagcctgctggagcagggcaaggagccctggctgggcaagaggaacgtgaacagggacctgttcagcgtgagcgagagcggatctggctccggcagcggccccaagaaaaagagaaaagtctaagctgccttctgcggggcttgccttctggccatgcccttcttctctcccttgcacctgtacctcttggtctttgaataaagcctgagtaggaaggctagcaaaaaaaaaaaaaaaaaaaaaaaaaaaaaaaaaaaaaaaaaaaaaaaaaaaaaaaaaaaaaaaaaaaaaaaaaaaaaaaa

SEQ ID NO: 15335 - RNA, 9485 nt, synthetic construct
  source 1..9485: mol_type = other RNA
aggaaataagagagaaaagaagagtaagaagaaatataagagccaccatggcccctaagaagaagcgtaaagtgagccggatggaacgcctcgtctacgaggtgcggcagaagtgcagaaacatcgaggacatctgcatctcctgcggatctctgaacgtgaccctggagcacccactgttcatcggcggcatgtgccagaactgtaaaaactgttttctggagtgtgcctatcaatacgacgatgacggctaccagagctactgcaccatctgttgcggcggaagagaggtgctgatgtgtggaaataacaactgctgccggtgcttctgcgtggaatgcgtggacctgctggtgggccccggcgccgcccaggccgctattaaggaagatccttggaactgctacatgtgcggccacaagggcacatacggcctgctgagacggagagaggactggcctagcagactgcagatgttcttcgccaataaccacgaccaggagttcgacccccctaaggtgtaccctcccgtccccgccgagaagagaaagcccatccgggtcctgagcctgttcgatggcatcgccaccggtctgctggtgctgaaggacctgggcatccaggtggataggtacattgcctccgaggtgtgcgaggactccatcaccgtgggaatggtgcgtcatcagggcaagatcatgtacgtgggcgacgtgcggagcgtgacacagaagcatatccaggagtggggccctttcgacctggtgatcggcggcagcccttgcaatgacctgagcatcgtgaacccagcccggaagggcctgtacgagggaaccggcagactgttcttcgagttttacagactgctgcacgacgcccggcctaaggaaggcgacgaccggcccttcttttggctgttcgagaatgtggtggccatgggagtcagcgacaagcgggatattagccggttcctggagagcaaccccgtgatgatcgatgccaaggaagtgagcgccgcccaccgggccagatacttctggggcaatctgcctggcatgaacagacccctggccagcaccgtgaacgacaagctggagctgcaggagtgcctggagcacggccggatcgccaagttcagcaaggtgagaaccatcaccacccgaagcaacagcatcaaacaaggcaaggaccagcactttcctgtgttcatgaacgagaaggaggacatcctgtggtgtaccgagatggagagagtgttcgggttcccagtccactacacagatgtcagcaacatgtctagactggccagacagagactgctgggaagaagctggtccgtccctgtgatcagacacctgttcgcccctctgaaggagtacttcgcctgcgtgagcagcggcaacagcaacgccaacagccggggccccagcttctctagcggcctggtgccactgtccctgagagggagccacatgggccccatggagatctacaaaaccgtgagcgcctggaagcggcagcctgtgcgcgtgctgagcctgtttcggaatatcgataaagtcctgaaaagcctgggattcctggagagcggctctggctccggcggtggcaccctgaagtacgtggaggatgtgacaaacgtggtcagacgggatgtggagaagtggggccccttcgatctggtgtacggcagcacccaacccctgggcagctcttgtgaccggtgccctggctggtacatgtttcagttccaccggatcctgcagtacgccctgccgagacaggagtcccagcggccattcttttggattttcatggacaacttgctgctgaccgaggatgaccaggaaactaccactcggttcctgcagaccgaagccgtgaccctgcaggacgtgagaggccgggactaccagaacgccatgcgggtgtggtccaacatccctggactgaaaagcaagcacgcacctctgacccctaaagaagaggagtacctgcaggcccaggtgcggagcagaagcaagctggacgcccctaaggtggatctgctggtgaagaattgcctcctgcccctgagagagtacttcaagtatttcagccagaatagtctgcccctgggaggcagcggcggcggcgccctggtgacatttgaggacgtcgccgtgcggttcacccaggaggaatgggctctgctggatccttctcagaaaatcctgtaccgggacgtgatgagagagacataccggaatctgacctccgtgggcatcaactgggaatgttgggaccttgaagcctgcttcagaagcctgggaagaaacctgagagtgcaggtggtgaagagaaagtgcgagctgaccaacagcggcccctgcgccgagggcggcccaagcagcggcgcccctcctcccagcggcggcagcccagccggctccccaacctctaccgaggagggcacctctgagtccgccacccccgagagcggccctggcacctccaccgagcccagcgagggcagcgcacccggcagccctgccggcagccccacctccacagaggagggaaccagcaccgagcccagcgaaggcagcgccccaggcaccagcaccgagcctagtgagcaggagattaaacggatcaacaagatcagaagaagacttgtgaaagacagcaacaccaagaaggccggcaagacaggccccatgaaaaccctgctggttagagtgatgacacccgatctgagagagcggctggaaaacctgagaaagaagcctgaaaatatcccccagcccatcagcaatacatctagagccaacctgaataagctgctgaccgattacaccgaaatgaagaaggcgatcctgcatgtgtactgggaagagttccagaaggaccctgtgggcctgatgagccgggtggcccagcctgccagcaagaagatcgatcagaacaagctgaaacctgagatggacgagaagggcaacctgaccaccgccggctttgcctgctctcagtgtggccagcccctgttcgtgtacaagctggagcaggtgtctgagaagggcaaggcttacaccaactacttcggacggtgcaatgtggccgagcacgaaaagctgatcctgctggcccagctgaagcccgagaaggatagcgacgaagccgtgacatatagcctgggaaagtttgggcagagggccctggatttctacagcattcatgtgaccaaggagtccacccaccccgtgaagcccctggcccagatcgccggaaacagatacgcctccggacctgtgggaaaggccctgagcgacgcatgtatgggcacaatcgcctccttcctgtctaagtaccaggacatcatcatcgaacaccagaaggtggtgaagggcaaccagaagagactggagagcctgcgggagctggccggcaaggaaaacctggaataccctagcgtgaccctgccacctcagcctcacaccaaggagggcgttgatgcctacaacgaagtgatcgcccgggtgcgaatgtgggtgaacctgaacctgtggcagaagctgaagctaagcagagatgatgccaagcctctgctgagactgaagggattcccttcctttcctctggtcgagagacaggccaacgaagtggactggtgggacatggtgtgtaacgtgaagaagctgatcaacgagaaaaaggaggatggcaaggtgttttggcagaatctggctggctacaagagacaggaagccctgagaccatacctgagcagcgaggaagatcggaagaagggaaagaaattcgctcggtaccagctgggcgacctgctgctgcacctggaaaagaagcacggcgaggactggggaaaggtgtacgacgaggcctgggagcggattgacaagaaagtggaaggcctgagcaagcacatcaagctggaagaggaacggagaagcgaggacgcccagagcaaggccgccctgaccgactggctgcgggctaaggccagcttcgtgatcgagggcctgaaggaggccgacaaggacgagttctgcagatgcgagctgaagctgcagaagtggtacggggacctgcggggaaagcccttcgccatcgaagccgagaacagcatcctggacatcagcggcttcagcaagcagtacaactgtgccttcatctggcagaaggacggcgtgaagaagctgaacctgtacctgatcatcaactacttcaagggcggcaagctgcggttcaagaagatcaaacctgaagccttcgaagccaacagattctacaccgtgatcaacaaaaagagcggcgagatcgtgcccatggaggtgaacttcaacttcgacgaccccaacctgatcatcctgcctctggcctttggcaagagacagggcagagaattcatctggaacgacctgctgtccctggaaaccggcagcctgaagctggccaacggaagagtgatcgagaagacactgtacaacagaagaacccggcaggatgagcctgccctgttcgtggccctgaccttcgagcggcgggaggtcctggactcctccaatatcaaaccaatgaacctgatcggcgtggcaagaggcgaaaacatccccgccgtgatcgccctgaccgaccccgagggctgcccactgagccggtttaaggatagcctgggaaacccaacccacatcctgagaatcggcgagagctataaggagaagcagcggaccatccaggccaagaaggaggtggagcagcggagagccggcggctacagccggaagtacgccagcaaagccaagaatctggcagacgatatggtgagaaacaccgctagagatctgctgtactacgccgtgacccaggatgccatgctgatcttcgccaacctgagccggggcttcggccggcagggcaagcggaccttcatggccgagagacagtacacacggatggaggactggctgaccgccaagctggcctacgagggcctgagcaagacctacctgtccaagacactggcccagtacacctccaagacatgcagcaactgtgggtttaccatcaccagcgccgactacgacagggtgctggagaagctgaagaagacagcaacaggctggatgaccacaattaacggcaaggagctgaaggtggagggccagattacctactacaacagatacaagagacagaacgtagtcaaggacctgtccgtcgagctggatagactgagcgaagaatctgtgaacaacgacatctcctcctggacaaagggcagaagcggagaagctctgagcctcctgaagaaaagattctcccatagacccgtgcaggagaagttcgtgtgcctgaactgcggcttcgagacacacgcagccgagcaagccgccctgaacatcgccagatcctggctgttcctgcggagccaggagtacaagaaataccagacaaacaagacaaccggcaacaccgataagagagccttcgtcgagacctggcagtccttttaccggaagaagcttaaggaggtgtggaaacctgccgtgcggtctggcggatctggcggaggctcctggcccgagagcgtgaccttcgaggacgtggccgtgtacttcacccagaaccagtgggccagcctggaccccgcccagagggccctgtacggcgaggtgatgctggagaactacgccaacgtggccagcctggtggccttccccttccccaagcccgccctgatcagccacctggagaggggcgaggccccctggggccccgacccctgggacaccgagatccccaggggcatcagccagggcggcggcccaagcagcggcgcccctcctcccagcggcggcagcccagccggctccccaacctctaccgaggagggcacctctgagtccgccacccccgagagcggccctggcacctccaccgagcccagcgagggcagcgcacccggcagccctgccggcagccccacctccacagaggagggaaccagcaccgagcccagcgaaggcagcgccccaggcaccagcaccgagcctagtgagcaggagattaaacggatcaacaagatcagaagaagacttgtgaaagacagcaacaccaagaaggccggcaagacaggccccatgaaaaccctgctggttagagtgatgacacccgatctgagagagcggctggaaaacctgagaaagaagcctgaaaatatcccccagcccatcagcaatacatctagagccaacctgaataagctgctgaccgattacaccgaaatgaagaaggcgatcctgcatgtgtactgggaagagttccagaaggaccctgtgggcctgatgagccgggtggcccagcctgccagcaagaagatcgatcagaacaagctgaaacctgagatggacgagaagggcaacctgaccaccgccggctttgcctgctctcagtgtggccagcccctgttcgtgtacaagctggagcaggtgtctgagaagggcaaggcttacaccaactacttcggacggtgcaatgtggccgagcacgaaaagctgatcctgctggcccagctgaagcccgagaaggatagcgacgaagccgtgacatatagcctgggaaagtttgggcagagggccctggatttctacagcattcatgtgaccaaggagtccacccaccccgtgaagcccctggcccagatcgccggaaacagatacgcctccggacctgtgggaaaggccctgagcgacgcatgtatgggcacaatcgcctccttcctgtctaagtaccaggacatcatcatcgaacaccagaaggtggtgaagggcaaccagaagagactggagagcctgcgggagctggccggcaaggaaaacctggaataccctagcgtgaccctgccacctcagcctcacaccaaggagggcgttgatgcctacaacgaagtgatcgcccgggtgcgaatgtgggtgaacctgaacctgtggcagaagctgaagctaagcagagatgatgccaagcctctgctgagactgaagggattcccttcctttcctctggtcgagagacaggccaacgaagtggactggtgggacatggtgtgtaacgtgaagaagctgatcaacgagaaaaaggaggatggcaaggtgttttggcagaatctggctggctacaagagacaggaagccctgagaccatacctgagcagcgaggaagatcggaagaagggaaagaaattcgctcggtaccagctgggcgacctgctgctgcacctggaaaagaagcacggcgaggactggggaaaggtgtacgacgaggcctgggagcggattgacaagaaagtggaaggcctgagcaagcacatcaagctggaagaggaacggagaagcgaggacgcccagagcaaggccgccctgaccgactggctgcgggctaaggccagcttcgtgatcgagggcctgaaggaggccgacaaggacgagttctgcagatgcgagctgaagctgcagaagtggtacggggacctgcggggaaagcccttcgccatcgaagccgagaacagcatcctggacatcagcggcttcagcaagcagtacaactgtgccttcatctggcagaaggacggcgtgaagaagctgaacctgtacctgatcatcaactacttcaagggcggcaagctgcggttcaagaagatcaaacctgaagccttcgaagccaacagattctacaccgtgatcaacaaaaagagcggcgagatcgtgcccatggaggtgaacttcaacttcgacgaccccaacctgatcatcctgcctctggcctttggcaagagacagggcagagaattcatctggaacgacctgctgtccctggaaaccggcagcctgaagctggccaacggaagagtgatcgagaagacactgtacaacagaagaacccggcaggatgagcctgccctgttcgtggccctgaccttcgagcggcgggaggtcctggactcctccaatatcaaaccaatgaacctgatcggcgtggcaagaggcgaaaacatccccgccgtgatcgccctgaccgaccccgagggctgcccactgagccggtttaaggatagcctgggaaacccaacccacatcctgagaatcggcgagagctataaggagaagcagcggaccatccaggccaagaaggaggtggagcagcggagagccggcggctacagccggaagtacgccagcaaagccaagaatctggcagacgatatggtgagaaacaccgctagagatctgctgtactacgccgtgacccaggatgccatgctgatcttcgccaacctgagccggggcttcggccggcagggcaagcggaccttcatggccgagagacagtacacacggatggaggactggctgaccgccaagctggcctacgagggcctgagcaagacctacctgtccaagacactggcccagtacacctccaagacatgcagcaactgtgggtttaccatcaccagcgccgactacgacagggtgctggagaagctgaagaagacagcaacaggctggatgaccacaattaacggcaaggagctgaaggtggagggccagattacctactacaacagatacaagagacagaacgtagtcaaggacctgtccgtcgagctggatagactgagcgaagaatctgtgaacaacgacatctcctcctggacaaagggcagaagcggagaagctctgagcctcctgaagaaaagattctcccatagacccgtgcaggagaagttcgtgtgcctgaactgcggcttcgagacacacgcagccgagcaagccgccctgaacatcgccagatcctggctgttcctgcggagccaggagtacaagaaataccagacaaacaagacaaccggcaacaccgataagagagccttcgtcgagacctggcagtccttttaccggaagaagcttaaggaggtgtggaaacctgccgtgcggtctggcggatctggcggaggctccttggcccgagagcgtgaccttcgaggacgtggccgtgtacttcacccagaaccagtgggccagcctggaccccgcccagagggccctgtacggcgaggtgatgctggagaactacgccaacgtggccagcctggtggccttccccttccccaagcccgccctgatcagccacctggagaggggcgaggccccctggggccccgacccctgggacaccgagatccccaggggcatcagccagggcggatctggctccggcagcggccccaagaaaaagagaaaagtctaagctgccttctgcggggcttgccttctggccatgcccttcttctctcccttgcacctgtacctcttggtctttgaataaagcctgagtaggaaggctagcaaaaaaaaaaaaaaaaaaaaaaaaaaaaaaaaaaaaaaaaaaaaaaaaaaaaaaaaaaaaaaaaaaaaaaaaaaaaaaaa

SEQ ID NO: 15336 - RNA, 9485 nt, synthetic construct
  source 1..9485: mol_type = other RNA
aggaaataagagagaaaagaagagtaagaagaaatataagagccaccatggcccctaagaagaagcgtaaagtgagccggatggaacgcctcgtctacgaggtgcggcagaagtgcagaaacatcgaggacatctgcatctcctgcggatctctgaacgtgaccctggagcacccactgttcatcggcggcatgtgccagaactgtaaaaactgttttctggagtgtgcctatcaatacgacgatgacggctaccagagctactgcaccatctgttgcggcggaagagaggtgctgatgtgtggaaataacaactgctgccggtgcttctgcgtggaatgcgtggacctgctggtgggccccggcgccgcccaggccgctattaaggaagatccttggaactgctacatgtgcggccacaagggcacatacggcctgctgagacggagagaggactggcctagcagactgcagatgttcttcgccaataaccacgaccaggagttcgacccccctaaggtgtaccctcccgtccccgccgagaagagaaagcccatccgggtcctgagcctgttcgatggcatcgccaccggtctgctggtgctgaaggacctgggcatccaggtggataggtacattgcctccgaggtgtgcgaggactccatcaccgtgggaatggtgcgtcatcagggcaagatcatgtacgtgggcgacgtgcggagcgtgacacagaagcatatccaggagtggggccctttcgacctggtgatcggcggcagcccttgcaatgacctgagcatcgtgaacccagcccggaagggcctgtacgagggaaccggcagactgttcttcgagttttacagactgctgcacgacgcccggcctaaggaaggcgacgaccggcccttcttttggctgttcgagaatgtggtggccatgggagtcagcgacaagcgggatattagccggttcctggagagcaaccccgtgatgatcgatgccaaggaagtgagcgccgcccaccgggccagatacttctggggcaatctgcctggcatgaacagacccctggccagcaccgtgaacgacaagctggagctgcaggagtgcctggagcacggccggatcgccaagttcagcaaggtgagaaccatcaccacccgaagcaacagcatcaaacaaggcaaggaccagcactttcctgtgttcatgaacgagaaggaggacatcctgtggtgtaccgagatggagagagtgttcgggttcccagtccactacacagatgtcagcaacatgtctagactggccagacagagactgctgggaagaagctggtccgtccctgtgatcagacacctgttcgcccctctgaaggagtacttcgcctgcgtgagcagcggcaacagcaacgccaacagccggggccccagcttctctagcggcctggtgccactgtccctgagagggagccacatgggccccatggagatctacaaaaccgtgagcgcctggaagcggcagcctgtgcgcgtgctgagcctgtttcggaatatcgataaagtcctgaaaagcctgggattcctggagagcggctctggctccggcggtggcaccctgaagtacgtggaggatgtgacaaacgtggtcagacgggatgtggagaagtggggccccttcgatctggtgtacggcagcacccaacccctgggcagctcttgtgaccggtgccctggctggtacatgtttcagttccaccggatcctgcagtacgccctgccgagacaggagtcccagcggccattcttttggattttcatggacaacttgctgctgaccgaggatgaccaggaaactaccactcggttcctgcagaccgaagccgtgaccctgcaggacgtgagaggccgggactaccagaacgccatgcgggtgtggtccaacatccctggactgaaaagcaagcacgcacctctgacccctaaagaagaggagtacctgcaggcccaggtgcggagcagaagcaagctggacgcccctaaggtggatctgctggtgaagaattgcctcctgcccctgagagagtacttcaagtatttcagccagaatagtctgcccctgggaggcagcggcggcggcgccctggtgacatttgaggacgtcgccgtgcggttcacccaggaggaatgggctctgctggatccttctcagaaaatcctgtaccgggacgtgatgagagagacataccggaatctgacctccgtgggcatcaactgggaatgttgggaccttgaagcctgcttcagaagcctgggaagaaacctgagagtgcaggtggtgaagagaaagtgcgagctgaccaacagcggcccctgcgccgagggcggcccaagcagcggcgcccctcctcccagcggcggcagcccagccggctccccaacctctaccgaggagggcacctctgagtccgccacccccgagagcggccctggcacctccaccgagcccagcgagggcagcgcacccggcagccctgccggcagccccacctccacagaggagggaaccagcaccgagcccagcgaaggcagcgccccaggcaccagcaccgagcctagtgagcaggagattaaacggatcaacaagatcagaagaagacttgtgaaagacagcaacaccaagaaggccggcaagacaggccccatgaaaaccctgctggttagagtgatgacacccgatctgagagagcggctggaaaacctgagaaagaagcctgaaaatatcccccagcccatcagcaatacatctagagccaacctgaataagctgctgaccgattacaccgaaatgaagaaggcgatcctgcatgtgtactgggaagagttccagaaggaccctgtgggcctgatgagccgggtggcccagcctgccagcaagaagatcgatcagaacaagctgaaacctgagatggacgagaagggcaacctgaccaccgccggctttgcctgctctcagtgtggccagcccctgttcgtgtacaagctggagcaggtgtctgagaagggcaaggcttacaccaactacttcggacggtgcaatgtggccgagcacgaaaagctgatcctgctggcccagctgaagcccgagaaggatagcgacgaagccgtgacatatagcctgggaaagtttgggcagagggccctggatttctacagcattcatgtgaccaaggagtccacccaccccgtgaagcccctggcccagatcgccggaaacagatacgcctccggacctgtgggaaaggccctgagcgacgcatgtatgggcacaatcgcctccttcctgtctaagtaccaggacatcatcatcgaacaccagaaggtggtgaagggcaaccagaagagactggagagcctgcgggagctggccggcaaggaaaacctggaataccctagcgtgaccctgccacctcagcctcacaccaaggagggcgttgatgcctacaacgaagtgatcgcccgggtgcgaatgtgggtgaacctgaacctgtggcagaagctgaagctaagcagagatgatgccaagcctctgctgagactgaagggattcccttcctttcctctggtcgagagacaggccaacgaagtggactggtgggacatggtgtgtaacgtgaagaagctgatcaacgagaaaaaggaggatggcaaggtgttttggcagaatctggctggctacaagagacaggaagccctgagaccatacctgagcagcgaggaagatcggaagaagggaaagaaattcgctcggtaccagctgggcgacctgctgctgcacctggaaaagaagcacggcgaggactggggaaaggtgtacgacgaggcctgggagcggattgacaagaaagtggaaggcctgagcaagcacatcaagctggaagaggaacggagaagcgaggacgcccagagcaaggccgccctgaccgactggctgcgggctaaggccagcttcgtgatcgagggcctgaaggaggccgacaaggacgagttctgcagatgcgagctgaagctgcagaagtggtacggggacctgcggggaaagcccttcgccatcgaagccgagaacagcatcctggacatcagcggcttcagcaagcagtacaactgtgccttcatctggcagaaggacggcgtgaagaagctgaacctgtacctgatcatcaactacttcaagggcggcaagctgcggttcaagaagatcaaacctgaagccttcgaagccaacagattctacaccgtgatcaacaaaaagagcggcgagatcgtgcccatggaggtgaacttcaacttcgacgaccccaacctgatcatcctgcctctggcctttggcaagagacagggcagagaattcatctggaacgacctgctgtccctggaaaccggcagcctgaagctggccaacggaagagtgatcgagaagacactgtacaacagaagaacccggcaggatgagcctgccctgttcgtggccctgaccttcgagcggcgggaggtcctggactcctccaatatcaaaccaatgaacctgatcggcgtggcaagaggcgaaaacatccccgccgtgatcgccctgaccgaccccgagggctgcccactgagccggtttaaggatagcctgggaaacccaacccacatcctgagaatcggcgagagctataaggagaagcagcggaccatccaggccaagaaggaggtggagcagcggagagccggcggctacagccggaagtacgccagcaaagccaagaatctggcagacgatatggtgagaaacaccgctagagatctgctgtactacgccgtgacccaggatgccatgctgatcttcgccaacctgagccggggcttcggccggcagggcaagcggaccttcatggccgagagacagtacacacggatggaggactggctgaccgccaagctggcctacgagggcctgagcaagacctacctgtccaagacactggcccagtacacctccaagacatgcagcaactgtgggtttaccatcaccagcgccgactacgacagggtgctggagaagctgaagaagacagcaacaggctggatgaccacaattaacggcaaggagctgaaggtggagggccagattacctactacaacagatacaagagacagaacgtagtcaaggacctgtccgtcgagctggatagactgagcgaagaatctgtgaacaacgacatctcctcctggacaaagggcagaagcggagaagctctgagcctcctgaagaaaagattctcccatagacccgtgcaggagaagttcgtgtgcctgaactgcggcttcgagacacacgcagccgagcaagccgccctgaacatcgccagatcctggctgttcctgcggagccaggagtacaagaaataccagacaaacaagacaaccggcaacaccgataagagagccttcgtcgagacctggcagtccttttaccggaagaagcttaaggaggtgtggaaacctgccgtgcggtctggcggatctggcggaggctccgcccacagcatggtgatgttcagggacgtgaccgtggacttcagccaggaggagtgggagtgcctgagcagctacgagagggacctgtacagggacgtgatgctggagaactacagccacctggtgagcctgggctgcagcatcagcaagcccgacgtgatcaccctgctggagcagggcaaggagccctggatgatcgtgagggccgagaagaggaggtggagcagggacctggagagcaggggcggcccaagcagcggcgcccctcctcccagcggcggcagcccagccggctccccaacctctaccgaggagggcacctctgagtccgccacccccgagagcggccctggcacctccaccgagcccagcgagggcagcgcacccggcagccctgccggcagccccacctccacagaggagggaaccagcaccgagcccagcgaaggcagcgccccaggcaccagcaccgagcctagtgagcaggagattaaacggatcaacaagatcagaagaagacttgtgaaagacagcaacaccaagaaggccggcaagacaggccccatgaaaaccctgctggttagagtgatgacacccgatctgagagagcggctggaaaacctgagaaagaagcctgaaaatatcccccagcccatcagcaatacatctagagccaacctgaataagctgctgaccgattacaccgaaatgaagaaggcgatcctgcatgtgtactgggaagagttccagaaggaccctgtgggcctgatgagccgggtggcccagcctgccagcaagaagatcgatcagaacaagctgaaacctgagatggacgagaagggcaacctgaccaccgccggctttgcctgctctcagtgtggccagcccctgttcgtgtacaagctggagcaggtgtctgagaagggcaaggcttacaccaactacttcggacggtgcaatgtggccgagcacgaaaagctgatcctgctggcccagctgaagcccgagaaggatagcgacgaagccgtgacatatagcctgggaaagtttgggcagagggccctggatttctacagcattcatgtgaccaaggagtccacccaccccgtgaagcccctggcccagatcgccggaaacagatacgcctccggacctgtgggaaaggccctgagcgacgcatgtatgggcacaatcgcctccttcctgtctaagtaccaggacatcatcatcgaacaccagaaggtggtgaagggcaaccagaagagactggagagcctgcgggagctggccggcaaggaaaacctggaataccctagcgtgaccctgccacctcagcctcacaccaaggagggcgttgatgcctacaacgaagtgatcgcccgggtgcgaatgtgggtgaacctgaacctgtggcagaagctgaagctaagcagagatgatgccaagcctctgctgagactgaagggattcccttcctttcctctggtcgagagacaggccaacgaagtggactggtgggacatggtgtgtaacgtgaagaagctgatcaacgagaaaaaggaggatggcaaggtgttttggcagaatctggctggctacaagagacaggaagccctgagaccatacctgagcagcgaggaagatcggaagaagggaaagaaattcgctcggtaccagctgggcgacctgctgctgcacctggaaaagaagcacggcgaggactggggaaaggtgtacgacgaggcctgggagcggattgacaagaaagtggaaggcctgagcaagcacatcaagctggaagaggaacggagaagcgaggacgcccagagcaaggccgccctgaccgactggctgcgggctaaggccagcttcgtgatcgagggcctgaaggaggccgacaaggacgagttctgcagatgcgagctgaagctgcagaagtggtacggggacctgcggggaaagcccttcgccatcgaagccgagaacagcatcctggacatcagcggcttcagcaagcagtacaactgtgccttcatctggcagaaggacggcgtgaagaagctgaacctgtacctgatcatcaactacttcaagggcggcaagctgcggttcaagaagatcaaacctgaagccttcgaagccaacagattctacaccgtgatcaacaaaaagagcggcgagatcgtgcccatggaggtgaacttcaacttcgacgaccccaacctgatcatcctgcctctggcctttggcaagagacagggcagagaattcatctggaacgacctgctgtccctggaaaccggcagcctgaagctggccaacggaagagtgatcgagaagacactgtacaacagaagaacccggcaggatgagcctgccctgttcgtggccctgaccttcgagcggcgggaggtcctggactcctccaatatcaaaccaatgaacctgatcggcgtggcaagaggcgaaaacatccccgccgtgatcgccctgaccgaccccgagggctgcccactgagccggtttaaggatagcctgggaaacccaacccacatcctgagaatcggcgagagctataaggagaagcagcggaccatccaggccaagaaggaggtggagcagcggagagccggcggctacagccggaagtacgccagcaaagccaagaatctggcagacgatatggtgagaaacaccgctagagatctgctgtactacgccgtgacccaggatgccatgctgatcttcgccaacctgagccggggcttcggccggcagggcaagcggaccttcatggccgagagacagtacacacggatggaggactggctgaccgccaagctggcctacgagggcctgagcaagacctacctgtccaagacactggcccagtacacctccaagacatgcagcaactgtgggtttaccatcaccagcgccgactacgacagggtgctggagaagctgaagaagacagcaacaggctggatgaccacaattaacggcaaggagctgaaggtggagggccagattacctactacaacagatacaagagacagaacgtagtcaaggacctgtccgtcgagctggatagactgagcgaagaatctgtgaacaacgacatctcctcctggacaaagggcagaagcggagaagctctgagcctcctgaagaaaagattctcccatagacccgtgcaggagaagttcgtgtgcctgaactgcggcttcgagacacacgcagccgagcaagccgccctgaacatcgccagatcctggctgttcctgcggagccaggagtacaagaaataccagacaaacaagacaaccggcaacaccgataagagagccttcgtcgagacctggcagtccttttaccggaagaagcttaaggaggtgtggaaacctgccgtgcggtctggcggatctggcggaggctcctgcccacagcatggtgatgttcagggacgtgaccgtggacttcagccaggaggagtgggagtgcctgagcagctacgagagggacctgtacagggacgtgatgctggagaactacagccacctggtgagcctgggctgcagcatcagcaagcccgacgtgatcaccctgctggagcagggcaaggagccctggatgatcgtgagggccgagaagaggaggtggagcagggacctggagagcaggggatctggctccggcagcggccccaagaaaaagagaaaagtctaagctgccttctgcggggcttgccttctggccatgcccttcttctctcccttgcacctgtacctcttggtctttgaataaagcctgagtaggaaggctagcaaaaaaaaaaaaaaaaaaaaaaaaaaaaaaaaaaaaaaaaaaaaaaaaaaaaaaaaaaaaaaaaaaaaaaaaaaaaaaaa

SEQ ID NO: 15337 - RNA, 9485 nt, synthetic construct
  source 1..9485: mol_type = other RNA
aggaaataagagagaaaagaagagtaagaagaaatataagagccaccatggcccctaagaagaagcgtaaagtgagccggatggaacgcctcgtctacgaggtgcggcagaagtgcagaaacatcgaggacatctgcatctcctgcggatctctgaacgtgaccctggagcacccactgttcatcggcggcatgtgccagaactgtaaaaactgttttctggagtgtgcctatcaatacgacgatgacggctaccagagctactgcaccatctgttgcggcggaagagaggtgctgatgtgtggaaataacaactgctgccggtgcttctgcgtggaatgcgtggacctgctggtgggccccggcgccgcccaggccgctattaaggaagatccttggaactgctacatgtgcggccacaagggcacatacggcctgctgagacggagagaggactggcctagcagactgcagatgttcttcgccaataaccacgaccaggagttcgacccccctaaggtgtaccctcccgtccccgccgagaagagaaagcccatccgggtcctgagcctgttcgatggcatcgccaccggtctgctggtgctgaaggacctgggcatccaggtggataggtacattgcctccgaggtgtgcgaggactccatcaccgtgggaatggtgcgtcatcagggcaagatcatgtacgtgggcgacgtgcggagcgtgacacagaagcatatccaggagtggggccctttcgacctggtgatcggcggcagcccttgcaatgacctgagcatcgtgaacccagcccggaagggcctgtacgagggaaccggcagactgttcttcgagttttacagactgctgcacgacgcccggcctaaggaaggcgacgaccggcccttcttttggctgttcgagaatgtggtggccatgggagtcagcgacaagcgggatattagccggttcctggagagcaaccccgtgatgatcgatgccaaggaagtgagcgccgcccaccgggccagatacttctggggcaatctgcctggcatgaacagacccctggccagcaccgtgaacgacaagctggagctgcaggagtgcctggagcacggccggatcgccaagttcagcaaggtgagaaccatcaccacccgaagcaacagcatcaaacaaggcaaggaccagcactttcctgtgttcatgaacgagaaggaggacatcctgtggtgtaccgagatggagagagtgttcgggttcccagtccactacacagatgtcagcaacatgtctagactggccagacagagactgctgggaagaagctggtccgtccctgtgatcagacacctgttcgcccctctgaaggagtacttcgcctgcgtgagcagcggcaacagcaacgccaacagccggggccccagcttctctagcggcctggtgccactgtccctgagagggagccacatgggccccatggagatctacaaaaccgtgagcgcctggaagcggcagcctgtgcgcgtgctgagcctgtttcggaatatcgataaagtcctgaaaagcctgggattcctggagagcggctctggctccggcggtggcaccctgaagtacgtggaggatgtgacaaacgtggtcagacgggatgtggagaagtggggccccttcgatctggtgtacggcagcacccaacccctgggcagctcttgtgaccggtgccctggctggtacatgtttcagttccaccggatcctgcagtacgccctgccgagacaggagtcccagcggccattcttttggattttcatggacaacttgctgctgaccgaggatgaccaggaaactaccactcggttcctgcagaccgaagccgtgaccctgcaggacgtgagaggccgggactaccagaacgccatgcgggtgtggtccaacatccctggactgaaaagcaagcacgcacctctgacccctaaagaagaggagtacctgcaggcccaggtgcggagcagaagcaagctggacgcccctaaggtggatctgctggtgaagaattgcctcctgcccctgagagagtacttcaagtatttcagccagaatagtctgcccctgggaggcagcggcggcggcgccctggtgacatttgaggacgtcgccgtgcggttcacccaggaggaatgggctctgctggatccttctcagaaaatcctgtaccgggacgtgatgagagagacataccggaatctgacctccgtgggcatcaactgggaatgttgggaccttgaagcctgcttcagaagcctgggaagaaacctgagagtgcaggtggtgaagagaaagtgcgagctgaccaacagcggcccctgcgccgagggcggcccaagcagcggcgcccctcctcccagcggcggcagcccagccggctccccaacctctaccgaggagggcacctctgagtccgccacccccgagagcggccctggcacctccaccgagcccagcgagggcagcgcacccggcagccctgccggcagccccacctccacagaggagggaaccagcaccgagcccagcgaaggcagcgccccaggcaccagcaccgagcctagtgagcaggagattaaacggatcaacaagatcagaagaagacttgtgaaagacagcaacaccaagaaggccggcaagacaggccccatgaaaaccctgctggttagagtgatgacacccgatctgagagagcggctggaaaacctgagaaagaagcctgaaaatatcccccagcccatcagcaatacatctagagccaacctgaataagctgctgaccgattacaccgaaatgaagaaggcgatcctgcatgtgtactgggaagagttccagaaggaccctgtgggcctgatgagccgggtggcccagcctgccagcaagaagatcgatcagaacaagctgaaacctgagatggacgagaagggcaacctgaccaccgccggctttgcctgctctcagtgtggccagcccctgttcgtgtacaagctggagcaggtgtctgagaagggcaaggcttacaccaactacttcggacggtgcaatgtggccgagcacgaaaagctgatcctgctggcccagctgaagcccgagaaggatagcgacgaagccgtgacatatagcctgggaaagtttgggcagagggccctggatttctacagcattcatgtgaccaaggagtccacccaccccgtgaagcccctggcccagatcgccggaaacagatacgcctccggacctgtgggaaaggccctgagcgacgcatgtatgggcacaatcgcctccttcctgtctaagtaccaggacatcatcatcgaacaccagaaggtggtgaagggcaaccagaagagactggagagcctgcgggagctggccggcaaggaaaacctggaataccctagcgtgaccctgccacctcagcctcacaccaaggagggcgttgatgcctacaacgaagtgatcgcccgggtgcgaatgtgggtgaacctgaacctgtggcagaagctgaagctaagcagagatgatgccaagcctctgctgagactgaagggattcccttcctttcctctggtcgagagacaggccaacgaagtggactggtgggacatggtgtgtaacgtgaagaagctgatcaacgagaaaaaggaggatggcaaggtgttttggcagaatctggctggctacaagagacaggaagccctgagaccatacctgagcagcgaggaagatcggaagaagggaaagaaattcgctcggtaccagctgggcgacctgctgctgcacctggaaaagaagcacggcgaggactggggaaaggtgtacgacgaggcctgggagcggattgacaagaaagtggaaggcctgagcaagcacatcaagctggaagaggaacggagaagcgaggacgcccagagcaaggccgccctgaccgactggctgcgggctaaggccagcttcgtgatcgagggcctgaaggaggccgacaaggacgagttctgcagatgcgagctgaagctgcagaagtggtacggggacctgcggggaaagcccttcgccatcgaagccgagaacagcatcctggacatcagcggcttcagcaagcagtacaactgtgccttcatctggcagaaggacggcgtgaagaagctgaacctgtacctgatcatcaactacttcaagggcggcaagctgcggttcaagaagatcaaacctgaagccttcgaagccaacagattctacaccgtgatcaacaaaaagagcggcgagatcgtgcccatggaggtgaacttcaacttcgacgaccccaacctgatcatcctgcctctggcctttggcaagagacagggcagagaattcatctggaacgacctgctgtccctggaaaccggcagcctgaagctggccaacggaagagtgatcgagaagacactgtacaacagaagaacccggcaggatgagcctgccctgttcgtggccctgaccttcgagcggcgggaggtcctggactcctccaatatcaaaccaatgaacctgatcggcgtggcaagaggcgaaaacatccccgccgtgatcgccctgaccgaccccgagggctgcccactgagccggtttaaggatagcctgggaaacccaacccacatcctgagaatcggcgagagctataaggagaagcagcggaccatccaggccaagaaggaggtggagcagcggagagccggcggctacagccggaagtacgccagcaaagccaagaatctggcagacgatatggtgagaaacaccgctagagatctgctgtactacgccgtgacccaggatgccatgctgatcttcgccaacctgagccggggcttcggccggcagggcaagcggaccttcatggccgagagacagtacacacggatggaggactggctgaccgccaagctggcctacgagggcctgagcaagacctacctgtccaagacactggcccagtacacctccaagacatgcagcaactgtgggtttaccatcaccagcgccgactacgacagggtgctggagaagctgaagaagacagcaacaggctggatgaccacaattaacggcaaggagctgaaggtggagggccagattacctactacaacagatacaagagacagaacgtagtcaaggacctgtccgtcgagctggatagactgagcgaagaatctgtgaacaacgacatctcctcctggacaaagggcagaagcggagaagctctgagcctcctgaagaaaagattctcccatagacccgtgcaggagaagttcgtgtgcctgaactgcggcttcgagacacacgcagccgagcaagccgccctgaacatcgccagatcctggctgttcctgcggagccaggagtacaagaaataccagacaaacaagacaaccggcaacaccgataagagagccttcgtcgagacctggcagtccttttaccggaagaagcttaaggaggtgtggaaacctgccgtgcggtctggcggatctggcggaggctccagcaaggcccccgtgaccttcggcgacctggccatctacttcagccaggaggagtgggagtggctgagccccaaccagaaggacctgtacgaggacgtgatgctggagaactaccacaacctggtgagcgtgggcctggcctgcaggaggcccaacatcatcgccctgctggagaagggcaaggccccctggatggtggagcccagcaggaagaggaggggccccgagctgggcagcaaggacggcggcccaagcagcggcgcccctcctcccagcggcggcagcccagccggctccccaacctctaccgaggagggcacctctgagtccgccacccccgagagcggccctggcacctccaccgagcccagcgagggcagcgcacccggcagccctgccggcagccccacctccacagaggagggaaccagcaccgagcccagcgaaggcagcgccccaggcaccagcaccgagcctagtgagcaggagattaaacggatcaacaagatcagaagaagacttgtgaaagacagcaacaccaagaaggccggcaagacaggccccatgaaaaccctgctggttagagtgatgacacccgatctgagagagcggctggaaaacctgagaaagaagcctgaaaatatcccccagcccatcagcaatacatctagagccaacctgaataagctgctgaccgattacaccgaaatgaagaaggcgatcctgcatgtgtactgggaagagttccagaaggaccctgtgggcctgatgagccgggtggcccagcctgccagcaagaagatcgatcagaacaagctgaaacctgagatggacgagaagggcaacctgaccaccgccggctttgcctgctctcagtgtggccagcccctgttcgtgtacaagctggagcaggtgtctgagaagggcaaggcttacaccaactacttcggacggtgcaatgtggccgagcacgaaaagctgatcctgctggcccagctgaagcccgagaaggatagcgacgaagccgtgacatatagcctgggaaagtttgggcagagggccctggatttctacagcattcatgtgaccaaggagtccacccaccccgtgaagcccctggcccagatcgccggaaacagatacgcctccggacctgtgggaaaggccctgagcgacgcatgtatgggcacaatcgcctccttcctgtctaagtaccaggacatcatcatcgaacaccagaaggtggtgaagggcaaccagaagagactggagagcctgcgggagctggccggcaaggaaaacctggaataccctagcgtgaccctgccacctcagcctcacaccaaggagggcgttgatgcctacaacgaagtgatcgcccgggtgcgaatgtgggtgaacctgaacctgtggcagaagctgaagctaagcagagatgatgccaagcctctgctgagactgaagggattcccttcctttcctctggtcgagagacaggccaacgaagtggactggtgggacatggtgtgtaacgtgaagaagctgatcaacgagaaaaaggaggatggcaaggtgttttggcagaatctggctggctacaagagacaggaagccctgagaccatacctgagcagcgaggaagatcggaagaagggaaagaaattcgctcggtaccagctgggcgacctgctgctgcacctggaaaagaagcacggcgaggactggggaaaggtgtacgacgaggcctgggagcggattgacaagaaagtggaaggcctgagcaagcacatcaagctggaagaggaacggagaagcgaggacgcccagagcaaggccgccctgaccgactggctgcgggctaaggccagcttcgtgatcgagggcctgaaggaggccgacaaggacgagttctgcagatgcgagctgaagctgcagaagtggtacggggacctgcggggaaagcccttcgccatcgaagccgagaacagcatcctggacatcagcggcttcagcaagcagtacaactgtgccttcatctggcagaaggacggcgtgaagaagctgaacctgtacctgatcatcaactacttcaagggcggcaagctgcggttcaagaagatcaaacctgaagccttcgaagccaacagattctacaccgtgatcaacaaaaagagcggcgagatcgtgcccatggaggtgaacttcaacttcgacgaccccaacctgatcatcctgcctctggcctttggcaagagacagggcagagaattcatctggaacgacctgctgtccctggaaaccggcagcctgaagctggccaacggaagagtgatcgagaagacactgtacaacagaagaacccggcaggatgagcctgccctgttcgtggccctgaccttcgagcggcgggaggtcctggactcctccaatatcaaaccaatgaacctgatcggcgtggcaagaggcgaaaacatccccgccgtgatcgccctgaccgaccccgagggctgcccactgagccggtttaaggatagcctgggaaacccaacccacatcctgagaatcggcgagagctataaggagaagcagcggaccatccaggccaagaaggaggtggagcagcggagagccggcggctacagccggaagtacgccagcaaagccaagaatctggcagacgatatggtgagaaacaccgctagagatctgctgtactacgccgtgacccaggatgccatgctgatcttcgccaacctgagccggggcttcggccggcagggcaagcggaccttcatggccgagagacagtacacacggatggaggactggctgaccgccaagctggcctacgagggcctgagcaagacctacctgtccaagacactggcccagtacacctccaagacatgcagcaactgtgggtttaccatcaccagcgccgactacgacagggtgctggagaagctgaagaagacagcaacaggctggatgaccacaattaacggcaaggagctgaaggtggagggccagattacctactacaacagatacaagagacagaacgtagtcaaggacctgtccgtcgagctggatagactgagcgaagaatctgtgaacaacgacatctcctcctggacaaagggcagaagcggagaagctctgagcctcctgaagaaaagattctcccatagacccgtgcaggagaagttcgtgtgcctgaactgcggcttcgagacacacgcagccgagcaagccgccctgaacatcgccagatcctggctgttcctgcggagccaggagtacaagaaataccagacaaacaagacaaccggcaacaccgataagagagccttcgtcgagacctggcagtccttttaccggaagaagcttaaggaggtgtggaaacctgccgtgcggtctggcggatctggcggaggctcctagcaaggcccccgtgaccttcggcgacctggccatctacttcagccaggaggagtgggagtggctgagccccaaccagaaggacctgtacgaggacgtgatgctggagaactaccacaacctggtgagcgtgggcctggcctgcaggaggcccaacatcatcgccctgctggagaagggcaaggccccctggatggtggagcccagcaggaagaggaggggccccgagctgggcagcaaggacggatctggctccggcagcggccccaagaaaaagagaaaagtctaagctgccttctgcggggcttgccttctggccatgcccttcttctctcccttgcacctgtacctcttggtctttgaataaagcctgagtaggaaggctagcaaaaaaaaaaaaaaaaaaaaaaaaaaaaaaaaaaaaaaaaaaaaaaaaaaaaaaaaaaaaaaaaaaaaaaaaaaaaaaaa

SEQ ID NO: 15338 - RNA, 9485 nt, synthetic construct
  source 1..9485: mol_type = other RNA
aggaaataagagagaaaagaagagtaagaagaaatataagagccaccatggcccctaagaagaagcgtaaagtgagccggatggaacgcctcgtctacgaggtgcggcagaagtgcagaaacatcgaggacatctgcatctcctgcggatctctgaacgtgaccctggagcacccactgttcatcggcggcatgtgccagaactgtaaaaactgttttctggagtgtgcctatcaatacgacgatgacggctaccagagctactgcaccatctgttgcggcggaagagaggtgctgatgtgtggaaataacaactgctgccggtgcttctgcgtggaatgcgtggacctgctggtgggccccggcgccgcccaggccgctattaaggaagatccttggaactgctacatgtgcggccacaagggcacatacggcctgctgagacggagagaggactggcctagcagactgcagatgttcttcgccaataaccacgaccaggagttcgacccccctaaggtgtaccctcccgtccccgccgagaagagaaagcccatccgggtcctgagcctgttcgatggcatcgccaccggtctgctggtgctgaaggacctgggcatccaggtggataggtacattgcctccgaggtgtgcgaggactccatcaccgtgggaatggtgcgtcatcagggcaagatcatgtacgtgggcgacgtgcggagcgtgacacagaagcatatccaggagtggggccctttcgacctggtgatcggcggcagcccttgcaatgacctgagcatcgtgaacccagcccggaagggcctgtacgagggaaccggcagactgttcttcgagttttacagactgctgcacgacgcccggcctaaggaaggcgacgaccggcccttcttttggctgttcgagaatgtggtggccatgggagtcagcgacaagcgggatattagccggttcctggagagcaaccccgtgatgatcgatgccaaggaagtgagcgccgcccaccgggccagatacttctggggcaatctgcctggcatgaacagacccctggccagcaccgtgaacgacaagctggagctgcaggagtgcctggagcacggccggatcgccaagttcagcaaggtgagaaccatcaccacccgaagcaacagcatcaaacaaggcaaggaccagcactttcctgtgttcatgaacgagaaggaggacatcctgtggtgtaccgagatggagagagtgttcgggttcccagtccactacacagatgtcagcaacatgtctagactggccagacagagactgctgggaagaagctggtccgtccctgtgatcagacacctgttcgcccctctgaaggagtacttcgcctgcgtgagcagcggcaacagcaacgccaacagccggggccccagcttctctagcggcctggtgccactgtccctgagagggagccacatgggccccatggagatctacaaaaccgtgagcgcctggaagcggcagcctgtgcgcgtgctgagcctgtttcggaatatcgataaagtcctgaaaagcctgggattcctggagagcggctctggctccggcggtggcaccctgaagtacgtggaggatgtgacaaacgtggtcagacgggatgtggagaagtggggccccttcgatctggtgtacggcagcacccaacccctgggcagctcttgtgaccggtgccctggctggtacatgtttcagttccaccggatcctgcagtacgccctgccgagacaggagtcccagcggccattcttttggattttcatggacaacttgctgctgaccgaggatgaccaggaaactaccactcggttcctgcagaccgaagccgtgaccctgcaggacgtgagaggccgggactaccagaacgccatgcgggtgtggtccaacatccctggactgaaaagcaagcacgcacctctgacccctaaagaagaggagtacctgcaggcccaggtgcggagcagaagcaagctggacgcccctaaggtggatctgctggtgaagaattgcctcctgcccctgagagagtacttcaagtatttcagccagaatagtctgcccctgggaggcagcggcggcggcgccctggtgacatttgaggacgtcgccgtgcggttcacccaggaggaatgggctctgctggatccttctcagaaaatcctgtaccgggacgtgatgagagagacataccggaatctgacctccgtgggcatcaactgggaatgttgggaccttgaagcctgcttcagaagcctgggaagaaacctgagagtgcaggtggtgaagagaaagtgcgagctgaccaacagcggcccctgcgccgagggcggcccaagcagcggcgcccctcctcccagcggcggcagcccagccggctccccaacctctaccgaggagggcacctctgagtccgccacccccgagagcggccctggcacctccaccgagcccagcgagggcagcgcacccggcagccctgccggcagccccacctccacagaggagggaaccagcaccgagcccagcgaaggcagcgccccaggcaccagcaccgagcctagtgagcaggagattaaacggatcaacaagatcagaagaagacttgtgaaagacagcaacaccaagaaggccggcaagacaggccccatgaaaaccctgctggttagagtgatgacacccgatctgagagagcggctggaaaacctgagaaagaagcctgaaaatatcccccagcccatcagcaatacatctagagccaacctgaataagctgctgaccgattacaccgaaatgaagaaggcgatcctgcatgtgtactgggaagagttccagaaggaccctgtgggcctgatgagccgggtggcccagcctgccagcaagaagatcgatcagaacaagctgaaacctgagatggacgagaagggcaacctgaccaccgccggctttgcctgctctcagtgtggccagcccctgttcgtgtacaagctggagcaggtgtctgagaagggcaaggcttacaccaactacttcggacggtgcaatgtggccgagcacgaaaagctgatcctgctggcccagctgaagcccgagaaggatagcgacgaagccgtgacatatagcctgggaaagtttgggcagagggccctggatttctacagcattcatgtgaccaaggagtccacccaccccgtgaagcccctggcccagatcgccggaaacagatacgcctccggacctgtgggaaaggccctgagcgacgcatgtatgggcacaatcgcctccttcctgtctaagtaccaggacatcatcatcgaacaccagaaggtggtgaagggcaaccagaagagactggagagcctgcgggagctggccggcaaggaaaacctggaataccctagcgtgaccctgccacctcagcctcacaccaaggagggcgttgatgcctacaacgaagtgatcgcccgggtgcgaatgtgggtgaacctgaacctgtggcagaagctgaagctaagcagagatgatgccaagcctctgctgagactgaagggattcccttcctttcctctggtcgagagacaggccaacgaagtggactggtgggacatggtgtgtaacgtgaagaagctgatcaacgagaaaaaggaggatggcaaggtgttttggcagaatctggctggctacaagagacaggaagccctgagaccatacctgagcagcgaggaagatcggaagaagggaaagaaattcgctcggtaccagctgggcgacctgctgctgcacctggaaaagaagcacggcgaggactggggaaaggtgtacgacgaggcctgggagcggattgacaagaaagtggaaggcctgagcaagcacatcaagctggaagaggaacggagaagcgaggacgcccagagcaaggccgccctgaccgactggctgcgggctaaggccagcttcgtgatcgagggcctgaaggaggccgacaaggacgagttctgcagatgcgagctgaagctgcagaagtggtacggggacctgcggggaaagcccttcgccatcgaagccgagaacagcatcctggacatcagcggcttcagcaagcagtacaactgtgccttcatctggcagaaggacggcgtgaagaagctgaacctgtacctgatcatcaactacttcaagggcggcaagctgcggttcaagaagatcaaacctgaagccttcgaagccaacagattctacaccgtgatcaacaaaaagagcggcgagatcgtgcccatggaggtgaacttcaacttcgacgaccccaacctgatcatcctgcctctggcctttggcaagagacagggcagagaattcatctggaacgacctgctgtccctggaaaccggcagcctgaagctggccaacggaagagtgatcgagaagacactgtacaacagaagaacccggcaggatgagcctgccctgttcgtggccctgaccttcgagcggcgggaggtcctggactcctccaatatcaaaccaatgaacctgatcggcgtggcaagaggcgaaaacatccccgccgtgatcgccctgaccgaccccgagggctgcccactgagccggtttaaggatagcctgggaaacccaacccacatcctgagaatcggcgagagctataaggagaagcagcggaccatccaggccaagaaggaggtggagcagcggagagccggcggctacagccggaagtacgccagcaaagccaagaatctggcagacgatatggtgagaaacaccgctagagatctgctgtactacgccgtgacccaggatgccatgctgatcttcgccaacctgagccggggcttcggccggcagggcaagcggaccttcatggccgagagacagtacacacggatggaggactggctgaccgccaagctggcctacgagggcctgagcaagacctacctgtccaagacactggcccagtacacctccaagacatgcagcaactgtgggtttaccatcaccagcgccgactacgacagggtgctggagaagctgaagaagacagcaacaggctggatgaccacaattaacggcaaggagctgaaggtggagggccagattacctactacaacagatacaagagacagaacgtagtcaaggacctgtccgtcgagctggatagactgagcgaagaatctgtgaacaacgacatctcctcctggacaaagggcagaagcggagaagctctgagcctcctgaagaaaagattctcccatagacccgtgcaggagaagttcgtgtgcctgaactgcggcttcgagacacacgcagccgagcaagccgccctgaacatcgccagatcctggctgttcctgcggagccaggagtacaagaaataccagacaaacaagacaaccggcaacaccgataagagagccttcgtcgagacctggcagtccttttaccggaagaagcttaaggaggtgtggaaacctgccgtgcggtctggcggatctggcggaggctccatggtgagcttcgaggacgtggccgtgctgctgagccaggaggagtgggactgcctgatccccgcccagaggggcctgtacagggacgtgatgctggagacctacggcaacctggtgagcctgggcctgcaggccagcaagcccgacgtgatcagcaggctggagcagggcgacgagccctggaccccccacatcctgaggacccagaggagctggagctggaggcacaagagggagtgctacggcggcccaagcagcggcgcccctcctcccagcggcggcagcccagccggctccccaacctctaccgaggagggcacctctgagtccgccacccccgagagcggccctggcacctccaccgagcccagcgagggcagcgcacccggcagccctgccggcagccccacctccacagaggagggaaccagcaccgagcccagcgaaggcagcgccccaggcaccagcaccgagcctagtgagcaggagattaaacggatcaacaagatcagaagaagacttgtgaaagacagcaacaccaagaaggccggcaagacaggccccatgaaaaccctgctggttagagtgatgacacccgatctgagagagcggctggaaaacctgagaaagaagcctgaaaatatcccccagcccatcagcaatacatctagagccaacctgaataagctgctgaccgattacaccgaaatgaagaaggcgatcctgcatgtgtactgggaagagttccagaaggaccctgtgggcctgatgagccgggtggcccagcctgccagcaagaagatcgatcagaacaagctgaaacctgagatggacgagaagggcaacctgaccaccgccggctttgcctgctctcagtgtggccagcccctgttcgtgtacaagctggagcaggtgtctgagaagggcaaggcttacaccaactacttcggacggtgcaatgtggccgagcacgaaaagctgatcctgctggcccagctgaagcccgagaaggatagcgacgaagccgtgacatatagcctgggaaagtttgggcagagggccctggatttctacagcattcatgtgaccaaggagtccacccaccccgtgaagcccctggcccagatcgccggaaacagatacgcctccggacctgtgggaaaggccctgagcgacgcatgtatgggcacaatcgcctccttcctgtctaagtaccaggacatcatcatcgaacaccagaaggtggtgaagggcaaccagaagagactggagagcctgcgggagctggccggcaaggaaaacctggaataccctagcgtgaccctgccacctcagcctcacaccaaggagggcgttgatgcctacaacgaagtgatcgcccgggtgcgaatgtgggtgaacctgaacctgtggcagaagctgaagctaagcagagatgatgccaagcctctgctgagactgaagggattcccttcctttcctctggtcgagagacaggccaacgaagtggactggtgggacatggtgtgtaacgtgaagaagctgatcaacgagaaaaaggaggatggcaaggtgttttggcagaatctggctggctacaagagacaggaagccctgagaccatacctgagcagcgaggaagatcggaagaagggaaagaaattcgctcggtaccagctgggcgacctgctgctgcacctggaaaagaagcacggcgaggactggggaaaggtgtacgacgaggcctgggagcggattgacaagaaagtggaaggcctgagcaagcacatcaagctggaagaggaacggagaagcgaggacgcccagagcaaggccgccctgaccgactggctgcgggctaaggccagcttcgtgatcgagggcctgaaggaggccgacaaggacgagttctgcagatgcgagctgaagctgcagaagtggtacggggacctgcggggaaagcccttcgccatcgaagccgagaacagcatcctggacatcagcggcttcagcaagcagtacaactgtgccttcatctggcagaaggacggcgtgaagaagctgaacctgtacctgatcatcaactacttcaagggcggcaagctgcggttcaagaagatcaaacctgaagccttcgaagccaacagattctacaccgtgatcaacaaaaagagcggcgagatcgtgcccatggaggtgaacttcaacttcgacgaccccaacctgatcatcctgcctctggcctttggcaagagacagggcagagaattcatctggaacgacctgctgtccctggaaaccggcagcctgaagctggccaacggaagagtgatcgagaagacactgtacaacagaagaacccggcaggatgagcctgccctgttcgtggccctgaccttcgagcggcgggaggtcctggactcctccaatatcaaaccaatgaacctgatcggcgtggcaagaggcgaaaacatccccgccgtgatcgccctgaccgaccccgagggctgcccactgagccggtttaaggatagcctgggaaacccaacccacatcctgagaatcggcgagagctataaggagaagcagcggaccatccaggccaagaaggaggtggagcagcggagagccggcggctacagccggaagtacgccagcaaagccaagaatctggcagacgatatggtgagaaacaccgctagagatctgctgtactacgccgtgacccaggatgccatgctgatcttcgccaacctgagccggggcttcggccggcagggcaagcggaccttcatggccgagagacagtacacacggatggaggactggctgaccgccaagctggcctacgagggcctgagcaagacctacctgtccaagacactggcccagtacacctccaagacatgcagcaactgtgggtttaccatcaccagcgccgactacgacagggtgctggagaagctgaagaagacagcaacaggctggatgaccacaattaacggcaaggagctgaaggtggagggccagattacctactacaacagatacaagagacagaacgtagtcaaggacctgtccgtcgagctggatagactgagcgaagaatctgtgaacaacgacatctcctcctggacaaagggcagaagcggagaagctctgagcctcctgaagaaaagattctcccatagacccgtgcaggagaagttcgtgtgcctgaactgcggcttcgagacacacgcagccgagcaagccgccctgaacatcgccagatcctggctgttcctgcggagccaggagtacaagaaataccagacaaacaagacaaccggcaacaccgataagagagccttcgtcgagacctggcagtccttttaccggaagaagcttaaggaggtgtggaaacctgccgtgcggtctggcggatctggcggaggctcctatggtgagcttcgaggacgtggccgtgctgctgagccaggaggagtgggactgcctgatccccgcccagaggggcctgtacagggacgtgatgctggagacctacggcaacctggtgagcctgggcctgcaggccagcaagcccgacgtgatcagcaggctggagcagggcgacgagccctggaccccccacatcctgaggacccagaggagctggagctggaggcacaagagggagtgctacggatctggctccggcagcggccccaagaaaaagagaaaagtctaagctgccttctgcggggcttgccttctggccatgcccttcttctctcccttgcacctgtacctcttggtctttgaataaagcctgagtaggaaggctagcaaaaaaaaaaaaaaaaaaaaaaaaaaaaaaaaaaaaaaaaaaaaaaaaaaaaaaaaaaaaaaaaaaaaaaaaaaaaaaaa

SEQ ID NO: 15339 - RNA, 9485 nt, synthetic construct
  source 1..9485: mol_type = other RNA
aggaaataagagagaaaagaagagtaagaagaaatataagagccaccatggcccctaagaagaagcgtaaagtgagccggatggaacgcctcgtctacgaggtgcggcagaagtgcagaaacatcgaggacatctgcatctcctgcggatctctgaacgtgaccctggagcacccactgttcatcggcggcatgtgccagaactgtaaaaactgttttctggagtgtgcctatcaatacgacgatgacggctaccagagctactgcaccatctgttgcggcggaagagaggtgctgatgtgtggaaataacaactgctgccggtgcttctgcgtggaatgcgtggacctgctggtgggccccggcgccgcccaggccgctattaaggaagatccttggaactgctacatgtgcggccacaagggcacatacggcctgctgagacggagagaggactggcctagcagactgcagatgttcttcgccaataaccacgaccaggagttcgacccccctaaggtgtaccctcccgtccccgccgagaagagaaagcccatccgggtcctgagcctgttcgatggcatcgccaccggtctgctggtgctgaaggacctgggcatccaggtggataggtacattgcctccgaggtgtgcgaggactccatcaccgtgggaatggtgcgtcatcagggcaagatcatgtacgtgggcgacgtgcggagcgtgacacagaagcatatccaggagtggggccctttcgacctggtgatcggcggcagcccttgcaatgacctgagcatcgtgaacccagcccggaagggcctgtacgagggaaccggcagactgttcttcgagttttacagactgctgcacgacgcccggcctaaggaaggcgacgaccggcccttcttttggctgttcgagaatgtggtggccatgggagtcagcgacaagcgggatattagccggttcctggagagcaaccccgtgatgatcgatgccaaggaagtgagcgccgcccaccgggccagatacttctggggcaatctgcctggcatgaacagacccctggccagcaccgtgaacgacaagctggagctgcaggagtgcctggagcacggccggatcgccaagttcagcaaggtgagaaccatcaccacccgaagcaacagcatcaaacaaggcaaggaccagcactttcctgtgttcatgaacgagaaggaggacatcctgtggtgtaccgagatggagagagtgttcgggttcccagtccactacacagatgtcagcaacatgtctagactggccagacagagactgctgggaagaagctggtccgtccctgtgatcagacacctgttcgcccctctgaaggagtacttcgcctgcgtgagcagcggcaacagcaacgccaacagccggggccccagcttctctagcggcctggtgccactgtccctgagagggagccacatgggccccatggagatctacaaaaccgtgagcgcctggaagcggcagcctgtgcgcgtgctgagcctgtttcggaatatcgataaagtcctgaaaagcctgggattcctggagagcggctctggctccggcggtggcaccctgaagtacgtggaggatgtgacaaacgtggtcagacgggatgtggagaagtggggccccttcgatctggtgtacggcagcacccaacccctgggcagctcttgtgaccggtgccctggctggtacatgtttcagttccaccggatcctgcagtacgccctgccgagacaggagtcccagcggccattcttttggattttcatggacaacttgctgctgaccgaggatgaccaggaaactaccactcggttcctgcagaccgaagccgtgaccctgcaggacgtgagaggccgggactaccagaacgccatgcgggtgtggtccaacatccctggactgaaaagcaagcacgcacctctgacccctaaagaagaggagtacctgcaggcccaggtgcggagcagaagcaagctggacgcccctaaggtggatctgctggtgaagaattgcctcctgcccctgagagagtacttcaagtatttcagccagaatagtctgcccctgggaggcagcggcggcggcgccctggtgacatttgaggacgtcgccgtgcggttcacccaggaggaatgggctctgctggatccttctcagaaaatcctgtaccgggacgtgatgagagagacataccggaatctgacctccgtgggcatcaactgggaatgttgggaccttgaagcctgcttcagaagcctgggaagaaacctgagagtgcaggtggtgaagagaaagtgcgagctgaccaacagcggcccctgcgccgagggcggcccaagcagcggcgcccctcctcccagcggcggcagcccagccggctccccaacctctaccgaggagggcacctctgagtccgccacccccgagagcggccctggcacctccaccgagcccagcgagggcagcgcacccggcagccctgccggcagccccacctccacagaggagggaaccagcaccgagcccagcgaaggcagcgccccaggcaccagcaccgagcctagtgagcaggagattaaacggatcaacaagatcagaagaagacttgtgaaagacagcaacaccaagaaggccggcaagacaggccccatgaaaaccctgctggttagagtgatgacacccgatctgagagagcggctggaaaacctgagaaagaagcctgaaaatatcccccagcccatcagcaatacatctagagccaacctgaataagctgctgaccgattacaccgaaatgaagaaggcgatcctgcatgtgtactgggaagagttccagaaggaccctgtgggcctgatgagccgggtggcccagcctgccagcaagaagatcgatcagaacaagctgaaacctgagatggacgagaagggcaacctgaccaccgccggctttgcctgctctcagtgtggccagcccctgttcgtgtacaagctggagcaggtgtctgagaagggcaaggcttacaccaactacttcggacggtgcaatgtggccgagcacgaaaagctgatcctgctggcccagctgaagcccgagaaggatagcgacgaagccgtgacatatagcctgggaaagtttgggcagagggccctggatttctacagcattcatgtgaccaaggagtccacccaccccgtgaagcccctggcccagatcgccggaaacagatacgcctccggacctgtgggaaaggccctgagcgacgcatgtatgggcacaatcgcctccttcctgtctaagtaccaggacatcatcatcgaacaccagaaggtggtgaagggcaaccagaagagactggagagcctgcgggagctggccggcaaggaaaacctggaataccctagcgtgaccctgccacctcagcctcacaccaaggagggcgttgatgcctacaacgaagtgatcgcccgggtgcgaatgtgggtgaacctgaacctgtggcagaagctgaagctaagcagagatgatgccaagcctctgctgagactgaagggattcccttcctttcctctggtcgagagacaggccaacgaagtggactggtgggacatggtgtgtaacgtgaagaagctgatcaacgagaaaaaggaggatggcaaggtgttttggcagaatctggctggctacaagagacaggaagccctgagaccatacctgagcagcgaggaagatcggaagaagggaaagaaattcgctcggtaccagctgggcgacctgctgctgcacctggaaaagaagcacggcgaggactggggaaaggtgtacgacgaggcctgggagcggattgacaagaaagtggaaggcctgagcaagcacatcaagctggaagaggaacggagaagcgaggacgcccagagcaaggccgccctgaccgactggctgcgggctaaggccagcttcgtgatcgagggcctgaaggaggccgacaaggacgagttctgcagatgcgagctgaagctgcagaagtggtacggggacctgcggggaaagcccttcgccatcgaagccgagaacagcatcctggacatcagcggcttcagcaagcagtacaactgtgccttcatctggcagaaggacggcgtgaagaagctgaacctgtacctgatcatcaactacttcaagggcggcaagctgcggttcaagaagatcaaacctgaagccttcgaagccaacagattctacaccgtgatcaacaaaaagagcggcgagatcgtgcccatggaggtgaacttcaacttcgacgaccccaacctgatcatcctgcctctggcctttggcaagagacagggcagagaattcatctggaacgacctgctgtccctggaaaccggcagcctgaagctggccaacggaagagtgatcgagaagacactgtacaacagaagaacccggcaggatgagcctgccctgttcgtggccctgaccttcgagcggcgggaggtcctggactcctccaatatcaaaccaatgaacctgatcggcgtggcaagaggcgaaaacatccccgccgtgatcgccctgaccgaccccgagggctgcccactgagccggtttaaggatagcctgggaaacccaacccacatcctgagaatcggcgagagctataaggagaagcagcggaccatccaggccaagaaggaggtggagcagcggagagccggcggctacagccggaagtacgccagcaaagccaagaatctggcagacgatatggtgagaaacaccgctagagatctgctgtactacgccgtgacccaggatgccatgctgatcttcgccaacctgagccggggcttcggccggcagggcaagcggaccttcatggccgagagacagtacacacggatggaggactggctgaccgccaagctggcctacgagggcctgagcaagacctacctgtccaagacactggcccagtacacctccaagacatgcagcaactgtgggtttaccatcaccagcgccgactacgacagggtgctggagaagctgaagaagacagcaacaggctggatgaccacaattaacggcaaggagctgaaggtggagggccagattacctactacaacagatacaagagacagaacgtagtcaaggacctgtccgtcgagctggatagactgagcgaagaatctgtgaacaacgacatctcctcctggacaaagggcagaagcggagaagctctgagcctcctgaagaaaagattctcccatagacccgtgcaggagaagttcgtgtgcctgaactgcggcttcgagacacacgcagccgagcaagccgccctgaacatcgccagatcctggctgttcctgcggagccaggagtacaagaaataccagacaaacaagacaaccggcaacaccgataagagagccttcgtcgagacctggcagtccttttaccggaagaagcttaaggaggtgtggaaacctgccgtgcggtctggcggatctggcggaggctccccccagaagagcgtgaccttcgaggacgtggccgtgtacttcacccagaccgagtgggacggcctgagccccgcccagagggccctgtacagggacgtgatgctggagaactacggcaacgtggccagcctgggcttcagcctgctgaagcccgccgtgatcagccagctggagggcgccggcgagctggagggccccagccccctggccgccggcaccgagatcggcccccagggcctgtggggcggcccaagcagcggcgcccctcctcccagcggcggcagcccagccggctccccaacctctaccgaggagggcacctctgagtccgccacccccgagagcggccctggcacctccaccgagcccagcgagggcagcgcacccggcagccctgccggcagccccacctccacagaggagggaaccagcaccgagcccagcgaaggcagcgccccaggcaccagcaccgagcctagtgagcaggagattaaacggatcaacaagatcagaagaagacttgtgaaagacagcaacaccaagaaggccggcaagacaggccccatgaaaaccctgctggttagagtgatgacacccgatctgagagagcggctggaaaacctgagaaagaagcctgaaaatatcccccagcccatcagcaatacatctagagccaacctgaataagctgctgaccgattacaccgaaatgaagaaggcgatcctgcatgtgtactgggaagagttccagaaggaccctgtgggcctgatgagccgggtggcccagcctgccagcaagaagatcgatcagaacaagctgaaacctgagatggacgagaagggcaacctgaccaccgccggctttgcctgctctcagtgtggccagcccctgttcgtgtacaagctggagcaggtgtctgagaagggcaaggcttacaccaactacttcggacggtgcaatgtggccgagcacgaaaagctgatcctgctggcccagctgaagcccgagaaggatagcgacgaagccgtgacatatagcctgggaaagtttgggcagagggccctggatttctacagcattcatgtgaccaaggagtccacccaccccgtgaagcccctggcccagatcgccggaaacagatacgcctccggacctgtgggaaaggccctgagcgacgcatgtatgggcacaatcgcctccttcctgtctaagtaccaggacatcatcatcgaacaccagaaggtggtgaagggcaaccagaagagactggagagcctgcgggagctggccggcaaggaaaacctggaataccctagcgtgaccctgccacctcagcctcacaccaaggagggcgttgatgcctacaacgaagtgatcgcccgggtgcgaatgtgggtgaacctgaacctgtggcagaagctgaagctaagcagagatgatgccaagcctctgctgagactgaagggattcccttcctttcctctggtcgagagacaggccaacgaagtggactggtgggacatggtgtgtaacgtgaagaagctgatcaacgagaaaaaggaggatggcaaggtgttttggcagaatctggctggctacaagagacaggaagccctgagaccatacctgagcagcgaggaagatcggaagaagggaaagaaattcgctcggtaccagctgggcgacctgctgctgcacctggaaaagaagcacggcgaggactggggaaaggtgtacgacgaggcctgggagcggattgacaagaaagtggaaggcctgagcaagcacatcaagctggaagaggaacggagaagcgaggacgcccagagcaaggccgccctgaccgactggctgcgggctaaggccagcttcgtgatcgagggcctgaaggaggccgacaaggacgagttctgcagatgcgagctgaagctgcagaagtggtacggggacctgcggggaaagcccttcgccatcgaagccgagaacagcatcctggacatcagcggcttcagcaagcagtacaactgtgccttcatctggcagaaggacggcgtgaagaagctgaacctgtacctgatcatcaactacttcaagggcggcaagctgcggttcaagaagatcaaacctgaagccttcgaagccaacagattctacaccgtgatcaacaaaaagagcggcgagatcgtgcccatggaggtgaacttcaacttcgacgaccccaacctgatcatcctgcctctggcctttggcaagagacagggcagagaattcatctggaacgacctgctgtccctggaaaccggcagcctgaagctggccaacggaagagtgatcgagaagacactgtacaacagaagaacccggcaggatgagcctgccctgttcgtggccctgaccttcgagcggcgggaggtcctggactcctccaatatcaaaccaatgaacctgatcggcgtggcaagaggcgaaaacatccccgccgtgatcgccctgaccgaccccgagggctgcccactgagccggtttaaggatagcctgggaaacccaacccacatcctgagaatcggcgagagctataaggagaagcagcggaccatccaggccaagaaggaggtggagcagcggagagccggcggctacagccggaagtacgccagcaaagccaagaatctggcagacgatatggtgagaaacaccgctagagatctgctgtactacgccgtgacccaggatgccatgctgatcttcgccaacctgagccggggcttcggccggcagggcaagcggaccttcatggccgagagacagtacacacggatggaggactggctgaccgccaagctggcctacgagggcctgagcaagacctacctgtccaagacactggcccagtacacctccaagacatgcagcaactgtgggtttaccatcaccagcgccgactacgacagggtgctggagaagctgaagaagacagcaacaggctggatgaccacaattaacggcaaggagctgaaggtggagggccagattacctactacaacagatacaagagacagaacgtagtcaaggacctgtccgtcgagctggatagactgagcgaagaatctgtgaacaacgacatctcctcctggacaaagggcagaagcggagaagctctgagcctcctgaagaaaagattctcccatagacccgtgcaggagaagttcgtgtgcctgaactgcggcttcgagacacacgcagccgagcaagccgccctgaacatcgccagatcctggctgttcctgcggagccaggagtacaagaaataccagacaaacaagacaaccggcaacaccgataagagagccttcgtcgagacctggcagtccttttaccggaagaagcttaaggaggtgtggaaacctgccgtgcggtctggcggatctggcggaggctcctccccagaagagcgtgaccttcgaggacgtggccgtgtacttcacccagaccgagtgggacggcctgagccccgcccagagggccctgtacagggacgtgatgctggagaactacggcaacgtggccagcctgggcttcagcctgctgaagcccgccgtgatcagccagctggagggcgccggcgagctggagggccccagccccctggccgccggcaccgagatcggcccccagggcctgtggggatctggctccggcagcggccccaagaaaaagagaaaagtctaagctgccttctgcggggcttgccttctggccatgcccttcttctctcccttgcacctgtacctcttggtctttgaataaagcctgagtaggaaggctagcaaaaaaaaaaaaaaaaaaaaaaaaaaaaaaaaaaaaaaaaaaaaaaaaaaaaaaaaaaaaaaaaaaaaaaaaaaaaaaaa

SEQ ID NO: 15340 - RNA, 9485 nt, synthetic construct
  source 1..9485: mol_type = other RNA
aggaaataagagagaaaagaagagtaagaagaaatataagagccaccatggcccctaagaagaagcgtaaagtgagccggatggaacgcctcgtctacgaggtgcggcagaagtgcagaaacatcgaggacatctgcatctcctgcggatctctgaacgtgaccctggagcacccactgttcatcggcggcatgtgccagaactgtaaaaactgttttctggagtgtgcctatcaatacgacgatgacggctaccagagctactgcaccatctgttgcggcggaagagaggtgctgatgtgtggaaataacaactgctgccggtgcttctgcgtggaatgcgtggacctgctggtgggccccggcgccgcccaggccgctattaaggaagatccttggaactgctacatgtgcggccacaagggcacatacggcctgctgagacggagagaggactggcctagcagactgcagatgttcttcgccaataaccacgaccaggagttcgacccccctaaggtgtaccctcccgtccccgccgagaagagaaagcccatccgggtcctgagcctgttcgatggcatcgccaccggtctgctggtgctgaaggacctgggcatccaggtggataggtacattgcctccgaggtgtgcgaggactccatcaccgtgggaatggtgcgtcatcagggcaagatcatgtacgtgggcgacgtgcggagcgtgacacagaagcatatccaggagtggggccctttcgacctggtgatcggcggcagcccttgcaatgacctgagcatcgtgaacccagcccggaagggcctgtacgagggaaccggcagactgttcttcgagttttacagactgctgcacgacgcccggcctaaggaaggcgacgaccggcccttcttttggctgttcgagaatgtggtggccatgggagtcagcgacaagcgggatattagccggttcctggagagcaaccccgtgatgatcgatgccaaggaagtgagcgccgcccaccgggccagatacttctggggcaatctgcctggcatgaacagacccctggccagcaccgtgaacgacaagctggagctgcaggagtgcctggagcacggccggatcgccaagttcagcaaggtgagaaccatcaccacccgaagcaacagcatcaaacaaggcaaggaccagcactttcctgtgttcatgaacgagaaggaggacatcctgtggtgtaccgagatggagagagtgttcgggttcccagtccactacacagatgtcagcaacatgtctagactggccagacagagactgctgggaagaagctggtccgtccctgtgatcagacacctgttcgcccctctgaaggagtacttcgcctgcgtgagcagcggcaacagcaacgccaacagccggggccccagcttctctagcggcctggtgccactgtccctgagagggagccacatgggccccatggagatctacaaaaccgtgagcgcctggaagcggcagcctgtgcgcgtgctgagcctgtttcggaatatcgataaagtcctgaaaagcctgggattcctggagagcggctctggctccggcggtggcaccctgaagtacgtggaggatgtgacaaacgtggtcagacgggatgtggagaagtggggccccttcgatctggtgtacggcagcacccaacccctgggcagctcttgtgaccggtgccctggctggtacatgtttcagttccaccggatcctgcagtacgccctgccgagacaggagtcccagcggccattcttttggattttcatggacaacttgctgctgaccgaggatgaccaggaaactaccactcggttcctgcagaccgaagccgtgaccctgcaggacgtgagaggccgggactaccagaacgccatgcgggtgtggtccaacatccctggactgaaaagcaagcacgcacctctgacccctaaagaagaggagtacctgcaggcccaggtgcggagcagaagcaagctggacgcccctaaggtggatctgctggtgaagaattgcctcctgcccctgagagagtacttcaagtatttcagccagaatagtctgcccctgggaggcagcggcggcggcgccctggtgacatttgaggacgtcgccgtgcggttcacccaggaggaatgggctctgctggatccttctcagaaaatcctgtaccgggacgtgatgagagagacataccggaatctgacctccgtgggcatcaactgggaatgttgggaccttgaagcctgcttcagaagcctgggaagaaacctgagagtgcaggtggtgaagagaaagtgcgagctgaccaacagcggcccctgcgccgagggcggcccaagcagcggcgcccctcctcccagcggcggcagcccagccggctccccaacctctaccgaggagggcacctctgagtccgccacccccgagagcggccctggcacctccaccgagcccagcgagggcagcgcacccggcagccctgccggcagccccacctccacagaggagggaaccagcaccgagcccagcgaaggcagcgccccaggcaccagcaccgagcctagtgagcaggagattaaacggatcaacaagatcagaagaagacttgtgaaagacagcaacaccaagaaggccggcaagacaggccccatgaaaaccctgctggttagagtgatgacacccgatctgagagagcggctggaaaacctgagaaagaagcctgaaaatatcccccagcccatcagcaatacatctagagccaacctgaataagctgctgaccgattacaccgaaatgaagaaggcgatcctgcatgtgtactgggaagagttccagaaggaccctgtgggcctgatgagccgggtggcccagcctgccagcaagaagatcgatcagaacaagctgaaacctgagatggacgagaagggcaacctgaccaccgccggctttgcctgctctcagtgtggccagcccctgttcgtgtacaagctggagcaggtgtctgagaagggcaaggcttacaccaactacttcggacggtgcaatgtggccgagcacgaaaagctgatcctgctggcccagctgaagcccgagaaggatagcgacgaagccgtgacatatagcctgggaaagtttgggcagagggccctggatttctacagcattcatgtgaccaaggagtccacccaccccgtgaagcccctggcccagatcgccggaaacagatacgcctccggacctgtgggaaaggccctgagcgacgcatgtatgggcacaatcgcctccttcctgtctaagtaccaggacatcatcatcgaacaccagaaggtggtgaagggcaaccagaagagactggagagcctgcgggagctggccggcaaggaaaacctggaataccctagcgtgaccctgccacctcagcctcacaccaaggagggcgttgatgcctacaacgaagtgatcgcccgggtgcgaatgtgggtgaacctgaacctgtggcagaagctgaagctaagcagagatgatgccaagcctctgctgagactgaagggattcccttcctttcctctggtcgagagacaggccaacgaagtggactggtgggacatggtgtgtaacgtgaagaagctgatcaacgagaaaaaggaggatggcaaggtgttttggcagaatctggctggctacaagagacaggaagccctgagaccatacctgagcagcgaggaagatcggaagaagggaaagaaattcgctcggtaccagctgggcgacctgctgctgcacctggaaaagaagcacggcgaggactggggaaaggtgtacgacgaggcctgggagcggattgacaagaaagtggaaggcctgagcaagcacatcaagctggaagaggaacggagaagcgaggacgcccagagcaaggccgccctgaccgactggctgcgggctaaggccagcttcgtgatcgagggcctgaaggaggccgacaaggacgagttctgcagatgcgagctgaagctgcagaagtggtacggggacctgcggggaaagcccttcgccatcgaagccgagaacagcatcctggacatcagcggcttcagcaagcagtacaactgtgccttcatctggcagaaggacggcgtgaagaagctgaacctgtacctgatcatcaactacttcaagggcggcaagctgcggttcaagaagatcaaacctgaagccttcgaagccaacagattctacaccgtgatcaacaaaaagagcggcgagatcgtgcccatggaggtgaacttcaacttcgacgaccccaacctgatcatcctgcctctggcctttggcaagagacagggcagagaattcatctggaacgacctgctgtccctggaaaccggcagcctgaagctggccaacggaagagtgatcgagaagacactgtacaacagaagaacccggcaggatgagcctgccctgttcgtggccctgaccttcgagcggcgggaggtcctggactcctccaatatcaaaccaatgaacctgatcggcgtggcaagaggcgaaaacatccccgccgtgatcgccctgaccgaccccgagggctgcccactgagccggtttaaggatagcctgggaaacccaacccacatcctgagaatcggcgagagctataaggagaagcagcggaccatccaggccaagaaggaggtggagcagcggagagccggcggctacagccggaagtacgccagcaaagccaagaatctggcagacgatatggtgagaaacaccgctagagatctgctgtactacgccgtgacccaggatgccatgctgatcttcgccaacctgagccggggcttcggccggcagggcaagcggaccttcatggccgagagacagtacacacggatggaggactggctgaccgccaagctggcctacgagggcctgagcaagacctacctgtccaagacactggcccagtacacctccaagacatgcagcaactgtgggtttaccatcaccagcgccgactacgacagggtgctggagaagctgaagaagacagcaacaggctggatgaccacaattaacggcaaggagctgaaggtggagggccagattacctactacaacagatacaagagacagaacgtagtcaaggacctgtccgtcgagctggatagactgagcgaagaatctgtgaacaacgacatctcctcctggacaaagggcagaagcggagaagctctgagcctcctgaagaaaagattctcccatagacccgtgcaggagaagttcgtgtgcctgaactgcggcttcgagacacacgcagccgagcaagccgccctgaacatcgccagatcctggctgttcctgcggagccaggagtacaagaaataccagacaaacaagacaaccggcaacaccgataagagagccttcgtcgagacctggcagtccttttaccggaagaagcttaaggaggtgtggaaacctgccgtgcggtctggcggatctggcggaggctccggcctgctgagcttcgaggacgtggccctgtacttcaccagggaggagtgggacaccctggactgggcccagaaggccctgtacagggacgtgatgctggacaactacaggcacatcgtgagcctgggcttccccttccccaagcccgaggtgatctgccagctggagcagtgggaggagccctggaccctggacctgcccagggccggcaccaggaaggccagcggcagcgcctgccccgacggcggcccaagcagcggcgcccctcctcccagcggcggcagcccagccggctccccaacctctaccgaggagggcacctctgagtccgccacccccgagagcggccctggcacctccaccgagcccagcgagggcagcgcacccggcagccctgccggcagccccacctccacagaggagggaaccagcaccgagcccagcgaaggcagcgccccaggcaccagcaccgagcctagtgagcaggagattaaacggatcaacaagatcagaagaagacttgtgaaagacagcaacaccaagaaggccggcaagacaggccccatgaaaaccctgctggttagagtgatgacacccgatctgagagagcggctggaaaacctgagaaagaagcctgaaaatatcccccagcccatcagcaatacatctagagccaacctgaataagctgctgaccgattacaccgaaatgaagaaggcgatcctgcatgtgtactgggaagagttccagaaggaccctgtgggcctgatgagccgggtggcccagcctgccagcaagaagatcgatcagaacaagctgaaacctgagatggacgagaagggcaacctgaccaccgccggctttgcctgctctcagtgtggccagcccctgttcgtgtacaagctggagcaggtgtctgagaagggcaaggcttacaccaactacttcggacggtgcaatgtggccgagcacgaaaagctgatcctgctggcccagctgaagcccgagaaggatagcgacgaagccgtgacatatagcctgggaaagtttgggcagagggccctggatttctacagcattcatgtgaccaaggagtccacccaccccgtgaagcccctggcccagatcgccggaaacagatacgcctccggacctgtgggaaaggccctgagcgacgcatgtatgggcacaatcgcctccttcctgtctaagtaccaggacatcatcatcgaacaccagaaggtggtgaagggcaaccagaagagactggagagcctgcgggagctggccggcaaggaaaacctggaataccctagcgtgaccctgccacctcagcctcacaccaaggagggcgttgatgcctacaacgaagtgatcgcccgggtgcgaatgtgggtgaacctgaacctgtggcagaagctgaagctaagcagagatgatgccaagcctctgctgagactgaagggattcccttcctttcctctggtcgagagacaggccaacgaagtggactggtgggacatggtgtgtaacgtgaagaagctgatcaacgagaaaaaggaggatggcaaggtgttttggcagaatctggctggctacaagagacaggaagccctgagaccatacctgagcagcgaggaagatcggaagaagggaaagaaattcgctcggtaccagctgggcgacctgctgctgcacctggaaaagaagcacggcgaggactggggaaaggtgtacgacgaggcctgggagcggattgacaagaaagtggaaggcctgagcaagcacatcaagctggaagaggaacggagaagcgaggacgcccagagcaaggccgccctgaccgactggctgcgggctaaggccagcttcgtgatcgagggcctgaaggaggccgacaaggacgagttctgcagatgcgagctgaagctgcagaagtggtacggggacctgcggggaaagcccttcgccatcgaagccgagaacagcatcctggacatcagcggcttcagcaagcagtacaactgtgccttcatctggcagaaggacggcgtgaagaagctgaacctgtacctgatcatcaactacttcaagggcggcaagctgcggttcaagaagatcaaacctgaagccttcgaagccaacagattctacaccgtgatcaacaaaaagagcggcgagatcgtgcccatggaggtgaacttcaacttcgacgaccccaacctgatcatcctgcctctggcctttggcaagagacagggcagagaattcatctggaacgacctgctgtccctggaaaccggcagcctgaagctggccaacggaagagtgatcgagaagacactgtacaacagaagaacccggcaggatgagcctgccctgttcgtggccctgaccttcgagcggcgggaggtcctggactcctccaatatcaaaccaatgaacctgatcggcgtggcaagaggcgaaaacatccccgccgtgatcgccctgaccgaccccgagggctgcccactgagccggtttaaggatagcctgggaaacccaacccacatcctgagaatcggcgagagctataaggagaagcagcggaccatccaggccaagaaggaggtggagcagcggagagccggcggctacagccggaagtacgccagcaaagccaagaatctggcagacgatatggtgagaaacaccgctagagatctgctgtactacgccgtgacccaggatgccatgctgatcttcgccaacctgagccggggcttcggccggcagggcaagcggaccttcatggccgagagacagtacacacggatggaggactggctgaccgccaagctggcctacgagggcctgagcaagacctacctgtccaagacactggcccagtacacctccaagacatgcagcaactgtgggtttaccatcaccagcgccgactacgacagggtgctggagaagctgaagaagacagcaacaggctggatgaccacaattaacggcaaggagctgaaggtggagggccagattacctactacaacagatacaagagacagaacgtagtcaaggacctgtccgtcgagctggatagactgagcgaagaatctgtgaacaacgacatctcctcctggacaaagggcagaagcggagaagctctgagcctcctgaagaaaagattctcccatagacccgtgcaggagaagttcgtgtgcctgaactgcggcttcgagacacacgcagccgagcaagccgccctgaacatcgccagatcctggctgttcctgcggagccaggagtacaagaaataccagacaaacaagacaaccggcaacaccgataagagagccttcgtcgagacctggcagtccttttaccggaagaagcttaaggaggtgtggaaacctgccgtgcggtctggcggatctggcggaggctcctggcctgctgagcttcgaggacgtggccctgtacttcaccagggaggagtgggacaccctggactgggcccagaaggccctgtacagggacgtgatgctggacaactacaggcacatcgtgagcctgggcttccccttccccaagcccgaggtgatctgccagctggagcagtgggaggagccctggaccctggacctgcccagggccggcaccaggaaggccagcggcagcgcctgccccgacggatctggctccggcagcggccccaagaaaaagagaaaagtctaagctgccttctgcggggcttgccttctggccatgcccttcttctctcccttgcacctgtacctcttggtctttgaataaagcctgagtaggaaggctagcaaaaaaaaaaaaaaaaaaaaaaaaaaaaaaaaaaaaaaaaaaaaaaaaaaaaaaaaaaaaaaaaaaaaaaaaaaaaaaaa

SEQ ID NO: 15341 - RNA, 9485 nt, synthetic construct
  source 1..9485: mol_type = other RNA
aggaaataagagagaaaagaagagtaagaagaaatataagagccaccatggcccctaagaagaagcgtaaagtgagccggatggaacgcctcgtctacgaggtgcggcagaagtgcagaaacatcgaggacatctgcatctcctgcggatctctgaacgtgaccctggagcacccactgttcatcggcggcatgtgccagaactgtaaaaactgttttctggagtgtgcctatcaatacgacgatgacggctaccagagctactgcaccatctgttgcggcggaagagaggtgctgatgtgtggaaataacaactgctgccggtgcttctgcgtggaatgcgtggacctgctggtgggccccggcgccgcccaggccgctattaaggaagatccttggaactgctacatgtgcggccacaagggcacatacggcctgctgagacggagagaggactggcctagcagactgcagatgttcttcgccaataaccacgaccaggagttcgacccccctaaggtgtaccctcccgtccccgccgagaagagaaagcccatccgggtcctgagcctgttcgatggcatcgccaccggtctgctggtgctgaaggacctgggcatccaggtggataggtacattgcctccgaggtgtgcgaggactccatcaccgtgggaatggtgcgtcatcagggcaagatcatgtacgtgggcgacgtgcggagcgtgacacagaagcatatccaggagtggggccctttcgacctggtgatcggcggcagcccttgcaatgacctgagcatcgtgaacccagcccggaagggcctgtacgagggaaccggcagactgttcttcgagttttacagactgctgcacgacgcccggcctaaggaaggcgacgaccggcccttcttttggctgttcgagaatgtggtggccatgggagtcagcgacaagcgggatattagccggttcctggagagcaaccccgtgatgatcgatgccaaggaagtgagcgccgcccaccgggccagatacttctggggcaatctgcctggcatgaacagacccctggccagcaccgtgaacgacaagctggagctgcaggagtgcctggagcacggccggatcgccaagttcagcaaggtgagaaccatcaccacccgaagcaacagcatcaaacaaggcaaggaccagcactttcctgtgttcatgaacgagaaggaggacatcctgtggtgtaccgagatggagagagtgttcgggttcccagtccactacacagatgtcagcaacatgtctagactggccagacagagactgctgggaagaagctggtccgtccctgtgatcagacacctgttcgcccctctgaaggagtacttcgcctgcgtgagcagcggcaacagcaacgccaacagccggggccccagcttctctagcggcctggtgccactgtccctgagagggagccacatgggccccatggagatctacaaaaccgtgagcgcctggaagcggcagcctgtgcgcgtgctgagcctgtttcggaatatcgataaagtcctgaaaagcctgggattcctggagagcggctctggctccggcggtggcaccctgaagtacgtggaggatgtgacaaacgtggtcagacgggatgtggagaagtggggccccttcgatctggtgtacggcagcacccaacccctgggcagctcttgtgaccggtgccctggctggtacatgtttcagttccaccggatcctgcagtacgccctgccgagacaggagtcccagcggccattcttttggattttcatggacaacttgctgctgaccgaggatgaccaggaaactaccactcggttcctgcagaccgaagccgtgaccctgcaggacgtgagaggccgggactaccagaacgccatgcgggtgtggtccaacatccctggactgaaaagcaagcacgcacctctgacccctaaagaagaggagtacctgcaggcccaggtgcggagcagaagcaagctggacgcccctaaggtggatctgctggtgaagaattgcctcctgcccctgagagagtacttcaagtatttcagccagaatagtctgcccctgggaggcagcggcggcggcgccctggtgacatttgaggacgtcgccgtgcggttcacccaggaggaatgggctctgctggatccttctcagaaaatcctgtaccgggacgtgatgagagagacataccggaatctgacctccgtgggcatcaactgggaatgttgggaccttgaagcctgcttcagaagcctgggaagaaacctgagagtgcaggtggtgaagagaaagtgcgagctgaccaacagcggcccctgcgccgagggcggcccaagcagcggcgcccctcctcccagcggcggcagcccagccggctccccaacctctaccgaggagggcacctctgagtccgccacccccgagagcggccctggcacctccaccgagcccagcgagggcagcgcacccggcagccctgccggcagccccacctccacagaggagggaaccagcaccgagcccagcgaaggcagcgccccaggcaccagcaccgagcctagtgagcaggagattaaacggatcaacaagatcagaagaagacttgtgaaagacagcaacaccaagaaggccggcaagacaggccccatgaaaaccctgctggttagagtgatgacacccgatctgagagagcggctggaaaacctgagaaagaagcctgaaaatatcccccagcccatcagcaatacatctagagccaacctgaataagctgctgaccgattacaccgaaatgaagaaggcgatcctgcatgtgtactgggaagagttccagaaggaccctgtgggcctgatgagccgggtggcccagcctgccagcaagaagatcgatcagaacaagctgaaacctgagatggacgagaagggcaacctgaccaccgccggctttgcctgctctcagtgtggccagcccctgttcgtgtacaagctggagcaggtgtctgagaagggcaaggcttacaccaactacttcggacggtgcaatgtggccgagcacgaaaagctgatcctgctggcccagctgaagcccgagaaggatagcgacgaagccgtgacatatagcctgggaaagtttgggcagagggccctggatttctacagcattcatgtgaccaaggagtccacccaccccgtgaagcccctggcccagatcgccggaaacagatacgcctccggacctgtgggaaaggccctgagcgacgcatgtatgggcacaatcgcctccttcctgtctaagtaccaggacatcatcatcgaacaccagaaggtggtgaagggcaaccagaagagactggagagcctgcgggagctggccggcaaggaaaacctggaataccctagcgtgaccctgccacctcagcctcacaccaaggagggcgttgatgcctacaacgaagtgatcgcccgggtgcgaatgtgggtgaacctgaacctgtggcagaagctgaagctaagcagagatgatgccaagcctctgctgagactgaagggattcccttcctttcctctggtcgagagacaggccaacgaagtggactggtgggacatggtgtgtaacgtgaagaagctgatcaacgagaaaaaggaggatggcaaggtgttttggcagaatctggctggctacaagagacaggaagccctgagaccatacctgagcagcgaggaagatcggaagaagggaaagaaattcgctcggtaccagctgggcgacctgctgctgcacctggaaaagaagcacggcgaggactggggaaaggtgtacgacgaggcctgggagcggattgacaagaaagtggaaggcctgagcaagcacatcaagctggaagaggaacggagaagcgaggacgcccagagcaaggccgccctgaccgactggctgcgggctaaggccagcttcgtgatcgagggcctgaaggaggccgacaaggacgagttctgcagatgcgagctgaagctgcagaagtggtacggggacctgcggggaaagcccttcgccatcgaagccgagaacagcatcctggacatcagcggcttcagcaagcagtacaactgtgccttcatctggcagaaggacggcgtgaagaagctgaacctgtacctgatcatcaactacttcaagggcggcaagctgcggttcaagaagatcaaacctgaagccttcgaagccaacagattctacaccgtgatcaacaaaaagagcggcgagatcgtgcccatggaggtgaacttcaacttcgacgaccccaacctgatcatcctgcctctggcctttggcaagagacagggcagagaattcatctggaacgacctgctgtccctggaaaccggcagcctgaagctggccaacggaagagtgatcgagaagacactgtacaacagaagaacccggcaggatgagcctgccctgttcgtggccctgaccttcgagcggcgggaggtcctggactcctccaatatcaaaccaatgaacctgatcggcgtggcaagaggcgaaaacatccccgccgtgatcgccctgaccgaccccgagggctgcccactgagccggtttaaggatagcctgggaaacccaacccacatcctgagaatcggcgagagctataaggagaagcagcggaccatccaggccaagaaggaggtggagcagcggagagccggcggctacagccggaagtacgccagcaaagccaagaatctggcagacgatatggtgagaaacaccgctagagatctgctgtactacgccgtgacccaggatgccatgctgatcttcgccaacctgagccggggcttcggccggcagggcaagcggaccttcatggccgagagacagtacacacggatggaggactggctgaccgccaagctggcctacgagggcctgagcaagacctacctgtccaagacactggcccagtacacctccaagacatgcagcaactgtgggtttaccatcaccagcgccgactacgacagggtgctggagaagctgaagaagacagcaacaggctggatgaccacaattaacggcaaggagctgaaggtggagggccagattacctactacaacagatacaagagacagaacgtagtcaaggacctgtccgtcgagctggatagactgagcgaagaatctgtgaacaacgacatctcctcctggacaaagggcagaagcggagaagctctgagcctcctgaagaaaagattctcccatagacccgtgcaggagaagttcgtgtgcctgaactgcggcttcgagacacacgcagccgagcaagccgccctgaacatcgccagatcctggctgttcctgcggagccaggagtacaagaaataccagacaaacaagacaaccggcaacaccgataagagagccttcgtcgagacctggcagtccttttaccggaagaagcttaaggaggtgtggaaacctgccgtgcggtctggcggatctggcggaggctccaagcccggcgccgtgagcttcgccgacgtggccgtgtacttcagccccgaggagtggggctgcctgaggcccgcccagagggccctgtacagggacgtgatgagggagacctacggccacctgggcgccctgggcttccccggccccaagcccgccctgatcagctggatggagcaggagagcgaggcctggagcagcgccgcccaggaccccgagaagggcgagagcctgggcggcgccaggggcggcccaagcagcggcgcccctcctcccagcggcggcagcccagccggctccccaacctctaccgaggagggcacctctgagtccgccacccccgagagcggccctggcacctccaccgagcccagcgagggcagcgcacccggcagccctgccggcagccccacctccacagaggagggaaccagcaccgagcccagcgaaggcagcgccccaggcaccagcaccgagcctagtgagcaggagattaaacggatcaacaagatcagaagaagacttgtgaaagacagcaacaccaagaaggccggcaagacaggccccatgaaaaccctgctggttagagtgatgacacccgatctgagagagcggctggaaaacctgagaaagaagcctgaaaatatcccccagcccatcagcaatacatctagagccaacctgaataagctgctgaccgattacaccgaaatgaagaaggcgatcctgcatgtgtactgggaagagttccagaaggaccctgtgggcctgatgagccgggtggcccagcctgccagcaagaagatcgatcagaacaagctgaaacctgagatggacgagaagggcaacctgaccaccgccggctttgcctgctctcagtgtggccagcccctgttcgtgtacaagctggagcaggtgtctgagaagggcaaggcttacaccaactacttcggacggtgcaatgtggccgagcacgaaaagctgatcctgctggcccagctgaagcccgagaaggatagcgacgaagccgtgacatatagcctgggaaagtttgggcagagggccctggatttctacagcattcatgtgaccaaggagtccacccaccccgtgaagcccctggcccagatcgccggaaacagatacgcctccggacctgtgggaaaggccctgagcgacgcatgtatgggcacaatcgcctccttcctgtctaagtaccaggacatcatcatcgaacaccagaaggtggtgaagggcaaccagaagagactggagagcctgcgggagctggccggcaaggaaaacctggaataccctagcgtgaccctgccacctcagcctcacaccaaggagggcgttgatgcctacaacgaagtgatcgcccgggtgcgaatgtgggtgaacctgaacctgtggcagaagctgaagctaagcagagatgatgccaagcctctgctgagactgaagggattcccttcctttcctctggtcgagagacaggccaacgaagtggactggtgggacatggtgtgtaacgtgaagaagctgatcaacgagaaaaaggaggatggcaaggtgttttggcagaatctggctggctacaagagacaggaagccctgagaccatacctgagcagcgaggaagatcggaagaagggaaagaaattcgctcggtaccagctgggcgacctgctgctgcacctggaaaagaagcacggcgaggactggggaaaggtgtacgacgaggcctgggagcggattgacaagaaagtggaaggcctgagcaagcacatcaagctggaagaggaacggagaagcgaggacgcccagagcaaggccgccctgaccgactggctgcgggctaaggccagcttcgtgatcgagggcctgaaggaggccgacaaggacgagttctgcagatgcgagctgaagctgcagaagtggtacggggacctgcggggaaagcccttcgccatcgaagccgagaacagcatcctggacatcagcggcttcagcaagcagtacaactgtgccttcatctggcagaaggacggcgtgaagaagctgaacctgtacctgatcatcaactacttcaagggcggcaagctgcggttcaagaagatcaaacctgaagccttcgaagccaacagattctacaccgtgatcaacaaaaagagcggcgagatcgtgcccatggaggtgaacttcaacttcgacgaccccaacctgatcatcctgcctctggcctttggcaagagacagggcagagaattcatctggaacgacctgctgtccctggaaaccggcagcctgaagctggccaacggaagagtgatcgagaagacactgtacaacagaagaacccggcaggatgagcctgccctgttcgtggccctgaccttcgagcggcgggaggtcctggactcctccaatatcaaaccaatgaacctgatcggcgtggcaagaggcgaaaacatccccgccgtgatcgccctgaccgaccccgagggctgcccactgagccggtttaaggatagcctgggaaacccaacccacatcctgagaatcggcgagagctataaggagaagcagcggaccatccaggccaagaaggaggtggagcagcggagagccggcggctacagccggaagtacgccagcaaagccaagaatctggcagacgatatggtgagaaacaccgctagagatctgctgtactacgccgtgacccaggatgccatgctgatcttcgccaacctgagccggggcttcggccggcagggcaagcggaccttcatggccgagagacagtacacacggatggaggactggctgaccgccaagctggcctacgagggcctgagcaagacctacctgtccaagacactggcccagtacacctccaagacatgcagcaactgtgggtttaccatcaccagcgccgactacgacagggtgctggagaagctgaagaagacagcaacaggctggatgaccacaattaacggcaaggagctgaaggtggagggccagattacctactacaacagatacaagagacagaacgtagtcaaggacctgtccgtcgagctggatagactgagcgaagaatctgtgaacaacgacatctcctcctggacaaagggcagaagcggagaagctctgagcctcctgaagaaaagattctcccatagacccgtgcaggagaagttcgtgtgcctgaactgcggcttcgagacacacgcagccgagcaagccgccctgaacatcgccagatcctggctgttcctgcggagccaggagtacaagaaataccagacaaacaagacaaccggcaacaccgataagagagccttcgtcgagacctggcagtccttttaccggaagaagcttaaggaggtgtggaaacctgccgtgcggtctggcggatctggcggaggctcctaagcccggcgccgtgagcttcgccgacgtggccgtgtacttcagccccgaggagtggggctgcctgaggcccgcccagagggccctgtacagggacgtgatgagggagacctacggccacctgggcgccctgggcttccccggccccaagcccgccctgatcagctggatggagcaggagagcgaggcctggagcagcgccgcccaggaccccgagaagggcgagagcctgggcggcgccaggggatctggctccggcagcggccccaagaaaaagagaaaagtctaagctgccttctgcggggcttgccttctggccatgcccttcttctctcccttgcacctgtacctcttggtctttgaataaagcctgagtaggaaggctagcaaaaaaaaaaaaaaaaaaaaaaaaaaaaaaaaaaaaaaaaaaaaaaaaaaaaaaaaaaaaaaaaaaaaaaaaaaaaaaaa

SEQ ID NO: 15342 - RNA, 9485 nt, synthetic construct
  source 1..9485: mol_type = other RNA
aggaaataagagagaaaagaagagtaagaagaaatataagagccaccatggcccctaagaagaagcgtaaagtgagccggatggaacgcctcgtctacgaggtgcggcagaagtgcagaaacatcgaggacatctgcatctcctgcggatctctgaacgtgaccctggagcacccactgttcatcggcggcatgtgccagaactgtaaaaactgttttctggagtgtgcctatcaatacgacgatgacggctaccagagctactgcaccatctgttgcggcggaagagaggtgctgatgtgtggaaataacaactgctgccggtgcttctgcgtggaatgcgtggacctgctggtgggccccggcgccgcccaggccgctattaaggaagatccttggaactgctacatgtgcggccacaagggcacatacggcctgctgagacggagagaggactggcctagcagactgcagatgttcttcgccaataaccacgaccaggagttcgacccccctaaggtgtaccctcccgtccccgccgagaagagaaagcccatccgggtcctgagcctgttcgatggcatcgccaccggtctgctggtgctgaaggacctgggcatccaggtggataggtacattgcctccgaggtgtgcgaggactccatcaccgtgggaatggtgcgtcatcagggcaagatcatgtacgtgggcgacgtgcggagcgtgacacagaagcatatccaggagtggggccctttcgacctggtgatcggcggcagcccttgcaatgacctgagcatcgtgaacccagcccggaagggcctgtacgagggaaccggcagactgttcttcgagttttacagactgctgcacgacgcccggcctaaggaaggcgacgaccggcccttcttttggctgttcgagaatgtggtggccatgggagtcagcgacaagcgggatattagccggttcctggagagcaaccccgtgatgatcgatgccaaggaagtgagcgccgcccaccgggccagatacttctggggcaatctgcctggcatgaacagacccctggccagcaccgtgaacgacaagctggagctgcaggagtgcctggagcacggccggatcgccaagttcagcaaggtgagaaccatcaccacccgaagcaacagcatcaaacaaggcaaggaccagcactttcctgtgttcatgaacgagaaggaggacatcctgtggtgtaccgagatggagagagtgttcgggttcccagtccactacacagatgtcagcaacatgtctagactggccagacagagactgctgggaagaagctggtccgtccctgtgatcagacacctgttcgcccctctgaaggagtacttcgcctgcgtgagcagcggcaacagcaacgccaacagccggggccccagcttctctagcggcctggtgccactgtccctgagagggagccacatgggccccatggagatctacaaaaccgtgagcgcctggaagcggcagcctgtgcgcgtgctgagcctgtttcggaatatcgataaagtcctgaaaagcctgggattcctggagagcggctctggctccggcggtggcaccctgaagtacgtggaggatgtgacaaacgtggtcagacgggatgtggagaagtggggccccttcgatctggtgtacggcagcacccaacccctgggcagctcttgtgaccggtgccctggctggtacatgtttcagttccaccggatcctgcagtacgccctgccgagacaggagtcccagcggccattcttttggattttcatggacaacttgctgctgaccgaggatgaccaggaaactaccactcggttcctgcagaccgaagccgtgaccctgcaggacgtgagaggccgggactaccagaacgccatgcgggtgtggtccaacatccctggactgaaaagcaagcacgcacctctgacccctaaagaagaggagtacctgcaggcccaggtgcggagcagaagcaagctggacgcccctaaggtggatctgctggtgaagaattgcctcctgcccctgagagagtacttcaagtatttcagccagaatagtctgcccctgggaggcagcggcggcggcgccctggtgacatttgaggacgtcgccgtgcggttcacccaggaggaatgggctctgctggatccttctcagaaaatcctgtaccgggacgtgatgagagagacataccggaatctgacctccgtgggcatcaactgggaatgttgggaccttgaagcctgcttcagaagcctgggaagaaacctgagagtgcaggtggtgaagagaaagtgcgagctgaccaacagcggcccctgcgccgagggcggcccaagcagcggcgcccctcctcccagcggcggcagcccagccggctccccaacctctaccgaggagggcacctctgagtccgccacccccgagagcggccctggcacctccaccgagcccagcgagggcagcgcacccggcagccctgccggcagccccacctccacagaggagggaaccagcaccgagcccagcgaaggcagcgccccaggcaccagcaccgagcctagtgagcaggagattaaacggatcaacaagatcagaagaagacttgtgaaagacagcaacaccaagaaggccggcaagacaggccccatgaaaaccctgctggttagagtgatgacacccgatctgagagagcggctggaaaacctgagaaagaagcctgaaaatatcccccagcccatcagcaatacatctagagccaacctgaataagctgctgaccgattacaccgaaatgaagaaggcgatcctgcatgtgtactgggaagagttccagaaggaccctgtgggcctgatgagccgggtggcccagcctgccagcaagaagatcgatcagaacaagctgaaacctgagatggacgagaagggcaacctgaccaccgccggctttgcctgctctcagtgtggccagcccctgttcgtgtacaagctggagcaggtgtctgagaagggcaaggcttacaccaactacttcggacggtgcaatgtggccgagcacgaaaagctgatcctgctggcccagctgaagcccgagaaggatagcgacgaagccgtgacatatagcctgggaaagtttgggcagagggccctggatttctacagcattcatgtgaccaaggagtccacccaccccgtgaagcccctggcccagatcgccggaaacagatacgcctccggacctgtgggaaaggccctgagcgacgcatgtatgggcacaatcgcctccttcctgtctaagtaccaggacatcatcatcgaacaccagaaggtggtgaagggcaaccagaagagactggagagcctgcgggagctggccggcaaggaaaacctggaataccctagcgtgaccctgccacctcagcctcacaccaaggagggcgttgatgcctacaacgaagtgatcgcccgggtgcgaatgtgggtgaacctgaacctgtggcagaagctgaagctaagcagagatgatgccaagcctctgctgagactgaagggattcccttcctttcctctggtcgagagacaggccaacgaagtggactggtgggacatggtgtgtaacgtgaagaagctgatcaacgagaaaaaggaggatggcaaggtgttttggcagaatctggctggctacaagagacaggaagccctgagaccatacctgagcagcgaggaagatcggaagaagggaaagaaattcgctcggtaccagctgggcgacctgctgctgcacctggaaaagaagcacggcgaggactggggaaaggtgtacgacgaggcctgggagcggattgacaagaaagtggaaggcctgagcaagcacatcaagctggaagaggaacggagaagcgaggacgcccagagcaaggccgccctgaccgactggctgcgggctaaggccagcttcgtgatcgagggcctgaaggaggccgacaaggacgagttctgcagatgcgagctgaagctgcagaagtggtacggggacctgcggggaaagcccttcgccatcgaagccgagaacagcatcctggacatcagcggcttcagcaagcagtacaactgtgccttcatctggcagaaggacggcgtgaagaagctgaacctgtacctgatcatcaactacttcaagggcggcaagctgcggttcaagaagatcaaacctgaagccttcgaagccaacagattctacaccgtgatcaacaaaaagagcggcgagatcgtgcccatggaggtgaacttcaacttcgacgaccccaacctgatcatcctgcctctggcctttggcaagagacagggcagagaattcatctggaacgacctgctgtccctggaaaccggcagcctgaagctggccaacggaagagtgatcgagaagacactgtacaacagaagaacccggcaggatgagcctgccctgttcgtggccctgaccttcgagcggcgggaggtcctggactcctccaatatcaaaccaatgaacctgatcggcgtggcaagaggcgaaaacatccccgccgtgatcgccctgaccgaccccgagggctgcccactgagccggtttaaggatagcctgggaaacccaacccacatcctgagaatcggcgagagctataaggagaagcagcggaccatccaggccaagaaggaggtggagcagcggagagccggcggctacagccggaagtacgccagcaaagccaagaatctggcagacgatatggtgagaaacaccgctagagatctgctgtactacgccgtgacccaggatgccatgctgatcttcgccaacctgagccggggcttcggccggcagggcaagcggaccttcatggccgagagacagtacacacggatggaggactggctgaccgccaagctggcctacgagggcctgagcaagacctacctgtccaagacactggcccagtacacctccaagacatgcagcaactgtgggtttaccatcaccagcgccgactacgacagggtgctggagaagctgaagaagacagcaacaggctggatgaccacaattaacggcaaggagctgaaggtggagggccagattacctactacaacagatacaagagacagaacgtagtcaaggacctgtccgtcgagctggatagactgagcgaagaatctgtgaacaacgacatctcctcctggacaaagggcagaagcggagaagctctgagcctcctgaagaaaagattctcccatagacccgtgcaggagaagttcgtgtgcctgaactgcggcttcgagacacacgcagccgagcaagccgccctgaacatcgccagatcctggctgttcctgcggagccaggagtacaagaaataccagacaaacaagacaaccggcaacaccgataagagagccttcgtcgagacctggcagtccttttaccggaagaagcttaaggaggtgtggaaacctgccgtgcggtctggcggatctggcggaggctccaagcccggcgccgtgagcttcgccgacgtggccgtgtacttcagccccgaggagtggggctgcctgaggcccgcccagagggccctgtacagggacgtgatgagggagacctacggccacctgggcgccctgggcttccccggccccaagcccgccctgatcagctggatggagcaggagagcgaggagagcgaggcctggagccccgccgccaaggaccccgaggagggcgagagcctgggcggcggcccaagcagcggcgcccctcctcccagcggcggcagcccagccggctccccaacctctaccgaggagggcacctctgagtccgccacccccgagagcggccctggcacctccaccgagcccagcgagggcagcgcacccggcagccctgccggcagccccacctccacagaggagggaaccagcaccgagcccagcgaaggcagcgccccaggcaccagcaccgagcctagtgagcaggagattaaacggatcaacaagatcagaagaagacttgtgaaagacagcaacaccaagaaggccggcaagacaggccccatgaaaaccctgctggttagagtgatgacacccgatctgagagagcggctggaaaacctgagaaagaagcctgaaaatatcccccagcccatcagcaatacatctagagccaacctgaataagctgctgaccgattacaccgaaatgaagaaggcgatcctgcatgtgtactgggaagagttccagaaggaccctgtgggcctgatgagccgggtggcccagcctgccagcaagaagatcgatcagaacaagctgaaacctgagatggacgagaagggcaacctgaccaccgccggctttgcctgctctcagtgtggccagcccctgttcgtgtacaagctggagcaggtgtctgagaagggcaaggcttacaccaactacttcggacggtgcaatgtggccgagcacgaaaagctgatcctgctggcccagctgaagcccgagaaggatagcgacgaagccgtgacatatagcctgggaaagtttgggcagagggccctggatttctacagcattcatgtgaccaaggagtccacccaccccgtgaagcccctggcccagatcgccggaaacagatacgcctccggacctgtgggaaaggccctgagcgacgcatgtatgggcacaatcgcctccttcctgtctaagtaccaggacatcatcatcgaacaccagaaggtggtgaagggcaaccagaagagactggagagcctgcgggagctggccggcaaggaaaacctggaataccctagcgtgaccctgccacctcagcctcacaccaaggagggcgttgatgcctacaacgaagtgatcgcccgggtgcgaatgtgggtgaacctgaacctgtggcagaagctgaagctaagcagagatgatgccaagcctctgctgagactgaagggattcccttcctttcctctggtcgagagacaggccaacgaagtggactggtgggacatggtgtgtaacgtgaagaagctgatcaacgagaaaaaggaggatggcaaggtgttttggcagaatctggctggctacaagagacaggaagccctgagaccatacctgagcagcgaggaagatcggaagaagggaaagaaattcgctcggtaccagctgggcgacctgctgctgcacctggaaaagaagcacggcgaggactggggaaaggtgtacgacgaggcctgggagcggattgacaagaaagtggaaggcctgagcaagcacatcaagctggaagaggaacggagaagcgaggacgcccagagcaaggccgccctgaccgactggctgcgggctaaggccagcttcgtgatcgagggcctgaaggaggccgacaaggacgagttctgcagatgcgagctgaagctgcagaagtggtacggggacctgcggggaaagcccttcgccatcgaagccgagaacagcatcctggacatcagcggcttcagcaagcagtacaactgtgccttcatctggcagaaggacggcgtgaagaagctgaacctgtacctgatcatcaactacttcaagggcggcaagctgcggttcaagaagatcaaacctgaagccttcgaagccaacagattctacaccgtgatcaacaaaaagagcggcgagatcgtgcccatggaggtgaacttcaacttcgacgaccccaacctgatcatcctgcctctggcctttggcaagagacagggcagagaattcatctggaacgacctgctgtccctggaaaccggcagcctgaagctggccaacggaagagtgatcgagaagacactgtacaacagaagaacccggcaggatgagcctgccctgttcgtggccctgaccttcgagcggcgggaggtcctggactcctccaatatcaaaccaatgaacctgatcggcgtggcaagaggcgaaaacatccccgccgtgatcgccctgaccgaccccgagggctgcccactgagccggtttaaggatagcctgggaaacccaacccacatcctgagaatcggcgagagctataaggagaagcagcggaccatccaggccaagaaggaggtggagcagcggagagccggcggctacagccggaagtacgccagcaaagccaagaatctggcagacgatatggtgagaaacaccgctagagatctgctgtactacgccgtgacccaggatgccatgctgatcttcgccaacctgagccggggcttcggccggcagggcaagcggaccttcatggccgagagacagtacacacggatggaggactggctgaccgccaagctggcctacgagggcctgagcaagacctacctgtccaagacactggcccagtacacctccaagacatgcagcaactgtgggtttaccatcaccagcgccgactacgacagggtgctggagaagctgaagaagacagcaacaggctggatgaccacaattaacggcaaggagctgaaggtggagggccagattacctactacaacagatacaagagacagaacgtagtcaaggacctgtccgtcgagctggatagactgagcgaagaatctgtgaacaacgacatctcctcctggacaaagggcagaagcggagaagctctgagcctcctgaagaaaagattctcccatagacccgtgcaggagaagttcgtgtgcctgaactgcggcttcgagacacacgcagccgagcaagccgccctgaacatcgccagatcctggctgttcctgcggagccaggagtacaagaaataccagacaaacaagacaaccggcaacaccgataagagagccttcgtcgagacctggcagtccttttaccggaagaagcttaaggaggtgtggaaacctgccgtgcggtctggcggatctggcggaggctcctaagcccggcgccgtgagcttcgccgacgtggccgtgtacttcagccccgaggagtggggctgcctgaggcccgcccagagggccctgtacagggacgtgatgagggagacctacggccacctgggcgccctgggcttccccggccccaagcccgccctgatcagctggatggagcaggagagcgaggagagcgaggcctggagccccgccgccaaggaccccgaggagggcgagagcctgggcggatctggctccggcagcggccccaagaaaaagagaaaagtctaagctgccttctgcggggcttgccttctggccatgcccttcttctctcccttgcacctgtacctcttggtctttgaataaagcctgagtaggaaggctagcaaaaaaaaaaaaaaaaaaaaaaaaaaaaaaaaaaaaaaaaaaaaaaaaaaaaaaaaaaaaaaaaaaaaaaaaaaaaaaaa

SEQ ID NO: 15343 - RNA, 9485 nt, synthetic construct
  source 1..9485: mol_type = other RNA
aggaaataagagagaaaagaagagtaagaagaaatataagagccaccatggcccctaagaagaagcgtaaagtgagccggatggaacgcctcgtctacgaggtgcggcagaagtgcagaaacatcgaggacatctgcatctcctgcggatctctgaacgtgaccctggagcacccactgttcatcggcggcatgtgccagaactgtaaaaactgttttctggagtgtgcctatcaatacgacgatgacggctaccagagctactgcaccatctgttgcggcggaagagaggtgctgatgtgtggaaataacaactgctgccggtgcttctgcgtggaatgcgtggacctgctggtgggccccggcgccgcccaggccgctattaaggaagatccttggaactgctacatgtgcggccacaagggcacatacggcctgctgagacggagagaggactggcctagcagactgcagatgttcttcgccaataaccacgaccaggagttcgacccccctaaggtgtaccctcccgtccccgccgagaagagaaagcccatccgggtcctgagcctgttcgatggcatcgccaccggtctgctggtgctgaaggacctgggcatccaggtggataggtacattgcctccgaggtgtgcgaggactccatcaccgtgggaatggtgcgtcatcagggcaagatcatgtacgtgggcgacgtgcggagcgtgacacagaagcatatccaggagtggggccctttcgacctggtgatcggcggcagcccttgcaatgacctgagcatcgtgaacccagcccggaagggcctgtacgagggaaccggcagactgttcttcgagttttacagactgctgcacgacgcccggcctaaggaaggcgacgaccggcccttcttttggctgttcgagaatgtggtggccatgggagtcagcgacaagcgggatattagccggttcctggagagcaaccccgtgatgatcgatgccaaggaagtgagcgccgcccaccgggccagatacttctggggcaatctgcctggcatgaacagacccctggccagcaccgtgaacgacaagctggagctgcaggagtgcctggagcacggccggatcgccaagttcagcaaggtgagaaccatcaccacccgaagcaacagcatcaaacaaggcaaggaccagcactttcctgtgttcatgaacgagaaggaggacatcctgtggtgtaccgagatggagagagtgttcgggttcccagtccactacacagatgtcagcaacatgtctagactggccagacagagactgctgggaagaagctggtccgtccctgtgatcagacacctgttcgcccctctgaaggagtacttcgcctgcgtgagcagcggcaacagcaacgccaacagccggggccccagcttctctagcggcctggtgccactgtccctgagagggagccacatgggccccatggagatctacaaaaccgtgagcgcctggaagcggcagcctgtgcgcgtgctgagcctgtttcggaatatcgataaagtcctgaaaagcctgggattcctggagagcggctctggctccggcggtggcaccctgaagtacgtggaggatgtgacaaacgtggtcagacgggatgtggagaagtggggccccttcgatctggtgtacggcagcacccaacccctgggcagctcttgtgaccggtgccctggctggtacatgtttcagttccaccggatcctgcagtacgccctgccgagacaggagtcccagcggccattcttttggattttcatggacaacttgctgctgaccgaggatgaccaggaaactaccactcggttcctgcagaccgaagccgtgaccctgcaggacgtgagaggccgggactaccagaacgccatgcgggtgtggtccaacatccctggactgaaaagcaagcacgcacctctgacccctaaagaagaggagtacctgcaggcccaggtgcggagcagaagcaagctggacgcccctaaggtggatctgctggtgaagaattgcctcctgcccctgagagagtacttcaagtatttcagccagaatagtctgcccctgggaggcagcggcggcggcgccctggtgacatttgaggacgtcgccgtgcggttcacccaggaggaatgggctctgctggatccttctcagaaaatcctgtaccgggacgtgatgagagagacataccggaatctgacctccgtgggcatcaactgggaatgttgggaccttgaagcctgcttcagaagcctgggaagaaacctgagagtgcaggtggtgaagagaaagtgcgagctgaccaacagcggcccctgcgccgagggcggcccaagcagcggcgcccctcctcccagcggcggcagcccagccggctccccaacctctaccgaggagggcacctctgagtccgccacccccgagagcggccctggcacctccaccgagcccagcgagggcagcgcacccggcagccctgccggcagccccacctccacagaggagggaaccagcaccgagcccagcgaaggcagcgccccaggcaccagcaccgagcctagtgagcaggagattaaacggatcaacaagatcagaagaagacttgtgaaagacagcaacaccaagaaggccggcaagacaggccccatgaaaaccctgctggttagagtgatgacacccgatctgagagagcggctggaaaacctgagaaagaagcctgaaaatatcccccagcccatcagcaatacatctagagccaacctgaataagctgctgaccgattacaccgaaatgaagaaggcgatcctgcatgtgtactgggaagagttccagaaggaccctgtgggcctgatgagccgggtggcccagcctgccagcaagaagatcgatcagaacaagctgaaacctgagatggacgagaagggcaacctgaccaccgccggctttgcctgctctcagtgtggccagcccctgttcgtgtacaagctggagcaggtgtctgagaagggcaaggcttacaccaactacttcggacggtgcaatgtggccgagcacgaaaagctgatcctgctggcccagctgaagcccgagaaggatagcgacgaagccgtgacatatagcctgggaaagtttgggcagagggccctggatttctacagcattcatgtgaccaaggagtccacccaccccgtgaagcccctggcccagatcgccggaaacagatacgcctccggacctgtgggaaaggccctgagcgacgcatgtatgggcacaatcgcctccttcctgtctaagtaccaggacatcatcatcgaacaccagaaggtggtgaagggcaaccagaagagactggagagcctgcgggagctggccggcaaggaaaacctggaataccctagcgtgaccctgccacctcagcctcacaccaaggagggcgttgatgcctacaacgaagtgatcgcccgggtgcgaatgtgggtgaacctgaacctgtggcagaagctgaagctaagcagagatgatgccaagcctctgctgagactgaagggattcccttcctttcctctggtcgagagacaggccaacgaagtggactggtgggacatggtgtgtaacgtgaagaagctgatcaacgagaaaaaggaggatggcaaggtgttttggcagaatctggctggctacaagagacaggaagccctgagaccatacctgagcagcgaggaagatcggaagaagggaaagaaattcgctcggtaccagctgggcgacctgctgctgcacctggaaaagaagcacggcgaggactggggaaaggtgtacgacgaggcctgggagcggattgacaagaaagtggaaggcctgagcaagcacatcaagctggaagaggaacggagaagcgaggacgcccagagcaaggccgccctgaccgactggctgcgggctaaggccagcttcgtgatcgagggcctgaaggaggccgacaaggacgagttctgcagatgcgagctgaagctgcagaagtggtacggggacctgcggggaaagcccttcgccatcgaagccgagaacagcatcctggacatcagcggcttcagcaagcagtacaactgtgccttcatctggcagaaggacggcgtgaagaagctgaacctgtacctgatcatcaactacttcaagggcggcaagctgcggttcaagaagatcaaacctgaagccttcgaagccaacagattctacaccgtgatcaacaaaaagagcggcgagatcgtgcccatggaggtgaacttcaacttcgacgaccccaacctgatcatcctgcctctggcctttggcaagagacagggcagagaattcatctggaacgacctgctgtccctggaaaccggcagcctgaagctggccaacggaagagtgatcgagaagacactgtacaacagaagaacccggcaggatgagcctgccctgttcgtggccctgaccttcgagcggcgggaggtcctggactcctccaatatcaaaccaatgaacctgatcggcgtggcaagaggcgaaaacatccccgccgtgatcgccctgaccgaccccgagggctgcccactgagccggtttaaggatagcctgggaaacccaacccacatcctgagaatcggcgagagctataaggagaagcagcggaccatccaggccaagaaggaggtggagcagcggagagccggcggctacagccggaagtacgccagcaaagccaagaatctggcagacgatatggtgagaaacaccgctagagatctgctgtactacgccgtgacccaggatgccatgctgatcttcgccaacctgagccggggcttcggccggcagggcaagcggaccttcatggccgagagacagtacacacggatggaggactggctgaccgccaagctggcctacgagggcctgagcaagacctacctgtccaagacactggcccagtacacctccaagacatgcagcaactgtgggtttaccatcaccagcgccgactacgacagggtgctggagaagctgaagaagacagcaacaggctggatgaccacaattaacggcaaggagctgaaggtggagggccagattacctactacaacagatacaagagacagaacgtagtcaaggacctgtccgtcgagctggatagactgagcgaagaatctgtgaacaacgacatctcctcctggacaaagggcagaagcggagaagctctgagcctcctgaagaaaagattctcccatagacccgtgcaggagaagttcgtgtgcctgaactgcggcttcgagacacacgcagccgagcaagccgccctgaacatcgccagatcctggctgttcctgcggagccaggagtacaagaaataccagacaaacaagacaaccggcaacaccgataagagagccttcgtcgagacctggcagtccttttaccggaagaagcttaaggaggtgtggaaacctgccgtgcggtctggcggatctggcggaggctccagccagagccccctgaccttcggcgacgtggccgtggagttcagcggcgacgagtgggcctggctggacagcgcccagaggagcctgcacaggagcgtgatgctggagaactacaggaacctggccagcctgggcctgtgcatgagcaagcccgagatgatcagcagcctggagcagagcaaggagccctgggccgtgaaggccaagagcaccaggggcaggtgccccggcctggaggccatcggcggcccaagcagcggcgcccctcctcccagcggcggcagcccagccggctccccaacctctaccgaggagggcacctctgagtccgccacccccgagagcggccctggcacctccaccgagcccagcgagggcagcgcacccggcagccctgccggcagccccacctccacagaggagggaaccagcaccgagcccagcgaaggcagcgccccaggcaccagcaccgagcctagtgagcaggagattaaacggatcaacaagatcagaagaagacttgtgaaagacagcaacaccaagaaggccggcaagacaggccccatgaaaaccctgctggttagagtgatgacacccgatctgagagagcggctggaaaacctgagaaagaagcctgaaaatatcccccagcccatcagcaatacatctagagccaacctgaataagctgctgaccgattacaccgaaatgaagaaggcgatcctgcatgtgtactgggaagagttccagaaggaccctgtgggcctgatgagccgggtggcccagcctgccagcaagaagatcgatcagaacaagctgaaacctgagatggacgagaagggcaacctgaccaccgccggctttgcctgctctcagtgtggccagcccctgttcgtgtacaagctggagcaggtgtctgagaagggcaaggcttacaccaactacttcggacggtgcaatgtggccgagcacgaaaagctgatcctgctggcccagctgaagcccgagaaggatagcgacgaagccgtgacatatagcctgggaaagtttgggcagagggccctggatttctacagcattcatgtgaccaaggagtccacccaccccgtgaagcccctggcccagatcgccggaaacagatacgcctccggacctgtgggaaaggccctgagcgacgcatgtatgggcacaatcgcctccttcctgtctaagtaccaggacatcatcatcgaacaccagaaggtggtgaagggcaaccagaagagactggagagcctgcgggagctggccggcaaggaaaacctggaataccctagcgtgaccctgccacctcagcctcacaccaaggagggcgttgatgcctacaacgaagtgatcgcccgggtgcgaatgtgggtgaacctgaacctgtggcagaagctgaagctaagcagagatgatgccaagcctctgctgagactgaagggattcccttcctttcctctggtcgagagacaggccaacgaagtggactggtgggacatggtgtgtaacgtgaagaagctgatcaacgagaaaaaggaggatggcaaggtgttttggcagaatctggctggctacaagagacaggaagccctgagaccatacctgagcagcgaggaagatcggaagaagggaaagaaattcgctcggtaccagctgggcgacctgctgctgcacctggaaaagaagcacggcgaggactggggaaaggtgtacgacgaggcctgggagcggattgacaagaaagtggaaggcctgagcaagcacatcaagctggaagaggaacggagaagcgaggacgcccagagcaaggccgccctgaccgactggctgcgggctaaggccagcttcgtgatcgagggcctgaaggaggccgacaaggacgagttctgcagatgcgagctgaagctgcagaagtggtacggggacctgcggggaaagcccttcgccatcgaagccgagaacagcatcctggacatcagcggcttcagcaagcagtacaactgtgccttcatctggcagaaggacggcgtgaagaagctgaacctgtacctgatcatcaactacttcaagggcggcaagctgcggttcaagaagatcaaacctgaagccttcgaagccaacagattctacaccgtgatcaacaaaaagagcggcgagatcgtgcccatggaggtgaacttcaacttcgacgaccccaacctgatcatcctgcctctggcctttggcaagagacagggcagagaattcatctggaacgacctgctgtccctggaaaccggcagcctgaagctggccaacggaagagtgatcgagaagacactgtacaacagaagaacccggcaggatgagcctgccctgttcgtggccctgaccttcgagcggcgggaggtcctggactcctccaatatcaaaccaatgaacctgatcggcgtggcaagaggcgaaaacatccccgccgtgatcgccctgaccgaccccgagggctgcccactgagccggtttaaggatagcctgggaaacccaacccacatcctgagaatcggcgagagctataaggagaagcagcggaccatccaggccaagaaggaggtggagcagcggagagccggcggctacagccggaagtacgccagcaaagccaagaatctggcagacgatatggtgagaaacaccgctagagatctgctgtactacgccgtgacccaggatgccatgctgatcttcgccaacctgagccggggcttcggccggcagggcaagcggaccttcatggccgagagacagtacacacggatggaggactggctgaccgccaagctggcctacgagggcctgagcaagacctacctgtccaagacactggcccagtacacctccaagacatgcagcaactgtgggtttaccatcaccagcgccgactacgacagggtgctggagaagctgaagaagacagcaacaggctggatgaccacaattaacggcaaggagctgaaggtggagggccagattacctactacaacagatacaagagacagaacgtagtcaaggacctgtccgtcgagctggatagactgagcgaagaatctgtgaacaacgacatctcctcctggacaaagggcagaagcggagaagctctgagcctcctgaagaaaagattctcccatagacccgtgcaggagaagttcgtgtgcctgaactgcggcttcgagacacacgcagccgagcaagccgccctgaacatcgccagatcctggctgttcctgcggagccaggagtacaagaaataccagacaaacaagacaaccggcaacaccgataagagagccttcgtcgagacctggcagtccttttaccggaagaagcttaaggaggtgtggaaacctgccgtgcggtctggcggatctggcggaggctcctagccagagccccctgaccttcggcgacgtggccgtggagttcagcggcgacgagtgggcctggctggacagcgcccagaggagcctgcacaggagcgtgatgctggagaactacaggaacctggccagcctgggcctgtgcatgagcaagcccgagatgatcagcagcctggagcagagcaaggagccctgggccgtgaaggccaagagcaccaggggcaggtgccccggcctggaggccatcggatctggctccggcagcggccccaagaaaaagagaaaagtctaagctgccttctgcggggcttgccttctggccatgcccttcttctctcccttgcacctgtacctcttggtctttgaataaagcctgagtaggaaggctagcaaaaaaaaaaaaaaaaaaaaaaaaaaaaaaaaaaaaaaaaaaaaaaaaaaaaaaaaaaaaaaaaaaaaaaaaaaaaaaaa

SEQ ID NO: 15344 - RNA, 9485 nt, synthetic construct
  source 1..9485: mol_type = other RNA
aggaaataagagagaaaagaagagtaagaagaaatataagagccaccatggcccctaagaagaagcgtaaagtgagccggatggaacgcctcgtctacgaggtgcggcagaagtgcagaaacatcgaggacatctgcatctcctgcggatctctgaacgtgaccctggagcacccactgttcatcggcggcatgtgccagaactgtaaaaactgttttctggagtgtgcctatcaatacgacgatgacggctaccagagctactgcaccatctgttgcggcggaagagaggtgctgatgtgtggaaataacaactgctgccggtgcttctgcgtggaatgcgtggacctgctggtgggccccggcgccgcccaggccgctattaaggaagatccttggaactgctacatgtgcggccacaagggcacatacggcctgctgagacggagagaggactggcctagcagactgcagatgttcttcgccaataaccacgaccaggagttcgacccccctaaggtgtaccctcccgtccccgccgagaagagaaagcccatccgggtcctgagcctgttcgatggcatcgccaccggtctgctggtgctgaaggacctgggcatccaggtggataggtacattgcctccgaggtgtgcgaggactccatcaccgtgggaatggtgcgtcatcagggcaagatcatgtacgtgggcgacgtgcggagcgtgacacagaagcatatccaggagtggggccctttcgacctggtgatcggcggcagcccttgcaatgacctgagcatcgtgaacccagcccggaagggcctgtacgagggaaccggcagactgttcttcgagttttacagactgctgcacgacgcccggcctaaggaaggcgacgaccggcccttcttttggctgttcgagaatgtggtggccatgggagtcagcgacaagcgggatattagccggttcctggagagcaaccccgtgatgatcgatgccaaggaagtgagcgccgcccaccgggccagatacttctggggcaatctgcctggcatgaacagacccctggccagcaccgtgaacgacaagctggagctgcaggagtgcctggagcacggccggatcgccaagttcagcaaggtgagaaccatcaccacccgaagcaacagcatcaaacaaggcaaggaccagcactttcctgtgttcatgaacgagaaggaggacatcctgtggtgtaccgagatggagagagtgttcgggttcccagtccactacacagatgtcagcaacatgtctagactggccagacagagactgctgggaagaagctggtccgtccctgtgatcagacacctgttcgcccctctgaaggagtacttcgcctgcgtgagcagcggcaacagcaacgccaacagccggggccccagcttctctagcggcctggtgccactgtccctgagagggagccacatgggccccatggagatctacaaaaccgtgagcgcctggaagcggcagcctgtgcgcgtgctgagcctgtttcggaatatcgataaagtcctgaaaagcctgggattcctggagagcggctctggctccggcggtggcaccctgaagtacgtggaggatgtgacaaacgtggtcagacgggatgtggagaagtggggccccttcgatctggtgtacggcagcacccaacccctgggcagctcttgtgaccggtgccctggctggtacatgtttcagttccaccggatcctgcagtacgccctgccgagacaggagtcccagcggccattcttttggattttcatggacaacttgctgctgaccgaggatgaccaggaaactaccactcggttcctgcagaccgaagccgtgaccctgcaggacgtgagaggccgggactaccagaacgccatgcgggtgtggtccaacatccctggactgaaaagcaagcacgcacctctgacccctaaagaagaggagtacctgcaggcccaggtgcggagcagaagcaagctggacgcccctaaggtggatctgctggtgaagaattgcctcctgcccctgagagagtacttcaagtatttcagccagaatagtctgcccctgggaggcagcggcggcggcgccctggtgacatttgaggacgtcgccgtgcggttcacccaggaggaatgggctctgctggatccttctcagaaaatcctgtaccgggacgtgatgagagagacataccggaatctgacctccgtgggcatcaactgggaatgttgggaccttgaagcctgcttcagaagcctgggaagaaacctgagagtgcaggtggtgaagagaaagtgcgagctgaccaacagcggcccctgcgccgagggcggcccaagcagcggcgcccctcctcccagcggcggcagcccagccggctccccaacctctaccgaggagggcacctctgagtccgccacccccgagagcggccctggcacctccaccgagcccagcgagggcagcgcacccggcagccctgccggcagccccacctccacagaggagggaaccagcaccgagcccagcgaaggcagcgccccaggcaccagcaccgagcctagtgagcaggagattaaacggatcaacaagatcagaagaagacttgtgaaagacagcaacaccaagaaggccggcaagacaggccccatgaaaaccctgctggttagagtgatgacacccgatctgagagagcggctggaaaacctgagaaagaagcctgaaaatatcccccagcccatcagcaatacatctagagccaacctgaataagctgctgaccgattacaccgaaatgaagaaggcgatcctgcatgtgtactgggaagagttccagaaggaccctgtgggcctgatgagccgggtggcccagcctgccagcaagaagatcgatcagaacaagctgaaacctgagatggacgagaagggcaacctgaccaccgccggctttgcctgctctcagtgtggccagcccctgttcgtgtacaagctggagcaggtgtctgagaagggcaaggcttacaccaactacttcggacggtgcaatgtggccgagcacgaaaagctgatcctgctggcccagctgaagcccgagaaggatagcgacgaagccgtgacatatagcctgggaaagtttgggcagagggccctggatttctacagcattcatgtgaccaaggagtccacccaccccgtgaagcccctggcccagatcgccggaaacagatacgcctccggacctgtgggaaaggccctgagcgacgcatgtatgggcacaatcgcctccttcctgtctaagtaccaggacatcatcatcgaacaccagaaggtggtgaagggcaaccagaagagactggagagcctgcgggagctggccggcaaggaaaacctggaataccctagcgtgaccctgccacctcagcctcacaccaaggagggcgttgatgcctacaacgaagtgatcgcccgggtgcgaatgtgggtgaacctgaacctgtggcagaagctgaagctaagcagagatgatgccaagcctctgctgagactgaagggattcccttcctttcctctggtcgagagacaggccaacgaagtggactggtgggacatggtgtgtaacgtgaagaagctgatcaacgagaaaaaggaggatggcaaggtgttttggcagaatctggctggctacaagagacaggaagccctgagaccatacctgagcagcgaggaagatcggaagaagggaaagaaattcgctcggtaccagctgggcgacctgctgctgcacctggaaaagaagcacggcgaggactggggaaaggtgtacgacgaggcctgggagcggattgacaagaaagtggaaggcctgagcaagcacatcaagctggaagaggaacggagaagcgaggacgcccagagcaaggccgccctgaccgactggctgcgggctaaggccagcttcgtgatcgagggcctgaaggaggccgacaaggacgagttctgcagatgcgagctgaagctgcagaagtggtacggggacctgcggggaaagcccttcgccatcgaagccgagaacagcatcctggacatcagcggcttcagcaagcagtacaactgtgccttcatctggcagaaggacggcgtgaagaagctgaacctgtacctgatcatcaactacttcaagggcggcaagctgcggttcaagaagatcaaacctgaagccttcgaagccaacagattctacaccgtgatcaacaaaaagagcggcgagatcgtgcccatggaggtgaacttcaacttcgacgaccccaacctgatcatcctgcctctggcctttggcaagagacagggcagagaattcatctggaacgacctgctgtccctggaaaccggcagcctgaagctggccaacggaagagtgatcgagaagacactgtacaacagaagaacccggcaggatgagcctgccctgttcgtggccctgaccttcgagcggcgggaggtcctggactcctccaatatcaaaccaatgaacctgatcggcgtggcaagaggcgaaaacatccccgccgtgatcgccctgaccgaccccgagggctgcccactgagccggtttaaggatagcctgggaaacccaacccacatcctgagaatcggcgagagctataaggagaagcagcggaccatccaggccaagaaggaggtggagcagcggagagccggcggctacagccggaagtacgccagcaaagccaagaatctggcagacgatatggtgagaaacaccgctagagatctgctgtactacgccgtgacccaggatgccatgctgatcttcgccaacctgagccggggcttcggccggcagggcaagcggaccttcatggccgagagacagtacacacggatggaggactggctgaccgccaagctggcctacgagggcctgagcaagacctacctgtccaagacactggcccagtacacctccaagacatgcagcaactgtgggtttaccatcaccagcgccgactacgacagggtgctggagaagctgaagaagacagcaacaggctggatgaccacaattaacggcaaggagctgaaggtggagggccagattacctactacaacagatacaagagacagaacgtagtcaaggacctgtccgtcgagctggatagactgagcgaagaatctgtgaacaacgacatctcctcctggacaaagggcagaagcggagaagctctgagcctcctgaagaaaagattctcccatagacccgtgcaggagaagttcgtgtgcctgaactgcggcttcgagacacacgcagccgagcaagccgccctgaacatcgccagatcctggctgttcctgcggagccaggagtacaagaaataccagacaaacaagacaaccggcaacaccgataagagagccttcgtcgagacctggcagtccttttaccggaagaagcttaaggaggtgtggaaacctgccgtgcggtctggcggatctggcggaggctccatggccttcgaggacgtggccgtgtacttcagccaggaggagtggggcctgctggacaccgcccagagggccctgtacaggcacgtgatgctggagaacttcaccctggtgaccagcctgggcctgagcaccagcaggccctacgtggtgatccagctggagaggggcgaggagccctgggtgcccagcggcaaggacatgaccctggccaggaacacctacaggaggctgaacgccggcagcggcggcccaagcagcggcgcccctcctcccagcggcggcagcccagccggctccccaacctctaccgaggagggcacctctgagtccgccacccccgagagcggccctggcacctccaccgagcccagcgagggcagcgcacccggcagccctgccggcagccccacctccacagaggagggaaccagcaccgagcccagcgaaggcagcgccccaggcaccagcaccgagcctagtgagcaggagattaaacggatcaacaagatcagaagaagacttgtgaaagacagcaacaccaagaaggccggcaagacaggccccatgaaaaccctgctggttagagtgatgacacccgatctgagagagcggctggaaaacctgagaaagaagcctgaaaatatcccccagcccatcagcaatacatctagagccaacctgaataagctgctgaccgattacaccgaaatgaagaaggcgatcctgcatgtgtactgggaagagttccagaaggaccctgtgggcctgatgagccgggtggcccagcctgccagcaagaagatcgatcagaacaagctgaaacctgagatggacgagaagggcaacctgaccaccgccggctttgcctgctctcagtgtggccagcccctgttcgtgtacaagctggagcaggtgtctgagaagggcaaggcttacaccaactacttcggacggtgcaatgtggccgagcacgaaaagctgatcctgctggcccagctgaagcccgagaaggatagcgacgaagccgtgacatatagcctgggaaagtttgggcagagggccctggatttctacagcattcatgtgaccaaggagtccacccaccccgtgaagcccctggcccagatcgccggaaacagatacgcctccggacctgtgggaaaggccctgagcgacgcatgtatgggcacaatcgcctccttcctgtctaagtaccaggacatcatcatcgaacaccagaaggtggtgaagggcaaccagaagagactggagagcctgcgggagctggccggcaaggaaaacctggaataccctagcgtgaccctgccacctcagcctcacaccaaggagggcgttgatgcctacaacgaagtgatcgcccgggtgcgaatgtgggtgaacctgaacctgtggcagaagctgaagctaagcagagatgatgccaagcctctgctgagactgaagggattcccttcctttcctctggtcgagagacaggccaacgaagtggactggtgggacatggtgtgtaacgtgaagaagctgatcaacgagaaaaaggaggatggcaaggtgttttggcagaatctggctggctacaagagacaggaagccctgagaccatacctgagcagcgaggaagatcggaagaagggaaagaaattcgctcggtaccagctgggcgacctgctgctgcacctggaaaagaagcacggcgaggactggggaaaggtgtacgacgaggcctgggagcggattgacaagaaagtggaaggcctgagcaagcacatcaagctggaagaggaacggagaagcgaggacgcccagagcaaggccgccctgaccgactggctgcgggctaaggccagcttcgtgatcgagggcctgaaggaggccgacaaggacgagttctgcagatgcgagctgaagctgcagaagtggtacggggacctgcggggaaagcccttcgccatcgaagccgagaacagcatcctggacatcagcggcttcagcaagcagtacaactgtgccttcatctggcagaaggacggcgtgaagaagctgaacctgtacctgatcatcaactacttcaagggcggcaagctgcggttcaagaagatcaaacctgaagccttcgaagccaacagattctacaccgtgatcaacaaaaagagcggcgagatcgtgcccatggaggtgaacttcaacttcgacgaccccaacctgatcatcctgcctctggcctttggcaagagacagggcagagaattcatctggaacgacctgctgtccctggaaaccggcagcctgaagctggccaacggaagagtgatcgagaagacactgtacaacagaagaacccggcaggatgagcctgccctgttcgtggccctgaccttcgagcggcgggaggtcctggactcctccaatatcaaaccaatgaacctgatcggcgtggcaagaggcgaaaacatccccgccgtgatcgccctgaccgaccccgagggctgcccactgagccggtttaaggatagcctgggaaacccaacccacatcctgagaatcggcgagagctataaggagaagcagcggaccatccaggccaagaaggaggtggagcagcggagagccggcggctacagccggaagtacgccagcaaagccaagaatctggcagacgatatggtgagaaacaccgctagagatctgctgtactacgccgtgacccaggatgccatgctgatcttcgccaacctgagccggggcttcggccggcagggcaagcggaccttcatggccgagagacagtacacacggatggaggactggctgaccgccaagctggcctacgagggcctgagcaagacctacctgtccaagacactggcccagtacacctccaagacatgcagcaactgtgggtttaccatcaccagcgccgactacgacagggtgctggagaagctgaagaagacagcaacaggctggatgaccacaattaacggcaaggagctgaaggtggagggccagattacctactacaacagatacaagagacagaacgtagtcaaggacctgtccgtcgagctggatagactgagcgaagaatctgtgaacaacgacatctcctcctggacaaagggcagaagcggagaagctctgagcctcctgaagaaaagattctcccatagacccgtgcaggagaagttcgtgtgcctgaactgcggcttcgagacacacgcagccgagcaagccgccctgaacatcgccagatcctggctgttcctgcggagccaggagtacaagaaataccagacaaacaagacaaccggcaacaccgataagagagccttcgtcgagacctggcagtccttttaccggaagaagcttaaggaggtgtggaaacctgccgtgcggtctggcggatctggcggaggctcctatggccttcgaggacgtggccgtgtacttcagccaggaggagtggggcctgctggacaccgcccagagggccctgtacaggcacgtgatgctggagaacttcaccctggtgaccagcctgggcctgagcaccagcaggccctacgtggtgatccagctggagaggggcgaggagccctgggtgcccagcggcaaggacatgaccctggccaggaacacctacaggaggctgaacgccggcagcggatctggctccggcagcggccccaagaaaaagagaaaagtctaagctgccttctgcggggcttgccttctggccatgcccttcttctctcccttgcacctgtacctcttggtctttgaataaagcctgagtaggaaggctagcaaaaaaaaaaaaaaaaaaaaaaaaaaaaaaaaaaaaaaaaaaaaaaaaaaaaaaaaaaaaaaaaaaaaaaaaaaaaaaaa

SEQ ID NO: 15345 - RNA, 9485 nt, synthetic construct
  source 1..9485: mol_type = other RNA
aggaaataagagagaaaagaagagtaagaagaaatataagagccaccatggcccctaagaagaagcgtaaagtgagccggatggaacgcctcgtctacgaggtgcggcagaagtgcagaaacatcgaggacatctgcatctcctgcggatctctgaacgtgaccctggagcacccactgttcatcggcggcatgtgccagaactgtaaaaactgttttctggagtgtgcctatcaatacgacgatgacggctaccagagctactgcaccatctgttgcggcggaagagaggtgctgatgtgtggaaataacaactgctgccggtgcttctgcgtggaatgcgtggacctgctggtgggccccggcgccgcccaggccgctattaaggaagatccttggaactgctacatgtgcggccacaagggcacatacggcctgctgagacggagagaggactggcctagcagactgcagatgttcttcgccaataaccacgaccaggagttcgacccccctaaggtgtaccctcccgtccccgccgagaagagaaagcccatccgggtcctgagcctgttcgatggcatcgccaccggtctgctggtgctgaaggacctgggcatccaggtggataggtacattgcctccgaggtgtgcgaggactccatcaccgtgggaatggtgcgtcatcagggcaagatcatgtacgtgggcgacgtgcggagcgtgacacagaagcatatccaggagtggggccctttcgacctggtgatcggcggcagcccttgcaatgacctgagcatcgtgaacccagcccggaagggcctgtacgagggaaccggcagactgttcttcgagttttacagactgctgcacgacgcccggcctaaggaaggcgacgaccggcccttcttttggctgttcgagaatgtggtggccatgggagtcagcgacaagcgggatattagccggttcctggagagcaaccccgtgatgatcgatgccaaggaagtgagcgccgcccaccgggccagatacttctggggcaatctgcctggcatgaacagacccctggccagcaccgtgaacgacaagctggagctgcaggagtgcctggagcacggccggatcgccaagttcagcaaggtgagaaccatcaccacccgaagcaacagcatcaaacaaggcaaggaccagcactttcctgtgttcatgaacgagaaggaggacatcctgtggtgtaccgagatggagagagtgttcgggttcccagtccactacacagatgtcagcaacatgtctagactggccagacagagactgctgggaagaagctggtccgtccctgtgatcagacacctgttcgcccctctgaaggagtacttcgcctgcgtgagcagcggcaacagcaacgccaacagccggggccccagcttctctagcggcctggtgccactgtccctgagagggagccacatgggccccatggagatctacaaaaccgtgagcgcctggaagcggcagcctgtgcgcgtgctgagcctgtttcggaatatcgataaagtcctgaaaagcctgggattcctggagagcggctctggctccggcggtggcaccctgaagtacgtggaggatgtgacaaacgtggtcagacgggatgtggagaagtggggccccttcgatctggtgtacggcagcacccaacccctgggcagctcttgtgaccggtgccctggctggtacatgtttcagttccaccggatcctgcagtacgccctgccgagacaggagtcccagcggccattcttttggattttcatggacaacttgctgctgaccgaggatgaccaggaaactaccactcggttcctgcagaccgaagccgtgaccctgcaggacgtgagaggccgggactaccagaacgccatgcgggtgtggtccaacatccctggactgaaaagcaagcacgcacctctgacccctaaagaagaggagtacctgcaggcccaggtgcggagcagaagcaagctggacgcccctaaggtggatctgctggtgaagaattgcctcctgcccctgagagagtacttcaagtatttcagccagaatagtctgcccctgggaggcagcggcggcggcgccctggtgacatttgaggacgtcgccgtgcggttcacccaggaggaatgggctctgctggatccttctcagaaaatcctgtaccgggacgtgatgagagagacataccggaatctgacctccgtgggcatcaactgggaatgttgggaccttgaagcctgcttcagaagcctgggaagaaacctgagagtgcaggtggtgaagagaaagtgcgagctgaccaacagcggcccctgcgccgagggcggcccaagcagcggcgcccctcctcccagcggcggcagcccagccggctccccaacctctaccgaggagggcacctctgagtccgccacccccgagagcggccctggcacctccaccgagcccagcgagggcagcgcacccggcagccctgccggcagccccacctccacagaggagggaaccagcaccgagcccagcgaaggcagcgccccaggcaccagcaccgagcctagtgagcaggagattaaacggatcaacaagatcagaagaagacttgtgaaagacagcaacaccaagaaggccggcaagacaggccccatgaaaaccctgctggttagagtgatgacacccgatctgagagagcggctggaaaacctgagaaagaagcctgaaaatatcccccagcccatcagcaatacatctagagccaacctgaataagctgctgaccgattacaccgaaatgaagaaggcgatcctgcatgtgtactgggaagagttccagaaggaccctgtgggcctgatgagccgggtggcccagcctgccagcaagaagatcgatcagaacaagctgaaacctgagatggacgagaagggcaacctgaccaccgccggctttgcctgctctcagtgtggccagcccctgttcgtgtacaagctggagcaggtgtctgagaagggcaaggcttacaccaactacttcggacggtgcaatgtggccgagcacgaaaagctgatcctgctggcccagctgaagcccgagaaggatagcgacgaagccgtgacatatagcctgggaaagtttgggcagagggccctggatttctacagcattcatgtgaccaaggagtccacccaccccgtgaagcccctggcccagatcgccggaaacagatacgcctccggacctgtgggaaaggccctgagcgacgcatgtatgggcacaatcgcctccttcctgtctaagtaccaggacatcatcatcgaacaccagaaggtggtgaagggcaaccagaagagactggagagcctgcgggagctggccggcaaggaaaacctggaataccctagcgtgaccctgccacctcagcctcacaccaaggagggcgttgatgcctacaacgaagtgatcgcccgggtgcgaatgtgggtgaacctgaacctgtggcagaagctgaagctaagcagagatgatgccaagcctctgctgagactgaagggattcccttcctttcctctggtcgagagacaggccaacgaagtggactggtgggacatggtgtgtaacgtgaagaagctgatcaacgagaaaaaggaggatggcaaggtgttttggcagaatctggctggctacaagagacaggaagccctgagaccatacctgagcagcgaggaagatcggaagaagggaaagaaattcgctcggtaccagctgggcgacctgctgctgcacctggaaaagaagcacggcgaggactggggaaaggtgtacgacgaggcctgggagcggattgacaagaaagtggaaggcctgagcaagcacatcaagctggaagaggaacggagaagcgaggacgcccagagcaaggccgccctgaccgactggctgcgggctaaggccagcttcgtgatcgagggcctgaaggaggccgacaaggacgagttctgcagatgcgagctgaagctgcagaagtggtacggggacctgcggggaaagcccttcgccatcgaagccgagaacagcatcctggacatcagcggcttcagcaagcagtacaactgtgccttcatctggcagaaggacggcgtgaagaagctgaacctgtacctgatcatcaactacttcaagggcggcaagctgcggttcaagaagatcaaacctgaagccttcgaagccaacagattctacaccgtgatcaacaaaaagagcggcgagatcgtgcccatggaggtgaacttcaacttcgacgaccccaacctgatcatcctgcctctggcctttggcaagagacagggcagagaattcatctggaacgacctgctgtccctggaaaccggcagcctgaagctggccaacggaagagtgatcgagaagacactgtacaacagaagaacccggcaggatgagcctgccctgttcgtggccctgaccttcgagcggcgggaggtcctggactcctccaatatcaaaccaatgaacctgatcggcgtggcaagaggcgaaaacatccccgccgtgatcgccctgaccgaccccgagggctgcccactgagccggtttaaggatagcctgggaaacccaacccacatcctgagaatcggcgagagctataaggagaagcagcggaccatccaggccaagaaggaggtggagcagcggagagccggcggctacagccggaagtacgccagcaaagccaagaatctggcagacgatatggtgagaaacaccgctagagatctgctgtactacgccgtgacccaggatgccatgctgatcttcgccaacctgagccggggcttcggccggcagggcaagcggaccttcatggccgagagacagtacacacggatggaggactggctgaccgccaagctggcctacgagggcctgagcaagacctacctgtccaagacactggcccagtacacctccaagacatgcagcaactgtgggtttaccatcaccagcgccgactacgacagggtgctggagaagctgaagaagacagcaacaggctggatgaccacaattaacggcaaggagctgaaggtggagggccagattacctactacaacagatacaagagacagaacgtagtcaaggacctgtccgtcgagctggatagactgagcgaagaatctgtgaacaacgacatctcctcctggacaaagggcagaagcggagaagctctgagcctcctgaagaaaagattctcccatagacccgtgcaggagaagttcgtgtgcctgaactgcggcttcgagacacacgcagccgagcaagccgccctgaacatcgccagatcctggctgttcctgcggagccaggagtacaagaaataccagacaaacaagacaaccggcaacaccgataagagagccttcgtcgagacctggcagtccttttaccggaagaagcttaaggaggtgtggaaacctgccgtgcggtctggcggatctggcggaggctccatggccttcgaggacgtggccgtgtacttcagccaggaggagtggggcctgctggacaccgcccagagggccctgtacaggagggtgatgctggacaacttcgccctggtggccagcctgggcctgagcaccagcaggcccagggtggtgatccagctggagaggggcgaggagccctgggtgcccagcggcaccgacatgaccatgagcaggaacacccacaggaggaggaacagcggcttcggcggcccaagcagcggcgcccctcctcccagcggcggcagcccagccggctccccaacctctaccgaggagggcacctctgagtccgccacccccgagagcggccctggcacctccaccgagcccagcgagggcagcgcacccggcagccctgccggcagccccacctccacagaggagggaaccagcaccgagcccagcgaaggcagcgccccaggcaccagcaccgagcctagtgagcaggagattaaacggatcaacaagatcagaagaagacttgtgaaagacagcaacaccaagaaggccggcaagacaggccccatgaaaaccctgctggttagagtgatgacacccgatctgagagagcggctggaaaacctgagaaagaagcctgaaaatatcccccagcccatcagcaatacatctagagccaacctgaataagctgctgaccgattacaccgaaatgaagaaggcgatcctgcatgtgtactgggaagagttccagaaggaccctgtgggcctgatgagccgggtggcccagcctgccagcaagaagatcgatcagaacaagctgaaacctgagatggacgagaagggcaacctgaccaccgccggctttgcctgctctcagtgtggccagcccctgttcgtgtacaagctggagcaggtgtctgagaagggcaaggcttacaccaactacttcggacggtgcaatgtggccgagcacgaaaagctgatcctgctggcccagctgaagcccgagaaggatagcgacgaagccgtgacatatagcctgggaaagtttgggcagagggccctggatttctacagcattcatgtgaccaaggagtccacccaccccgtgaagcccctggcccagatcgccggaaacagatacgcctccggacctgtgggaaaggccctgagcgacgcatgtatgggcacaatcgcctccttcctgtctaagtaccaggacatcatcatcgaacaccagaaggtggtgaagggcaaccagaagagactggagagcctgcgggagctggccggcaaggaaaacctggaataccctagcgtgaccctgccacctcagcctcacaccaaggagggcgttgatgcctacaacgaagtgatcgcccgggtgcgaatgtgggtgaacctgaacctgtggcagaagctgaagctaagcagagatgatgccaagcctctgctgagactgaagggattcccttcctttcctctggtcgagagacaggccaacgaagtggactggtgggacatggtgtgtaacgtgaagaagctgatcaacgagaaaaaggaggatggcaaggtgttttggcagaatctggctggctacaagagacaggaagccctgagaccatacctgagcagcgaggaagatcggaagaagggaaagaaattcgctcggtaccagctgggcgacctgctgctgcacctggaaaagaagcacggcgaggactggggaaaggtgtacgacgaggcctgggagcggattgacaagaaagtggaaggcctgagcaagcacatcaagctggaagaggaacggagaagcgaggacgcccagagcaaggccgccctgaccgactggctgcgggctaaggccagcttcgtgatcgagggcctgaaggaggccgacaaggacgagttctgcagatgcgagctgaagctgcagaagtggtacggggacctgcggggaaagcccttcgccatcgaagccgagaacagcatcctggacatcagcggcttcagcaagcagtacaactgtgccttcatctggcagaaggacggcgtgaagaagctgaacctgtacctgatcatcaactacttcaagggcggcaagctgcggttcaagaagatcaaacctgaagccttcgaagccaacagattctacaccgtgatcaacaaaaagagcggcgagatcgtgcccatggaggtgaacttcaacttcgacgaccccaacctgatcatcctgcctctggcctttggcaagagacagggcagagaattcatctggaacgacctgctgtccctggaaaccggcagcctgaagctggccaacggaagagtgatcgagaagacactgtacaacagaagaacccggcaggatgagcctgccctgttcgtggccctgaccttcgagcggcgggaggtcctggactcctccaatatcaaaccaatgaacctgatcggcgtggcaagaggcgaaaacatccccgccgtgatcgccctgaccgaccccgagggctgcccactgagccggtttaaggatagcctgggaaacccaacccacatcctgagaatcggcgagagctataaggagaagcagcggaccatccaggccaagaaggaggtggagcagcggagagccggcggctacagccggaagtacgccagcaaagccaagaatctggcagacgatatggtgagaaacaccgctagagatctgctgtactacgccgtgacccaggatgccatgctgatcttcgccaacctgagccggggcttcggccggcagggcaagcggaccttcatggccgagagacagtacacacggatggaggactggctgaccgccaagctggcctacgagggcctgagcaagacctacctgtccaagacactggcccagtacacctccaagacatgcagcaactgtgggtttaccatcaccagcgccgactacgacagggtgctggagaagctgaagaagacagcaacaggctggatgaccacaattaacggcaaggagctgaaggtggagggccagattacctactacaacagatacaagagacagaacgtagtcaaggacctgtccgtcgagctggatagactgagcgaagaatctgtgaacaacgacatctcctcctggacaaagggcagaagcggagaagctctgagcctcctgaagaaaagattctcccatagacccgtgcaggagaagttcgtgtgcctgaactgcggcttcgagacacacgcagccgagcaagccgccctgaacatcgccagatcctggctgttcctgcggagccaggagtacaagaaataccagacaaacaagacaaccggcaacaccgataagagagccttcgtcgagacctggcagtccttttaccggaagaagcttaaggaggtgtggaaacctgccgtgcggtctggcggatctggcggaggctcctatggccttcgaggacgtggccgtgtacttcagccaggaggagtggggcctgctggacaccgcccagagggccctgtacaggagggtgatgctggacaacttcgccctggtggccagcctgggcctgagcaccagcaggcccagggtggtgatccagctggagaggggcgaggagccctgggtgcccagcggcaccgacatgaccatgagcaggaacacccacaggaggaggaacagcggcttcggatctggctccggcagcggccccaagaaaaagagaaaagtctaagctgccttctgcggggcttgccttctggccatgcccttcttctctcccttgcacctgtacctcttggtctttgaataaagcctgagtaggaaggctagcaaaaaaaaaaaaaaaaaaaaaaaaaaaaaaaaaaaaaaaaaaaaaaaaaaaaaaaaaaaaaaaaaaaaaaaaaaaaaaaa

SEQ ID NO: 15346 - RNA, 9485 nt, synthetic construct
  source 1..9485: mol_type = other RNA
aggaaataagagagaaaagaagagtaagaagaaatataagagccaccatggcccctaagaagaagcgtaaagtgagccggatggaacgcctcgtctacgaggtgcggcagaagtgcagaaacatcgaggacatctgcatctcctgcggatctctgaacgtgaccctggagcacccactgttcatcggcggcatgtgccagaactgtaaaaactgttttctggagtgtgcctatcaatacgacgatgacggctaccagagctactgcaccatctgttgcggcggaagagaggtgctgatgtgtggaaataacaactgctgccggtgcttctgcgtggaatgcgtggacctgctggtgggccccggcgccgcccaggccgctattaaggaagatccttggaactgctacatgtgcggccacaagggcacatacggcctgctgagacggagagaggactggcctagcagactgcagatgttcttcgccaataaccacgaccaggagttcgacccccctaaggtgtaccctcccgtccccgccgagaagagaaagcccatccgggtcctgagcctgttcgatggcatcgccaccggtctgctggtgctgaaggacctgggcatccaggtggataggtacattgcctccgaggtgtgcgaggactccatcaccgtgggaatggtgcgtcatcagggcaagatcatgtacgtgggcgacgtgcggagcgtgacacagaagcatatccaggagtggggccctttcgacctggtgatcggcggcagcccttgcaatgacctgagcatcgtgaacccagcccggaagggcctgtacgagggaaccggcagactgttcttcgagttttacagactgctgcacgacgcccggcctaaggaaggcgacgaccggcccttcttttggctgttcgagaatgtggtggccatgggagtcagcgacaagcgggatattagccggttcctggagagcaaccccgtgatgatcgatgccaaggaagtgagcgccgcccaccgggccagatacttctggggcaatctgcctggcatgaacagacccctggccagcaccgtgaacgacaagctggagctgcaggagtgcctggagcacggccggatcgccaagttcagcaaggtgagaaccatcaccacccgaagcaacagcatcaaacaaggcaaggaccagcactttcctgtgttcatgaacgagaaggaggacatcctgtggtgtaccgagatggagagagtgttcgggttcccagtccactacacagatgtcagcaacatgtctagactggccagacagagactgctgggaagaagctggtccgtccctgtgatcagacacctgttcgcccctctgaaggagtacttcgcctgcgtgagcagcggcaacagcaacgccaacagccggggccccagcttctctagcggcctggtgccactgtccctgagagggagccacatgggccccatggagatctacaaaaccgtgagcgcctggaagcggcagcctgtgcgcgtgctgagcctgtttcggaatatcgataaagtcctgaaaagcctgggattcctggagagcggctctggctccggcggtggcaccctgaagtacgtggaggatgtgacaaacgtggtcagacgggatgtggagaagtggggccccttcgatctggtgtacggcagcacccaacccctgggcagctcttgtgaccggtgccctggctggtacatgtttcagttccaccggatcctgcagtacgccctgccgagacaggagtcccagcggccattcttttggattttcatggacaacttgctgctgaccgaggatgaccaggaaactaccactcggttcctgcagaccgaagccgtgaccctgcaggacgtgagaggccgggactaccagaacgccatgcgggtgtggtccaacatccctggactgaaaagcaagcacgcacctctgacccctaaagaagaggagtacctgcaggcccaggtgcggagcagaagcaagctggacgcccctaaggtggatctgctggtgaagaattgcctcctgcccctgagagagtacttcaagtatttcagccagaatagtctgcccctgggaggcagcggcggcggcgccctggtgacatttgaggacgtcgccgtgcggttcacccaggaggaatgggctctgctggatccttctcagaaaatcctgtaccgggacgtgatgagagagacataccggaatctgacctccgtgggcatcaactgggaatgttgggaccttgaagcctgcttcagaagcctgggaagaaacctgagagtgcaggtggtgaagagaaagtgcgagctgaccaacagcggcccctgcgccgagggcggcccaagcagcggcgcccctcctcccagcggcggcagcccagccggctccccaacctctaccgaggagggcacctctgagtccgccacccccgagagcggccctggcacctccaccgagcccagcgagggcagcgcacccggcagccctgccggcagccccacctccacagaggagggaaccagcaccgagcccagcgaaggcagcgccccaggcaccagcaccgagcctagtgagcaggagattaaacggatcaacaagatcagaagaagacttgtgaaagacagcaacaccaagaaggccggcaagacaggccccatgaaaaccctgctggttagagtgatgacacccgatctgagagagcggctggaaaacctgagaaagaagcctgaaaatatcccccagcccatcagcaatacatctagagccaacctgaataagctgctgaccgattacaccgaaatgaagaaggcgatcctgcatgtgtactgggaagagttccagaaggaccctgtgggcctgatgagccgggtggcccagcctgccagcaagaagatcgatcagaacaagctgaaacctgagatggacgagaagggcaacctgaccaccgccggctttgcctgctctcagtgtggccagcccctgttcgtgtacaagctggagcaggtgtctgagaagggcaaggcttacaccaactacttcggacggtgcaatgtggccgagcacgaaaagctgatcctgctggcccagctgaagcccgagaaggatagcgacgaagccgtgacatatagcctgggaaagtttgggcagagggccctggatttctacagcattcatgtgaccaaggagtccacccaccccgtgaagcccctggcccagatcgccggaaacagatacgcctccggacctgtgggaaaggccctgagcgacgcatgtatgggcacaatcgcctccttcctgtctaagtaccaggacatcatcatcgaacaccagaaggtggtgaagggcaaccagaagagactggagagcctgcgggagctggccggcaaggaaaacctggaataccctagcgtgaccctgccacctcagcctcacaccaaggagggcgttgatgcctacaacgaagtgatcgcccgggtgcgaatgtgggtgaacctgaacctgtggcagaagctgaagctaagcagagatgatgccaagcctctgctgagactgaagggattcccttcctttcctctggtcgagagacaggccaacgaagtggactggtgggacatggtgtgtaacgtgaagaagctgatcaacgagaaaaaggaggatggcaaggtgttttggcagaatctggctggctacaagagacaggaagccctgagaccatacctgagcagcgaggaagatcggaagaagggaaagaaattcgctcggtaccagctgggcgacctgctgctgcacctggaaaagaagcacggcgaggactggggaaaggtgtacgacgaggcctgggagcggattgacaagaaagtggaaggcctgagcaagcacatcaagctggaagaggaacggagaagcgaggacgcccagagcaaggccgccctgaccgactggctgcgggctaaggccagcttcgtgatcgagggcctgaaggaggccgacaaggacgagttctgcagatgcgagctgaagctgcagaagtggtacggggacctgcggggaaagcccttcgccatcgaagccgagaacagcatcctggacatcagcggcttcagcaagcagtacaactgtgccttcatctggcagaaggacggcgtgaagaagctgaacctgtacctgatcatcaactacttcaagggcggcaagctgcggttcaagaagatcaaacctgaagccttcgaagccaacagattctacaccgtgatcaacaaaaagagcggcgagatcgtgcccatggaggtgaacttcaacttcgacgaccccaacctgatcatcctgcctctggcctttggcaagagacagggcagagaattcatctggaacgacctgctgtccctggaaaccggcagcctgaagctggccaacggaagagtgatcgagaagacactgtacaacagaagaacccggcaggatgagcctgccctgttcgtggccctgaccttcgagcggcgggaggtcctggactcctccaatatcaaaccaatgaacctgatcggcgtggcaagaggcgaaaacatccccgccgtgatcgccctgaccgaccccgagggctgcccactgagccggtttaaggatagcctgggaaacccaacccacatcctgagaatcggcgagagctataaggagaagcagcggaccatccaggccaagaaggaggtggagcagcggagagccggcggctacagccggaagtacgccagcaaagccaagaatctggcagacgatatggtgagaaacaccgctagagatctgctgtactacgccgtgacccaggatgccatgctgatcttcgccaacctgagccggggcttcggccggcagggcaagcggaccttcatggccgagagacagtacacacggatggaggactggctgaccgccaagctggcctacgagggcctgagcaagacctacctgtccaagacactggcccagtacacctccaagacatgcagcaactgtgggtttaccatcaccagcgccgactacgacagggtgctggagaagctgaagaagacagcaacaggctggatgaccacaattaacggcaaggagctgaaggtggagggccagattacctactacaacagatacaagagacagaacgtagtcaaggacctgtccgtcgagctggatagactgagcgaagaatctgtgaacaacgacatctcctcctggacaaagggcagaagcggagaagctctgagcctcctgaagaaaagattctcccatagacccgtgcaggagaagttcgtgtgcctgaactgcggcttcgagacacacgcagccgagcaagccgccctgaacatcgccagatcctggctgttcctgcggagccaggagtacaagaaataccagacaaacaagacaaccggcaacaccgataagagagccttcgtcgagacctggcagtccttttaccggaagaagcttaaggaggtgtggaaacctgccgtgcggtctggcggatctggcggaggctccagccagagcctggtgaccttcggcgacgtggccgtggacttcagccaggaggagtgggagcagctgacctgcgcccagagggccctgtacagggacgtgatgctggagaactacaggaacctggtgagcctgggcctgtgcttcagcaagcccgacatgatcagcagcctggagcagagggaggagccctggatggccaagaggaagctgaccaggggcccctgccccgactggagggccgtgggcggcccaagcagcggcgcccctcctcccagcggcggcagcccagccggctccccaacctctaccgaggagggcacctctgagtccgccacccccgagagcggccctggcacctccaccgagcccagcgagggcagcgcacccggcagccctgccggcagccccacctccacagaggagggaaccagcaccgagcccagcgaaggcagcgccccaggcaccagcaccgagcctagtgagcaggagattaaacggatcaacaagatcagaagaagacttgtgaaagacagcaacaccaagaaggccggcaagacaggccccatgaaaaccctgctggttagagtgatgacacccgatctgagagagcggctggaaaacctgagaaagaagcctgaaaatatcccccagcccatcagcaatacatctagagccaacctgaataagctgctgaccgattacaccgaaatgaagaaggcgatcctgcatgtgtactgggaagagttccagaaggaccctgtgggcctgatgagccgggtggcccagcctgccagcaagaagatcgatcagaacaagctgaaacctgagatggacgagaagggcaacctgaccaccgccggctttgcctgctctcagtgtggccagcccctgttcgtgtacaagctggagcaggtgtctgagaagggcaaggcttacaccaactacttcggacggtgcaatgtggccgagcacgaaaagctgatcctgctggcccagctgaagcccgagaaggatagcgacgaagccgtgacatatagcctgggaaagtttgggcagagggccctggatttctacagcattcatgtgaccaaggagtccacccaccccgtgaagcccctggcccagatcgccggaaacagatacgcctccggacctgtgggaaaggccctgagcgacgcatgtatgggcacaatcgcctccttcctgtctaagtaccaggacatcatcatcgaacaccagaaggtggtgaagggcaaccagaagagactggagagcctgcgggagctggccggcaaggaaaacctggaataccctagcgtgaccctgccacctcagcctcacaccaaggagggcgttgatgcctacaacgaagtgatcgcccgggtgcgaatgtgggtgaacctgaacctgtggcagaagctgaagctaagcagagatgatgccaagcctctgctgagactgaagggattcccttcctttcctctggtcgagagacaggccaacgaagtggactggtgggacatggtgtgtaacgtgaagaagctgatcaacgagaaaaaggaggatggcaaggtgttttggcagaatctggctggctacaagagacaggaagccctgagaccatacctgagcagcgaggaagatcggaagaagggaaagaaattcgctcggtaccagctgggcgacctgctgctgcacctggaaaagaagcacggcgaggactggggaaaggtgtacgacgaggcctgggagcggattgacaagaaagtggaaggcctgagcaagcacatcaagctggaagaggaacggagaagcgaggacgcccagagcaaggccgccctgaccgactggctgcgggctaaggccagcttcgtgatcgagggcctgaaggaggccgacaaggacgagttctgcagatgcgagctgaagctgcagaagtggtacggggacctgcggggaaagcccttcgccatcgaagccgagaacagcatcctggacatcagcggcttcagcaagcagtacaactgtgccttcatctggcagaaggacggcgtgaagaagctgaacctgtacctgatcatcaactacttcaagggcggcaagctgcggttcaagaagatcaaacctgaagccttcgaagccaacagattctacaccgtgatcaacaaaaagagcggcgagatcgtgcccatggaggtgaacttcaacttcgacgaccccaacctgatcatcctgcctctggcctttggcaagagacagggcagagaattcatctggaacgacctgctgtccctggaaaccggcagcctgaagctggccaacggaagagtgatcgagaagacactgtacaacagaagaacccggcaggatgagcctgccctgttcgtggccctgaccttcgagcggcgggaggtcctggactcctccaatatcaaaccaatgaacctgatcggcgtggcaagaggcgaaaacatccccgccgtgatcgccctgaccgaccccgagggctgcccactgagccggtttaaggatagcctgggaaacccaacccacatcctgagaatcggcgagagctataaggagaagcagcggaccatccaggccaagaaggaggtggagcagcggagagccggcggctacagccggaagtacgccagcaaagccaagaatctggcagacgatatggtgagaaacaccgctagagatctgctgtactacgccgtgacccaggatgccatgctgatcttcgccaacctgagccggggcttcggccggcagggcaagcggaccttcatggccgagagacagtacacacggatggaggactggctgaccgccaagctggcctacgagggcctgagcaagacctacctgtccaagacactggcccagtacacctccaagacatgcagcaactgtgggtttaccatcaccagcgccgactacgacagggtgctggagaagctgaagaagacagcaacaggctggatgaccacaattaacggcaaggagctgaaggtggagggccagattacctactacaacagatacaagagacagaacgtagtcaaggacctgtccgtcgagctggatagactgagcgaagaatctgtgaacaacgacatctcctcctggacaaagggcagaagcggagaagctctgagcctcctgaagaaaagattctcccatagacccgtgcaggagaagttcgtgtgcctgaactgcggcttcgagacacacgcagccgagcaagccgccctgaacatcgccagatcctggctgttcctgcggagccaggagtacaagaaataccagacaaacaagacaaccggcaacaccgataagagagccttcgtcgagacctggcagtccttttaccggaagaagcttaaggaggtgtggaaacctgccgtgcggtctggcggatctggcggaggctcctagccagagcctggtgaccttcggcgacgtggccgtggacttcagccaggaggagtgggagcagctgacctgcgcccagagggccctgtacagggacgtgatgctggagaactacaggaacctggtgagcctgggcctgtgcttcagcaagcccgacatgatcagcagcctggagcagagggaggagccctggatggccaagaggaagctgaccaggggcccctgccccgactggagggccgtgggatctggctccggcagcggccccaagaaaaagagaaaagtctaagctgccttctgcggggcttgccttctggccatgcccttcttctctcccttgcacctgtacctcttggtctttgaataaagcctgagtaggaaggctagcaaaaaaaaaaaaaaaaaaaaaaaaaaaaaaaaaaaaaaaaaaaaaaaaaaaaaaaaaaaaaaaaaaaaaaaaaaaaaaaa

SEQ ID NO: 15347 - RNA, 9485 nt, synthetic construct
  source 1..9485: mol_type = other RNA
aggaaataagagagaaaagaagagtaagaagaaatataagagccaccatggcccctaagaagaagcgtaaagtgagccggatggaacgcctcgtctacgaggtgcggcagaagtgcagaaacatcgaggacatctgcatctcctgcggatctctgaacgtgaccctggagcacccactgttcatcggcggcatgtgccagaactgtaaaaactgttttctggagtgtgcctatcaatacgacgatgacggctaccagagctactgcaccatctgttgcggcggaagagaggtgctgatgtgtggaaataacaactgctgccggtgcttctgcgtggaatgcgtggacctgctggtgggccccggcgccgcccaggccgctattaaggaagatccttggaactgctacatgtgcggccacaagggcacatacggcctgctgagacggagagaggactggcctagcagactgcagatgttcttcgccaataaccacgaccaggagttcgacccccctaaggtgtaccctcccgtccccgccgagaagagaaagcccatccgggtcctgagcctgttcgatggcatcgccaccggtctgctggtgctgaaggacctgggcatccaggtggataggtacattgcctccgaggtgtgcgaggactccatcaccgtgggaatggtgcgtcatcagggcaagatcatgtacgtgggcgacgtgcggagcgtgacacagaagcatatccaggagtggggccctttcgacctggtgatcggcggcagcccttgcaatgacctgagcatcgtgaacccagcccggaagggcctgtacgagggaaccggcagactgttcttcgagttttacagactgctgcacgacgcccggcctaaggaaggcgacgaccggcccttcttttggctgttcgagaatgtggtggccatgggagtcagcgacaagcgggatattagccggttcctggagagcaaccccgtgatgatcgatgccaaggaagtgagcgccgcccaccgggccagatacttctggggcaatctgcctggcatgaacagacccctggccagcaccgtgaacgacaagctggagctgcaggagtgcctggagcacggccggatcgccaagttcagcaaggtgagaaccatcaccacccgaagcaacagcatcaaacaaggcaaggaccagcactttcctgtgttcatgaacgagaaggaggacatcctgtggtgtaccgagatggagagagtgttcgggttcccagtccactacacagatgtcagcaacatgtctagactggccagacagagactgctgggaagaagctggtccgtccctgtgatcagacacctgttcgcccctctgaaggagtacttcgcctgcgtgagcagcggcaacagcaacgccaacagccggggccccagcttctctagcggcctggtgccactgtccctgagagggagccacatgggccccatggagatctacaaaaccgtgagcgcctggaagcggcagcctgtgcgcgtgctgagcctgtttcggaatatcgataaagtcctgaaaagcctgggattcctggagagcggctctggctccggcggtggcaccctgaagtacgtggaggatgtgacaaacgtggtcagacgggatgtggagaagtggggccccttcgatctggtgtacggcagcacccaacccctgggcagctcttgtgaccggtgccctggctggtacatgtttcagttccaccggatcctgcagtacgccctgccgagacaggagtcccagcggccattcttttggattttcatggacaacttgctgctgaccgaggatgaccaggaaactaccactcggttcctgcagaccgaagccgtgaccctgcaggacgtgagaggccgggactaccagaacgccatgcgggtgtggtccaacatccctggactgaaaagcaagcacgcacctctgacccctaaagaagaggagtacctgcaggcccaggtgcggagcagaagcaagctggacgcccctaaggtggatctgctggtgaagaattgcctcctgcccctgagagagtacttcaagtatttcagccagaatagtctgcccctgggaggcagcggcggcggcgccctggtgacatttgaggacgtcgccgtgcggttcacccaggaggaatgggctctgctggatccttctcagaaaatcctgtaccgggacgtgatgagagagacataccggaatctgacctccgtgggcatcaactgggaatgttgggaccttgaagcctgcttcagaagcctgggaagaaacctgagagtgcaggtggtgaagagaaagtgcgagctgaccaacagcggcccctgcgccgagggcggcccaagcagcggcgcccctcctcccagcggcggcagcccagccggctccccaacctctaccgaggagggcacctctgagtccgccacccccgagagcggccctggcacctccaccgagcccagcgagggcagcgcacccggcagccctgccggcagccccacctccacagaggagggaaccagcaccgagcccagcgaaggcagcgccccaggcaccagcaccgagcctagtgagcaggagattaaacggatcaacaagatcagaagaagacttgtgaaagacagcaacaccaagaaggccggcaagacaggccccatgaaaaccctgctggttagagtgatgacacccgatctgagagagcggctggaaaacctgagaaagaagcctgaaaatatcccccagcccatcagcaatacatctagagccaacctgaataagctgctgaccgattacaccgaaatgaagaaggcgatcctgcatgtgtactgggaagagttccagaaggaccctgtgggcctgatgagccgggtggcccagcctgccagcaagaagatcgatcagaacaagctgaaacctgagatggacgagaagggcaacctgaccaccgccggctttgcctgctctcagtgtggccagcccctgttcgtgtacaagctggagcaggtgtctgagaagggcaaggcttacaccaactacttcggacggtgcaatgtggccgagcacgaaaagctgatcctgctggcccagctgaagcccgagaaggatagcgacgaagccgtgacatatagcctgggaaagtttgggcagagggccctggatttctacagcattcatgtgaccaaggagtccacccaccccgtgaagcccctggcccagatcgccggaaacagatacgcctccggacctgtgggaaaggccctgagcgacgcatgtatgggcacaatcgcctccttcctgtctaagtaccaggacatcatcatcgaacaccagaaggtggtgaagggcaaccagaagagactggagagcctgcgggagctggccggcaaggaaaacctggaataccctagcgtgaccctgccacctcagcctcacaccaaggagggcgttgatgcctacaacgaagtgatcgcccgggtgcgaatgtgggtgaacctgaacctgtggcagaagctgaagctaagcagagatgatgccaagcctctgctgagactgaagggattcccttcctttcctctggtcgagagacaggccaacgaagtggactggtgggacatggtgtgtaacgtgaagaagctgatcaacgagaaaaaggaggatggcaaggtgttttggcagaatctggctggctacaagagacaggaagccctgagaccatacctgagcagcgaggaagatcggaagaagggaaagaaattcgctcggtaccagctgggcgacctgctgctgcacctggaaaagaagcacggcgaggactggggaaaggtgtacgacgaggcctgggagcggattgacaagaaagtggaaggcctgagcaagcacatcaagctggaagaggaacggagaagcgaggacgcccagagcaaggccgccctgaccgactggctgcgggctaaggccagcttcgtgatcgagggcctgaaggaggccgacaaggacgagttctgcagatgcgagctgaagctgcagaagtggtacggggacctgcggggaaagcccttcgccatcgaagccgagaacagcatcctggacatcagcggcttcagcaagcagtacaactgtgccttcatctggcagaaggacggcgtgaagaagctgaacctgtacctgatcatcaactacttcaagggcggcaagctgcggttcaagaagatcaaacctgaagccttcgaagccaacagattctacaccgtgatcaacaaaaagagcggcgagatcgtgcccatggaggtgaacttcaacttcgacgaccccaacctgatcatcctgcctctggcctttggcaagagacagggcagagaattcatctggaacgacctgctgtccctggaaaccggcagcctgaagctggccaacggaagagtgatcgagaagacactgtacaacagaagaacccggcaggatgagcctgccctgttcgtggccctgaccttcgagcggcgggaggtcctggactcctccaatatcaaaccaatgaacctgatcggcgtggcaagaggcgaaaacatccccgccgtgatcgccctgaccgaccccgagggctgcccactgagccggtttaaggatagcctgggaaacccaacccacatcctgagaatcggcgagagctataaggagaagcagcggaccatccaggccaagaaggaggtggagcagcggagagccggcggctacagccggaagtacgccagcaaagccaagaatctggcagacgatatggtgagaaacaccgctagagatctgctgtactacgccgtgacccaggatgccatgctgatcttcgccaacctgagccggggcttcggccggcagggcaagcggaccttcatggccgagagacagtacacacggatggaggactggctgaccgccaagctggcctacgagggcctgagcaagacctacctgtccaagacactggcccagtacacctccaagacatgcagcaactgtgggtttaccatcaccagcgccgactacgacagggtgctggagaagctgaagaagacagcaacaggctggatgaccacaattaacggcaaggagctgaaggtggagggccagattacctactacaacagatacaagagacagaacgtagtcaaggacctgtccgtcgagctggatagactgagcgaagaatctgtgaacaacgacatctcctcctggacaaagggcagaagcggagaagctctgagcctcctgaagaaaagattctcccatagacccgtgcaggagaagttcgtgtgcctgaactgcggcttcgagacacacgcagccgagcaagccgccctgaacatcgccagatcctggctgttcctgcggagccaggagtacaagaaataccagacaaacaagacaaccggcaacaccgataagagagccttcgtcgagacctggcagtccttttaccggaagaagcttaaggaggtgtggaaacctgccgtgcggtctggcggatctggcggaggctccatgcacctgaccgcctggccccagaagagcgtgaccttcgaggacgtggccgtgtacttcacccaggccgagtgggacggcctgagccccgcccagaggaccctgtacagggacgtgatgctggagaactacggcaacgtggccagcctgggcttccccctgctgaagcccgccgtgatcagccagctggagggcggcggcgagctgggcggccccagccccctggccgccggcaccggcctgggcggcccaagcagcggcgcccctcctcccagcggcggcagcccagccggctccccaacctctaccgaggagggcacctctgagtccgccacccccgagagcggccctggcacctccaccgagcccagcgagggcagcgcacccggcagccctgccggcagccccacctccacagaggagggaaccagcaccgagcccagcgaaggcagcgccccaggcaccagcaccgagcctagtgagcaggagattaaacggatcaacaagatcagaagaagacttgtgaaagacagcaacaccaagaaggccggcaagacaggccccatgaaaaccctgctggttagagtgatgacacccgatctgagagagcggctggaaaacctgagaaagaagcctgaaaatatcccccagcccatcagcaatacatctagagccaacctgaataagctgctgaccgattacaccgaaatgaagaaggcgatcctgcatgtgtactgggaagagttccagaaggaccctgtgggcctgatgagccgggtggcccagcctgccagcaagaagatcgatcagaacaagctgaaacctgagatggacgagaagggcaacctgaccaccgccggctttgcctgctctcagtgtggccagcccctgttcgtgtacaagctggagcaggtgtctgagaagggcaaggcttacaccaactacttcggacggtgcaatgtggccgagcacgaaaagctgatcctgctggcccagctgaagcccgagaaggatagcgacgaagccgtgacatatagcctgggaaagtttgggcagagggccctggatttctacagcattcatgtgaccaaggagtccacccaccccgtgaagcccctggcccagatcgccggaaacagatacgcctccggacctgtgggaaaggccctgagcgacgcatgtatgggcacaatcgcctccttcctgtctaagtaccaggacatcatcatcgaacaccagaaggtggtgaagggcaaccagaagagactggagagcctgcgggagctggccggcaaggaaaacctggaataccctagcgtgaccctgccacctcagcctcacaccaaggagggcgttgatgcctacaacgaagtgatcgcccgggtgcgaatgtgggtgaacctgaacctgtggcagaagctgaagctaagcagagatgatgccaagcctctgctgagactgaagggattcccttcctttcctctggtcgagagacaggccaacgaagtggactggtgggacatggtgtgtaacgtgaagaagctgatcaacgagaaaaaggaggatggcaaggtgttttggcagaatctggctggctacaagagacaggaagccctgagaccatacctgagcagcgaggaagatcggaagaagggaaagaaattcgctcggtaccagctgggcgacctgctgctgcacctggaaaagaagcacggcgaggactggggaaaggtgtacgacgaggcctgggagcggattgacaagaaagtggaaggcctgagcaagcacatcaagctggaagaggaacggagaagcgaggacgcccagagcaaggccgccctgaccgactggctgcgggctaaggccagcttcgtgatcgagggcctgaaggaggccgacaaggacgagttctgcagatgcgagctgaagctgcagaagtggtacggggacctgcggggaaagcccttcgccatcgaagccgagaacagcatcctggacatcagcggcttcagcaagcagtacaactgtgccttcatctggcagaaggacggcgtgaagaagctgaacctgtacctgatcatcaactacttcaagggcggcaagctgcggttcaagaagatcaaacctgaagccttcgaagccaacagattctacaccgtgatcaacaaaaagagcggcgagatcgtgcccatggaggtgaacttcaacttcgacgaccccaacctgatcatcctgcctctggcctttggcaagagacagggcagagaattcatctggaacgacctgctgtccctggaaaccggcagcctgaagctggccaacggaagagtgatcgagaagacactgtacaacagaagaacccggcaggatgagcctgccctgttcgtggccctgaccttcgagcggcgggaggtcctggactcctccaatatcaaaccaatgaacctgatcggcgtggcaagaggcgaaaacatccccgccgtgatcgccctgaccgaccccgagggctgcccactgagccggtttaaggatagcctgggaaacccaacccacatcctgagaatcggcgagagctataaggagaagcagcggaccatccaggccaagaaggaggtggagcagcggagagccggcggctacagccggaagtacgccagcaaagccaagaatctggcagacgatatggtgagaaacaccgctagagatctgctgtactacgccgtgacccaggatgccatgctgatcttcgccaacctgagccggggcttcggccggcagggcaagcggaccttcatggccgagagacagtacacacggatggaggactggctgaccgccaagctggcctacgagggcctgagcaagacctacctgtccaagacactggcccagtacacctccaagacatgcagcaactgtgggtttaccatcaccagcgccgactacgacagggtgctggagaagctgaagaagacagcaacaggctggatgaccacaattaacggcaaggagctgaaggtggagggccagattacctactacaacagatacaagagacagaacgtagtcaaggacctgtccgtcgagctggatagactgagcgaagaatctgtgaacaacgacatctcctcctggacaaagggcagaagcggagaagctctgagcctcctgaagaaaagattctcccatagacccgtgcaggagaagttcgtgtgcctgaactgcggcttcgagacacacgcagccgagcaagccgccctgaacatcgccagatcctggctgttcctgcggagccaggagtacaagaaataccagacaaacaagacaaccggcaacaccgataagagagccttcgtcgagacctggcagtccttttaccggaagaagcttaaggaggtgtggaaacctgccgtgcggtctggcggatctggcggaggctcctatgcacctgaccgcctggccccagaagagcgtgaccttcgaggacgtggccgtgtacttcacccaggccgagtgggacggcctgagccccgcccagaggaccctgtacagggacgtgatgctggagaactacggcaacgtggccagcctgggcttccccctgctgaagcccgccgtgatcagccagctggagggcggcggcgagctgggcggccccagccccctggccgccggcaccggcctgggatctggctccggcagcggccccaagaaaaagagaaaagtctaagctgccttctgcggggcttgccttctggccatgcccttcttctctcccttgcacctgtacctcttggtctttgaataaagcctgagtaggaaggctagcaaaaaaaaaaaaaaaaaaaaaaaaaaaaaaaaaaaaaaaaaaaaaaaaaaaaaaaaaaaaaaaaaaaaaaaaaaaaaaaa

SEQ ID NO: 15348 - RNA, 9485 nt, synthetic construct
  source 1..9485: mol_type = other RNA
aggaaataagagagaaaagaagagtaagaagaaatataagagccaccatggcccctaagaagaagcgtaaagtgagccggatggaacgcctcgtctacgaggtgcggcagaagtgcagaaacatcgaggacatctgcatctcctgcggatctctgaacgtgaccctggagcacccactgttcatcggcggcatgtgccagaactgtaaaaactgttttctggagtgtgcctatcaatacgacgatgacggctaccagagctactgcaccatctgttgcggcggaagagaggtgctgatgtgtggaaataacaactgctgccggtgcttctgcgtggaatgcgtggacctgctggtgggccccggcgccgcccaggccgctattaaggaagatccttggaactgctacatgtgcggccacaagggcacatacggcctgctgagacggagagaggactggcctagcagactgcagatgttcttcgccaataaccacgaccaggagttcgacccccctaaggtgtaccctcccgtccccgccgagaagagaaagcccatccgggtcctgagcctgttcgatggcatcgccaccggtctgctggtgctgaaggacctgggcatccaggtggataggtacattgcctccgaggtgtgcgaggactccatcaccgtgggaatggtgcgtcatcagggcaagatcatgtacgtgggcgacgtgcggagcgtgacacagaagcatatccaggagtggggccctttcgacctggtgatcggcggcagcccttgcaatgacctgagcatcgtgaacccagcccggaagggcctgtacgagggaaccggcagactgttcttcgagttttacagactgctgcacgacgcccggcctaaggaaggcgacgaccggcccttcttttggctgttcgagaatgtggtggccatgggagtcagcgacaagcgggatattagccggttcctggagagcaaccccgtgatgatcgatgccaaggaagtgagcgccgcccaccgggccagatacttctggggcaatctgcctggcatgaacagacccctggccagcaccgtgaacgacaagctggagctgcaggagtgcctggagcacggccggatcgccaagttcagcaaggtgagaaccatcaccacccgaagcaacagcatcaaacaaggcaaggaccagcactttcctgtgttcatgaacgagaaggaggacatcctgtggtgtaccgagatggagagagtgttcgggttcccagtccactacacagatgtcagcaacatgtctagactggccagacagagactgctgggaagaagctggtccgtccctgtgatcagacacctgttcgcccctctgaaggagtacttcgcctgcgtgagcagcggcaacagcaacgccaacagccggggccccagcttctctagcggcctggtgccactgtccctgagagggagccacatgggccccatggagatctacaaaaccgtgagcgcctggaagcggcagcctgtgcgcgtgctgagcctgtttcggaatatcgataaagtcctgaaaagcctgggattcctggagagcggctctggctccggcggtggcaccctgaagtacgtggaggatgtgacaaacgtggtcagacgggatgtggagaagtggggccccttcgatctggtgtacggcagcacccaacccctgggcagctcttgtgaccggtgccctggctggtacatgtttcagttccaccggatcctgcagtacgccctgccgagacaggagtcccagcggccattcttttggattttcatggacaacttgctgctgaccgaggatgaccaggaaactaccactcggttcctgcagaccgaagccgtgaccctgcaggacgtgagaggccgggactaccagaacgccatgcgggtgtggtccaacatccctggactgaaaagcaagcacgcacctctgacccctaaagaagaggagtacctgcaggcccaggtgcggagcagaagcaagctggacgcccctaaggtggatctgctggtgaagaattgcctcctgcccctgagagagtacttcaagtatttcagccagaatagtctgcccctgggaggcagcggcggcggcgccctggtgacatttgaggacgtcgccgtgcggttcacccaggaggaatgggctctgctggatccttctcagaaaatcctgtaccgggacgtgatgagagagacataccggaatctgacctccgtgggcatcaactgggaatgttgggaccttgaagcctgcttcagaagcctgggaagaaacctgagagtgcaggtggtgaagagaaagtgcgagctgaccaacagcggcccctgcgccgagggcggcccaagcagcggcgcccctcctcccagcggcggcagcccagccggctccccaacctctaccgaggagggcacctctgagtccgccacccccgagagcggccctggcacctccaccgagcccagcgagggcagcgcacccggcagccctgccggcagccccacctccacagaggagggaaccagcaccgagcccagcgaaggcagcgccccaggcaccagcaccgagcctagtgagcaggagattaaacggatcaacaagatcagaagaagacttgtgaaagacagcaacaccaagaaggccggcaagacaggccccatgaaaaccctgctggttagagtgatgacacccgatctgagagagcggctggaaaacctgagaaagaagcctgaaaatatcccccagcccatcagcaatacatctagagccaacctgaataagctgctgaccgattacaccgaaatgaagaaggcgatcctgcatgtgtactgggaagagttccagaaggaccctgtgggcctgatgagccgggtggcccagcctgccagcaagaagatcgatcagaacaagctgaaacctgagatggacgagaagggcaacctgaccaccgccggctttgcctgctctcagtgtggccagcccctgttcgtgtacaagctggagcaggtgtctgagaagggcaaggcttacaccaactacttcggacggtgcaatgtggccgagcacgaaaagctgatcctgctggcccagctgaagcccgagaaggatagcgacgaagccgtgacatatagcctgggaaagtttgggcagagggccctggatttctacagcattcatgtgaccaaggagtccacccaccccgtgaagcccctggcccagatcgccggaaacagatacgcctccggacctgtgggaaaggccctgagcgacgcatgtatgggcacaatcgcctccttcctgtctaagtaccaggacatcatcatcgaacaccagaaggtggtgaagggcaaccagaagagactggagagcctgcgggagctggccggcaaggaaaacctggaataccctagcgtgaccctgccacctcagcctcacaccaaggagggcgttgatgcctacaacgaagtgatcgcccgggtgcgaatgtgggtgaacctgaacctgtggcagaagctgaagctaagcagagatgatgccaagcctctgctgagactgaagggattcccttcctttcctctggtcgagagacaggccaacgaagtggactggtgggacatggtgtgtaacgtgaagaagctgatcaacgagaaaaaggaggatggcaaggtgttttggcagaatctggctggctacaagagacaggaagccctgagaccatacctgagcagcgaggaagatcggaagaagggaaagaaattcgctcggtaccagctgggcgacctgctgctgcacctggaaaagaagcacggcgaggactggggaaaggtgtacgacgaggcctgggagcggattgacaagaaagtggaaggcctgagcaagcacatcaagctggaagaggaacggagaagcgaggacgcccagagcaaggccgccctgaccgactggctgcgggctaaggccagcttcgtgatcgagggcctgaaggaggccgacaaggacgagttctgcagatgcgagctgaagctgcagaagtggtacggggacctgcggggaaagcccttcgccatcgaagccgagaacagcatcctggacatcagcggcttcagcaagcagtacaactgtgccttcatctggcagaaggacggcgtgaagaagctgaacctgtacctgatcatcaactacttcaagggcggcaagctgcggttcaagaagatcaaacctgaagccttcgaagccaacagattctacaccgtgatcaacaaaaagagcggcgagatcgtgcccatggaggtgaacttcaacttcgacgaccccaacctgatcatcctgcctctggcctttggcaagagacagggcagagaattcatctggaacgacctgctgtccctggaaaccggcagcctgaagctggccaacggaagagtgatcgagaagacactgtacaacagaagaacccggcaggatgagcctgccctgttcgtggccctgaccttcgagcggcgggaggtcctggactcctccaatatcaaaccaatgaacctgatcggcgtggcaagaggcgaaaacatccccgccgtgatcgccctgaccgaccccgagggctgcccactgagccggtttaaggatagcctgggaaacccaacccacatcctgagaatcggcgagagctataaggagaagcagcggaccatccaggccaagaaggaggtggagcagcggagagccggcggctacagccggaagtacgccagcaaagccaagaatctggcagacgatatggtgagaaacaccgctagagatctgctgtactacgccgtgacccaggatgccatgctgatcttcgccaacctgagccggggcttcggccggcagggcaagcggaccttcatggccgagagacagtacacacggatggaggactggctgaccgccaagctggcctacgagggcctgagcaagacctacctgtccaagacactggcccagtacacctccaagacatgcagcaactgtgggtttaccatcaccagcgccgactacgacagggtgctggagaagctgaagaagacagcaacaggctggatgaccacaattaacggcaaggagctgaaggtggagggccagattacctactacaacagatacaagagacagaacgtagtcaaggacctgtccgtcgagctggatagactgagcgaagaatctgtgaacaacgacatctcctcctggacaaagggcagaagcggagaagctctgagcctcctgaagaaaagattctcccatagacccgtgcaggagaagttcgtgtgcctgaactgcggcttcgagacacacgcagccgagcaagccgccctgaacatcgccagatcctggctgttcctgcggagccaggagtacaagaaataccagacaaacaagacaaccggcaacaccgataagagagccttcgtcgagacctggcagtccttttaccggaagaagcttaaggaggtgtggaaacctgccgtgcggtctggcggatctggcggaggctccgcccccgtgaccttcggcgacctggccatctacttcagccaggaggagtgggagtggctgagccccatccagaaggacctgtacgaggacgtgatgctggagaactaccagaacctggtgagcctgggcctgtgcttcaggaggcccaacgtgatcaccctgctggagaggggcaaggccccctggatggtggaccccgtgaagaggaggaggggcctggacctgggcagcaagggcgagaccggcggcccaagcagcggcgcccctcctcccagcggcggcagcccagccggctccccaacctctaccgaggagggcacctctgagtccgccacccccgagagcggccctggcacctccaccgagcccagcgagggcagcgcacccggcagccctgccggcagccccacctccacagaggagggaaccagcaccgagcccagcgaaggcagcgccccaggcaccagcaccgagcctagtgagcaggagattaaacggatcaacaagatcagaagaagacttgtgaaagacagcaacaccaagaaggccggcaagacaggccccatgaaaaccctgctggttagagtgatgacacccgatctgagagagcggctggaaaacctgagaaagaagcctgaaaatatcccccagcccatcagcaatacatctagagccaacctgaataagctgctgaccgattacaccgaaatgaagaaggcgatcctgcatgtgtactgggaagagttccagaaggaccctgtgggcctgatgagccgggtggcccagcctgccagcaagaagatcgatcagaacaagctgaaacctgagatggacgagaagggcaacctgaccaccgccggctttgcctgctctcagtgtggccagcccctgttcgtgtacaagctggagcaggtgtctgagaagggcaaggcttacaccaactacttcggacggtgcaatgtggccgagcacgaaaagctgatcctgctggcccagctgaagcccgagaaggatagcgacgaagccgtgacatatagcctgggaaagtttgggcagagggccctggatttctacagcattcatgtgaccaaggagtccacccaccccgtgaagcccctggcccagatcgccggaaacagatacgcctccggacctgtgggaaaggccctgagcgacgcatgtatgggcacaatcgcctccttcctgtctaagtaccaggacatcatcatcgaacaccagaaggtggtgaagggcaaccagaagagactggagagcctgcgggagctggccggcaaggaaaacctggaataccctagcgtgaccctgccacctcagcctcacaccaaggagggcgttgatgcctacaacgaagtgatcgcccgggtgcgaatgtgggtgaacctgaacctgtggcagaagctgaagctaagcagagatgatgccaagcctctgctgagactgaagggattcccttcctttcctctggtcgagagacaggccaacgaagtggactggtgggacatggtgtgtaacgtgaagaagctgatcaacgagaaaaaggaggatggcaaggtgttttggcagaatctggctggctacaagagacaggaagccctgagaccatacctgagcagcgaggaagatcggaagaagggaaagaaattcgctcggtaccagctgggcgacctgctgctgcacctggaaaagaagcacggcgaggactggggaaaggtgtacgacgaggcctgggagcggattgacaagaaagtggaaggcctgagcaagcacatcaagctggaagaggaacggagaagcgaggacgcccagagcaaggccgccctgaccgactggctgcgggctaaggccagcttcgtgatcgagggcctgaaggaggccgacaaggacgagttctgcagatgcgagctgaagctgcagaagtggtacggggacctgcggggaaagcccttcgccatcgaagccgagaacagcatcctggacatcagcggcttcagcaagcagtacaactgtgccttcatctggcagaaggacggcgtgaagaagctgaacctgtacctgatcatcaactacttcaagggcggcaagctgcggttcaagaagatcaaacctgaagccttcgaagccaacagattctacaccgtgatcaacaaaaagagcggcgagatcgtgcccatggaggtgaacttcaacttcgacgaccccaacctgatcatcctgcctctggcctttggcaagagacagggcagagaattcatctggaacgacctgctgtccctggaaaccggcagcctgaagctggccaacggaagagtgatcgagaagacactgtacaacagaagaacccggcaggatgagcctgccctgttcgtggccctgaccttcgagcggcgggaggtcctggactcctccaatatcaaaccaatgaacctgatcggcgtggcaagaggcgaaaacatccccgccgtgatcgccctgaccgaccccgagggctgcccactgagccggtttaaggatagcctgggaaacccaacccacatcctgagaatcggcgagagctataaggagaagcagcggaccatccaggccaagaaggaggtggagcagcggagagccggcggctacagccggaagtacgccagcaaagccaagaatctggcagacgatatggtgagaaacaccgctagagatctgctgtactacgccgtgacccaggatgccatgctgatcttcgccaacctgagccggggcttcggccggcagggcaagcggaccttcatggccgagagacagtacacacggatggaggactggctgaccgccaagctggcctacgagggcctgagcaagacctacctgtccaagacactggcccagtacacctccaagacatgcagcaactgtgggtttaccatcaccagcgccgactacgacagggtgctggagaagctgaagaagacagcaacaggctggatgaccacaattaacggcaaggagctgaaggtggagggccagattacctactacaacagatacaagagacagaacgtagtcaaggacctgtccgtcgagctggatagactgagcgaagaatctgtgaacaacgacatctcctcctggacaaagggcagaagcggagaagctctgagcctcctgaagaaaagattctcccatagacccgtgcaggagaagttcgtgtgcctgaactgcggcttcgagacacacgcagccgagcaagccgccctgaacatcgccagatcctggctgttcctgcggagccaggagtacaagaaataccagacaaacaagacaaccggcaacaccgataagagagccttcgtcgagacctggcagtccttttaccggaagaagcttaaggaggtgtggaaacctgccgtgcggtctggcggatctggcggaggctcctgcccccgtgaccttcggcgacctggccatctacttcagccaggaggagtgggagtggctgagccccatccagaaggacctgtacgaggacgtgatgctggagaactaccagaacctggtgagcctgggcctgtgcttcaggaggcccaacgtgatcaccctgctggagaggggcaaggccccctggatggtggaccccgtgaagaggaggaggggcctggacctgggcagcaagggcgagaccggatctggctccggcagcggccccaagaaaaagagaaaagtctaagctgccttctgcggggcttgccttctggccatgcccttcttctctcccttgcacctgtacctcttggtctttgaataaagcctgagtaggaaggctagcaaaaaaaaaaaaaaaaaaaaaaaaaaaaaaaaaaaaaaaaaaaaaaaaaaaaaaaaaaaaaaaaaaaaaaaaaaaaaaaa

SEQ ID NO: 15349 - RNA, 9485 nt, synthetic construct
  source 1..9485: mol_type = other RNA
aggaaataagagagaaaagaagagtaagaagaaatataagagccaccatggcccctaagaagaagcgtaaagtgagccggatggaacgcctcgtctacgaggtgcggcagaagtgcagaaacatcgaggacatctgcatctcctgcggatctctgaacgtgaccctggagcacccactgttcatcggcggcatgtgccagaactgtaaaaactgttttctggagtgtgcctatcaatacgacgatgacggctaccagagctactgcaccatctgttgcggcggaagagaggtgctgatgtgtggaaataacaactgctgccggtgcttctgcgtggaatgcgtggacctgctggtgggccccggcgccgcccaggccgctattaaggaagatccttggaactgctacatgtgcggccacaagggcacatacggcctgctgagacggagagaggactggcctagcagactgcagatgttcttcgccaataaccacgaccaggagttcgacccccctaaggtgtaccctcccgtccccgccgagaagagaaagcccatccgggtcctgagcctgttcgatggcatcgccaccggtctgctggtgctgaaggacctgggcatccaggtggataggtacattgcctccgaggtgtgcgaggactccatcaccgtgggaatggtgcgtcatcagggcaagatcatgtacgtgggcgacgtgcggagcgtgacacagaagcatatccaggagtggggccctttcgacctggtgatcggcggcagcccttgcaatgacctgagcatcgtgaacccagcccggaagggcctgtacgagggaaccggcagactgttcttcgagttttacagactgctgcacgacgcccggcctaaggaaggcgacgaccggcccttcttttggctgttcgagaatgtggtggccatgggagtcagcgacaagcgggatattagccggttcctggagagcaaccccgtgatgatcgatgccaaggaagtgagcgccgcccaccgggccagatacttctggggcaatctgcctggcatgaacagacccctggccagcaccgtgaacgacaagctggagctgcaggagtgcctggagcacggccggatcgccaagttcagcaaggtgagaaccatcaccacccgaagcaacagcatcaaacaaggcaaggaccagcactttcctgtgttcatgaacgagaaggaggacatcctgtggtgtaccgagatggagagagtgttcgggttcccagtccactacacagatgtcagcaacatgtctagactggccagacagagactgctgggaagaagctggtccgtccctgtgatcagacacctgttcgcccctctgaaggagtacttcgcctgcgtgagcagcggcaacagcaacgccaacagccggggccccagcttctctagcggcctggtgccactgtccctgagagggagccacatgggccccatggagatctacaaaaccgtgagcgcctggaagcggcagcctgtgcgcgtgctgagcctgtttcggaatatcgataaagtcctgaaaagcctgggattcctggagagcggctctggctccggcggtggcaccctgaagtacgtggaggatgtgacaaacgtggtcagacgggatgtggagaagtggggccccttcgatctggtgtacggcagcacccaacccctgggcagctcttgtgaccggtgccctggctggtacatgtttcagttccaccggatcctgcagtacgccctgccgagacaggagtcccagcggccattcttttggattttcatggacaacttgctgctgaccgaggatgaccaggaaactaccactcggttcctgcagaccgaagccgtgaccctgcaggacgtgagaggccgggactaccagaacgccatgcgggtgtggtccaacatccctggactgaaaagcaagcacgcacctctgacccctaaagaagaggagtacctgcaggcccaggtgcggagcagaagcaagctggacgcccctaaggtggatctgctggtgaagaattgcctcctgcccctgagagagtacttcaagtatttcagccagaatagtctgcccctgggaggcagcggcggcggcgccctggtgacatttgaggacgtcgccgtgcggttcacccaggaggaatgggctctgctggatccttctcagaaaatcctgtaccgggacgtgatgagagagacataccggaatctgacctccgtgggcatcaactgggaatgttgggaccttgaagcctgcttcagaagcctgggaagaaacctgagagtgcaggtggtgaagagaaagtgcgagctgaccaacagcggcccctgcgccgagggcggcccaagcagcggcgcccctcctcccagcggcggcagcccagccggctccccaacctctaccgaggagggcacctctgagtccgccacccccgagagcggccctggcacctccaccgagcccagcgagggcagcgcacccggcagccctgccggcagccccacctccacagaggagggaaccagcaccgagcccagcgaaggcagcgccccaggcaccagcaccgagcctagtgagcaggagattaaacggatcaacaagatcagaagaagacttgtgaaagacagcaacaccaagaaggccggcaagacaggccccatgaaaaccctgctggttagagtgatgacacccgatctgagagagcggctggaaaacctgagaaagaagcctgaaaatatcccccagcccatcagcaatacatctagagccaacctgaataagctgctgaccgattacaccgaaatgaagaaggcgatcctgcatgtgtactgggaagagttccagaaggaccctgtgggcctgatgagccgggtggcccagcctgccagcaagaagatcgatcagaacaagctgaaacctgagatggacgagaagggcaacctgaccaccgccggctttgcctgctctcagtgtggccagcccctgttcgtgtacaagctggagcaggtgtctgagaagggcaaggcttacaccaactacttcggacggtgcaatgtggccgagcacgaaaagctgatcctgctggcccagctgaagcccgagaaggatagcgacgaagccgtgacatatagcctgggaaagtttgggcagagggccctggatttctacagcattcatgtgaccaaggagtccacccaccccgtgaagcccctggcccagatcgccggaaacagatacgcctccggacctgtgggaaaggccctgagcgacgcatgtatgggcacaatcgcctccttcctgtctaagtaccaggacatcatcatcgaacaccagaaggtggtgaagggcaaccagaagagactggagagcctgcgggagctggccggcaaggaaaacctggaataccctagcgtgaccctgccacctcagcctcacaccaaggagggcgttgatgcctacaacgaagtgatcgcccgggtgcgaatgtgggtgaacctgaacctgtggcagaagctgaagctaagcagagatgatgccaagcctctgctgagactgaagggattcccttcctttcctctggtcgagagacaggccaacgaagtggactggtgggacatggtgtgtaacgtgaagaagctgatcaacgagaaaaaggaggatggcaaggtgttttggcagaatctggctggctacaagagacaggaagccctgagaccatacctgagcagcgaggaagatcggaagaagggaaagaaattcgctcggtaccagctgggcgacctgctgctgcacctggaaaagaagcacggcgaggactggggaaaggtgtacgacgaggcctgggagcggattgacaagaaagtggaaggcctgagcaagcacatcaagctggaagaggaacggagaagcgaggacgcccagagcaaggccgccctgaccgactggctgcgggctaaggccagcttcgtgatcgagggcctgaaggaggccgacaaggacgagttctgcagatgcgagctgaagctgcagaagtggtacggggacctgcggggaaagcccttcgccatcgaagccgagaacagcatcctggacatcagcggcttcagcaagcagtacaactgtgccttcatctggcagaaggacggcgtgaagaagctgaacctgtacctgatcatcaactacttcaagggcggcaagctgcggttcaagaagatcaaacctgaagccttcgaagccaacagattctacaccgtgatcaacaaaaagagcggcgagatcgtgcccatggaggtgaacttcaacttcgacgaccccaacctgatcatcctgcctctggcctttggcaagagacagggcagagaattcatctggaacgacctgctgtccctggaaaccggcagcctgaagctggccaacggaagagtgatcgagaagacactgtacaacagaagaacccggcaggatgagcctgccctgttcgtggccctgaccttcgagcggcgggaggtcctggactcctccaatatcaaaccaatgaacctgatcggcgtggcaagaggcgaaaacatccccgccgtgatcgccctgaccgaccccgagggctgcccactgagccggtttaaggatagcctgggaaacccaacccacatcctgagaatcggcgagagctataaggagaagcagcggaccatccaggccaagaaggaggtggagcagcggagagccggcggctacagccggaagtacgccagcaaagccaagaatctggcagacgatatggtgagaaacaccgctagagatctgctgtactacgccgtgacccaggatgccatgctgatcttcgccaacctgagccggggcttcggccggcagggcaagcggaccttcatggccgagagacagtacacacggatggaggactggctgaccgccaagctggcctacgagggcctgagcaagacctacctgtccaagacactggcccagtacacctccaagacatgcagcaactgtgggtttaccatcaccagcgccgactacgacagggtgctggagaagctgaagaagacagcaacaggctggatgaccacaattaacggcaaggagctgaaggtggagggccagattacctactacaacagatacaagagacagaacgtagtcaaggacctgtccgtcgagctggatagactgagcgaagaatctgtgaacaacgacatctcctcctggacaaagggcagaagcggagaagctctgagcctcctgaagaaaagattctcccatagacccgtgcaggagaagttcgtgtgcctgaactgcggcttcgagacacacgcagccgagcaagccgccctgaacatcgccagatcctggctgttcctgcggagccaggagtacaagaaataccagacaaacaagacaaccggcaacaccgataagagagccttcgtcgagacctggcagtccttttaccggaagaagcttaaggaggtgtggaaacctgccgtgcggtctggcggatctggcggaggctccagcaaggcccccatcaccttcggcgacctggccatctacttcagccaggaggagtgggagtggctgagccccatccagaaggacctgtacgaggacgtgatgctggagaactacaggaacctggtgagcctgggcctgagcttcaggaggcccaacgtgatcaccctgctggagaagggcaaggccccctggatgatcgagcccgtgaggaggaggagggcccccgacagcggcagcaagtgcggcggcccaagcagcggcgcccctcctcccagcggcggcagcccagccggctccccaacctctaccgaggagggcacctctgagtccgccacccccgagagcggccctggcacctccaccgagcccagcgagggcagcgcacccggcagccctgccggcagccccacctccacagaggagggaaccagcaccgagcccagcgaaggcagcgccccaggcaccagcaccgagcctagtgagcaggagattaaacggatcaacaagatcagaagaagacttgtgaaagacagcaacaccaagaaggccggcaagacaggccccatgaaaaccctgctggttagagtgatgacacccgatctgagagagcggctggaaaacctgagaaagaagcctgaaaatatcccccagcccatcagcaatacatctagagccaacctgaataagctgctgaccgattacaccgaaatgaagaaggcgatcctgcatgtgtactgggaagagttccagaaggaccctgtgggcctgatgagccgggtggcccagcctgccagcaagaagatcgatcagaacaagctgaaacctgagatggacgagaagggcaacctgaccaccgccggctttgcctgctctcagtgtggccagcccctgttcgtgtacaagctggagcaggtgtctgagaagggcaaggcttacaccaactacttcggacggtgcaatgtggccgagcacgaaaagctgatcctgctggcccagctgaagcccgagaaggatagcgacgaagccgtgacatatagcctgggaaagtttgggcagagggccctggatttctacagcattcatgtgaccaaggagtccacccaccccgtgaagcccctggcccagatcgccggaaacagatacgcctccggacctgtgggaaaggccctgagcgacgcatgtatgggcacaatcgcctccttcctgtctaagtaccaggacatcatcatcgaacaccagaaggtggtgaagggcaaccagaagagactggagagcctgcgggagctggccggcaaggaaaacctggaataccctagcgtgaccctgccacctcagcctcacaccaaggagggcgttgatgcctacaacgaagtgatcgcccgggtgcgaatgtgggtgaacctgaacctgtggcagaagctgaagctaagcagagatgatgccaagcctctgctgagactgaagggattcccttcctttcctctggtcgagagacaggccaacgaagtggactggtgggacatggtgtgtaacgtgaagaagctgatcaacgagaaaaaggaggatggcaaggtgttttggcagaatctggctggctacaagagacaggaagccctgagaccatacctgagcagcgaggaagatcggaagaagggaaagaaattcgctcggtaccagctgggcgacctgctgctgcacctggaaaagaagcacggcgaggactggggaaaggtgtacgacgaggcctgggagcggattgacaagaaagtggaaggcctgagcaagcacatcaagctggaagaggaacggagaagcgaggacgcccagagcaaggccgccctgaccgactggctgcgggctaaggccagcttcgtgatcgagggcctgaaggaggccgacaaggacgagttctgcagatgcgagctgaagctgcagaagtggtacggggacctgcggggaaagcccttcgccatcgaagccgagaacagcatcctggacatcagcggcttcagcaagcagtacaactgtgccttcatctggcagaaggacggcgtgaagaagctgaacctgtacctgatcatcaactacttcaagggcggcaagctgcggttcaagaagatcaaacctgaagccttcgaagccaacagattctacaccgtgatcaacaaaaagagcggcgagatcgtgcccatggaggtgaacttcaacttcgacgaccccaacctgatcatcctgcctctggcctttggcaagagacagggcagagaattcatctggaacgacctgctgtccctggaaaccggcagcctgaagctggccaacggaagagtgatcgagaagacactgtacaacagaagaacccggcaggatgagcctgccctgttcgtggccctgaccttcgagcggcgggaggtcctggactcctccaatatcaaaccaatgaacctgatcggcgtggcaagaggcgaaaacatccccgccgtgatcgccctgaccgaccccgagggctgcccactgagccggtttaaggatagcctgggaaacccaacccacatcctgagaatcggcgagagctataaggagaagcagcggaccatccaggccaagaaggaggtggagcagcggagagccggcggctacagccggaagtacgccagcaaagccaagaatctggcagacgatatggtgagaaacaccgctagagatctgctgtactacgccgtgacccaggatgccatgctgatcttcgccaacctgagccggggcttcggccggcagggcaagcggaccttcatggccgagagacagtacacacggatggaggactggctgaccgccaagctggcctacgagggcctgagcaagacctacctgtccaagacactggcccagtacacctccaagacatgcagcaactgtgggtttaccatcaccagcgccgactacgacagggtgctggagaagctgaagaagacagcaacaggctggatgaccacaattaacggcaaggagctgaaggtggagggccagattacctactacaacagatacaagagacagaacgtagtcaaggacctgtccgtcgagctggatagactgagcgaagaatctgtgaacaacgacatctcctcctggacaaagggcagaagcggagaagctctgagcctcctgaagaaaagattctcccatagacccgtgcaggagaagttcgtgtgcctgaactgcggcttcgagacacacgcagccgagcaagccgccctgaacatcgccagatcctggctgttcctgcggagccaggagtacaagaaataccagacaaacaagacaaccggcaacaccgataagagagccttcgtcgagacctggcagtccttttaccggaagaagcttaaggaggtgtggaaacctgccgtgcggtctggcggatctggcggaggctcctagcaaggcccccatcaccttcggcgacctggccatctacttcagccaggaggagtgggagtggctgagccccatccagaaggacctgtacgaggacgtgatgctggagaactacaggaacctggtgagcctgggcctgagcttcaggaggcccaacgtgatcaccctgctggagaagggcaaggccccctggatgatcgagcccgtgaggaggaggagggcccccgacagcggcagcaagtgcggatctggctccggcagcggccccaagaaaaagagaaaagtctaagctgccttctgcggggcttgccttctggccatgcccttcttctctcccttgcacctgtacctcttggtctttgaataaagcctgagtaggaaggctagcaaaaaaaaaaaaaaaaaaaaaaaaaaaaaaaaaaaaaaaaaaaaaaaaaaaaaaaaaaaaaaaaaaaaaaaaaaaaaaaa

SEQ ID NO: 15350 - RNA, 9485 nt, synthetic construct
  source 1..9485: mol_type = other RNA
aggaaataagagagaaaagaagagtaagaagaaatataagagccaccatggcccctaagaagaagcgtaaagtgagccggatggaacgcctcgtctacgaggtgcggcagaagtgcagaaacatcgaggacatctgcatctcctgcggatctctgaacgtgaccctggagcacccactgttcatcggcggcatgtgccagaactgtaaaaactgttttctggagtgtgcctatcaatacgacgatgacggctaccagagctactgcaccatctgttgcggcggaagagaggtgctgatgtgtggaaataacaactgctgccggtgcttctgcgtggaatgcgtggacctgctggtgggccccggcgccgcccaggccgctattaaggaagatccttggaactgctacatgtgcggccacaagggcacatacggcctgctgagacggagagaggactggcctagcagactgcagatgttcttcgccaataaccacgaccaggagttcgacccccctaaggtgtaccctcccgtccccgccgagaagagaaagcccatccgggtcctgagcctgttcgatggcatcgccaccggtctgctggtgctgaaggacctgggcatccaggtggataggtacattgcctccgaggtgtgcgaggactccatcaccgtgggaatggtgcgtcatcagggcaagatcatgtacgtgggcgacgtgcggagcgtgacacagaagcatatccaggagtggggccctttcgacctggtgatcggcggcagcccttgcaatgacctgagcatcgtgaacccagcccggaagggcctgtacgagggaaccggcagactgttcttcgagttttacagactgctgcacgacgcccggcctaaggaaggcgacgaccggcccttcttttggctgttcgagaatgtggtggccatgggagtcagcgacaagcgggatattagccggttcctggagagcaaccccgtgatgatcgatgccaaggaagtgagcgccgcccaccgggccagatacttctggggcaatctgcctggcatgaacagacccctggccagcaccgtgaacgacaagctggagctgcaggagtgcctggagcacggccggatcgccaagttcagcaaggtgagaaccatcaccacccgaagcaacagcatcaaacaaggcaaggaccagcactttcctgtgttcatgaacgagaaggaggacatcctgtggtgtaccgagatggagagagtgttcgggttcccagtccactacacagatgtcagcaacatgtctagactggccagacagagactgctgggaagaagctggtccgtccctgtgatcagacacctgttcgcccctctgaaggagtacttcgcctgcgtgagcagcggcaacagcaacgccaacagccggggccccagcttctctagcggcctggtgccactgtccctgagagggagccacatgggccccatggagatctacaaaaccgtgagcgcctggaagcggcagcctgtgcgcgtgctgagcctgtttcggaatatcgataaagtcctgaaaagcctgggattcctggagagcggctctggctccggcggtggcaccctgaagtacgtggaggatgtgacaaacgtggtcagacgggatgtggagaagtggggccccttcgatctggtgtacggcagcacccaacccctgggcagctcttgtgaccggtgccctggctggtacatgtttcagttccaccggatcctgcagtacgccctgccgagacaggagtcccagcggccattcttttggattttcatggacaacttgctgctgaccgaggatgaccaggaaactaccactcggttcctgcagaccgaagccgtgaccctgcaggacgtgagaggccgggactaccagaacgccatgcgggtgtggtccaacatccctggactgaaaagcaagcacgcacctctgacccctaaagaagaggagtacctgcaggcccaggtgcggagcagaagcaagctggacgcccctaaggtggatctgctggtgaagaattgcctcctgcccctgagagagtacttcaagtatttcagccagaatagtctgcccctgggaggcagcggcggcggcgccctggtgacatttgaggacgtcgccgtgcggttcacccaggaggaatgggctctgctggatccttctcagaaaatcctgtaccgggacgtgatgagagagacataccggaatctgacctccgtgggcatcaactgggaatgttgggaccttgaagcctgcttcagaagcctgggaagaaacctgagagtgcaggtggtgaagagaaagtgcgagctgaccaacagcggcccctgcgccgagggcggcccaagcagcggcgcccctcctcccagcggcggcagcccagccggctccccaacctctaccgaggagggcacctctgagtccgccacccccgagagcggccctggcacctccaccgagcccagcgagggcagcgcacccggcagccctgccggcagccccacctccacagaggagggaaccagcaccgagcccagcgaaggcagcgccccaggcaccagcaccgagcctagtgagcaggagattaaacggatcaacaagatcagaagaagacttgtgaaagacagcaacaccaagaaggccggcaagacaggccccatgaaaaccctgctggttagagtgatgacacccgatctgagagagcggctggaaaacctgagaaagaagcctgaaaatatcccccagcccatcagcaatacatctagagccaacctgaataagctgctgaccgattacaccgaaatgaagaaggcgatcctgcatgtgtactgggaagagttccagaaggaccctgtgggcctgatgagccgggtggcccagcctgccagcaagaagatcgatcagaacaagctgaaacctgagatggacgagaagggcaacctgaccaccgccggctttgcctgctctcagtgtggccagcccctgttcgtgtacaagctggagcaggtgtctgagaagggcaaggcttacaccaactacttcggacggtgcaatgtggccgagcacgaaaagctgatcctgctggcccagctgaagcccgagaaggatagcgacgaagccgtgacatatagcctgggaaagtttgggcagagggccctggatttctacagcattcatgtgaccaaggagtccacccaccccgtgaagcccctggcccagatcgccggaaacagatacgcctccggacctgtgggaaaggccctgagcgacgcatgtatgggcacaatcgcctccttcctgtctaagtaccaggacatcatcatcgaacaccagaaggtggtgaagggcaaccagaagagactggagagcctgcgggagctggccggcaaggaaaacctggaataccctagcgtgaccctgccacctcagcctcacaccaaggagggcgttgatgcctacaacgaagtgatcgcccgggtgcgaatgtgggtgaacctgaacctgtggcagaagctgaagctaagcagagatgatgccaagcctctgctgagactgaagggattcccttcctttcctctggtcgagagacaggccaacgaagtggactggtgggacatggtgtgtaacgtgaagaagctgatcaacgagaaaaaggaggatggcaaggtgttttggcagaatctggctggctacaagagacaggaagccctgagaccatacctgagcagcgaggaagatcggaagaagggaaagaaattcgctcggtaccagctgggcgacctgctgctgcacctggaaaagaagcacggcgaggactggggaaaggtgtacgacgaggcctgggagcggattgacaagaaagtggaaggcctgagcaagcacatcaagctggaagaggaacggagaagcgaggacgcccagagcaaggccgccctgaccgactggctgcgggctaaggccagcttcgtgatcgagggcctgaaggaggccgacaaggacgagttctgcagatgcgagctgaagctgcagaagtggtacggggacctgcggggaaagcccttcgccatcgaagccgagaacagcatcctggacatcagcggcttcagcaagcagtacaactgtgccttcatctggcagaaggacggcgtgaagaagctgaacctgtacctgatcatcaactacttcaagggcggcaagctgcggttcaagaagatcaaacctgaagccttcgaagccaacagattctacaccgtgatcaacaaaaagagcggcgagatcgtgcccatggaggtgaacttcaacttcgacgaccccaacctgatcatcctgcctctggcctttggcaagagacagggcagagaattcatctggaacgacctgctgtccctggaaaccggcagcctgaagctggccaacggaagagtgatcgagaagacactgtacaacagaagaacccggcaggatgagcctgccctgttcgtggccctgaccttcgagcggcgggaggtcctggactcctccaatatcaaaccaatgaacctgatcggcgtggcaagaggcgaaaacatccccgccgtgatcgccctgaccgaccccgagggctgcccactgagccggtttaaggatagcctgggaaacccaacccacatcctgagaatcggcgagagctataaggagaagcagcggaccatccaggccaagaaggaggtggagcagcggagagccggcggctacagccggaagtacgccagcaaagccaagaatctggcagacgatatggtgagaaacaccgctagagatctgctgtactacgccgtgacccaggatgccatgctgatcttcgccaacctgagccggggcttcggccggcagggcaagcggaccttcatggccgagagacagtacacacggatggaggactggctgaccgccaagctggcctacgagggcctgagcaagacctacctgtccaagacactggcccagtacacctccaagacatgcagcaactgtgggtttaccatcaccagcgccgactacgacagggtgctggagaagctgaagaagacagcaacaggctggatgaccacaattaacggcaaggagctgaaggtggagggccagattacctactacaacagatacaagagacagaacgtagtcaaggacctgtccgtcgagctggatagactgagcgaagaatctgtgaacaacgacatctcctcctggacaaagggcagaagcggagaagctctgagcctcctgaagaaaagattctcccatagacccgtgcaggagaagttcgtgtgcctgaactgcggcttcgagacacacgcagccgagcaagccgccctgaacatcgccagatcctggctgttcctgcggagccaggagtacaagaaataccagacaaacaagacaaccggcaacaccgataagagagccttcgtcgagacctggcagtccttttaccggaagaagcttaaggaggtgtggaaacctgccgtgcggtctggcggatctggcggaggctccatggcccacaggagcgtgatgttcagcgacatcagcatcgacttcagccccgaggagtgggagtacctggacctggagcagaaggacctgtacagggacgtgatgctggagaactacagcaacctggtgagcctgggctgcttcatcagcaagcccgacgtgatcagcctgctggagcagggcaaggagccctggaaggtggtgaggaagaggaggaggcagtaccccgacctggagaccaagggcggcccaagcagcggcgcccctcctcccagcggcggcagcccagccggctccccaacctctaccgaggagggcacctctgagtccgccacccccgagagcggccctggcacctccaccgagcccagcgagggcagcgcacccggcagccctgccggcagccccacctccacagaggagggaaccagcaccgagcccagcgaaggcagcgccccaggcaccagcaccgagcctagtgagcaggagattaaacggatcaacaagatcagaagaagacttgtgaaagacagcaacaccaagaaggccggcaagacaggccccatgaaaaccctgctggttagagtgatgacacccgatctgagagagcggctggaaaacctgagaaagaagcctgaaaatatcccccagcccatcagcaatacatctagagccaacctgaataagctgctgaccgattacaccgaaatgaagaaggcgatcctgcatgtgtactgggaagagttccagaaggaccctgtgggcctgatgagccgggtggcccagcctgccagcaagaagatcgatcagaacaagctgaaacctgagatggacgagaagggcaacctgaccaccgccggctttgcctgctctcagtgtggccagcccctgttcgtgtacaagctggagcaggtgtctgagaagggcaaggcttacaccaactacttcggacggtgcaatgtggccgagcacgaaaagctgatcctgctggcccagctgaagcccgagaaggatagcgacgaagccgtgacatatagcctgggaaagtttgggcagagggccctggatttctacagcattcatgtgaccaaggagtccacccaccccgtgaagcccctggcccagatcgccggaaacagatacgcctccggacctgtgggaaaggccctgagcgacgcatgtatgggcacaatcgcctccttcctgtctaagtaccaggacatcatcatcgaacaccagaaggtggtgaagggcaaccagaagagactggagagcctgcgggagctggccggcaaggaaaacctggaataccctagcgtgaccctgccacctcagcctcacaccaaggagggcgttgatgcctacaacgaagtgatcgcccgggtgcgaatgtgggtgaacctgaacctgtggcagaagctgaagctaagcagagatgatgccaagcctctgctgagactgaagggattcccttcctttcctctggtcgagagacaggccaacgaagtggactggtgggacatggtgtgtaacgtgaagaagctgatcaacgagaaaaaggaggatggcaaggtgttttggcagaatctggctggctacaagagacaggaagccctgagaccatacctgagcagcgaggaagatcggaagaagggaaagaaattcgctcggtaccagctgggcgacctgctgctgcacctggaaaagaagcacggcgaggactggggaaaggtgtacgacgaggcctgggagcggattgacaagaaagtggaaggcctgagcaagcacatcaagctggaagaggaacggagaagcgaggacgcccagagcaaggccgccctgaccgactggctgcgggctaaggccagcttcgtgatcgagggcctgaaggaggccgacaaggacgagttctgcagatgcgagctgaagctgcagaagtggtacggggacctgcggggaaagcccttcgccatcgaagccgagaacagcatcctggacatcagcggcttcagcaagcagtacaactgtgccttcatctggcagaaggacggcgtgaagaagctgaacctgtacctgatcatcaactacttcaagggcggcaagctgcggttcaagaagatcaaacctgaagccttcgaagccaacagattctacaccgtgatcaacaaaaagagcggcgagatcgtgcccatggaggtgaacttcaacttcgacgaccccaacctgatcatcctgcctctggcctttggcaagagacagggcagagaattcatctggaacgacctgctgtccctggaaaccggcagcctgaagctggccaacggaagagtgatcgagaagacactgtacaacagaagaacccggcaggatgagcctgccctgttcgtggccctgaccttcgagcggcgggaggtcctggactcctccaatatcaaaccaatgaacctgatcggcgtggcaagaggcgaaaacatccccgccgtgatcgccctgaccgaccccgagggctgcccactgagccggtttaaggatagcctgggaaacccaacccacatcctgagaatcggcgagagctataaggagaagcagcggaccatccaggccaagaaggaggtggagcagcggagagccggcggctacagccggaagtacgccagcaaagccaagaatctggcagacgatatggtgagaaacaccgctagagatctgctgtactacgccgtgacccaggatgccatgctgatcttcgccaacctgagccggggcttcggccggcagggcaagcggaccttcatggccgagagacagtacacacggatggaggactggctgaccgccaagctggcctacgagggcctgagcaagacctacctgtccaagacactggcccagtacacctccaagacatgcagcaactgtgggtttaccatcaccagcgccgactacgacagggtgctggagaagctgaagaagacagcaacaggctggatgaccacaattaacggcaaggagctgaaggtggagggccagattacctactacaacagatacaagagacagaacgtagtcaaggacctgtccgtcgagctggatagactgagcgaagaatctgtgaacaacgacatctcctcctggacaaagggcagaagcggagaagctctgagcctcctgaagaaaagattctcccatagacccgtgcaggagaagttcgtgtgcctgaactgcggcttcgagacacacgcagccgagcaagccgccctgaacatcgccagatcctggctgttcctgcggagccaggagtacaagaaataccagacaaacaagacaaccggcaacaccgataagagagccttcgtcgagacctggcagtccttttaccggaagaagcttaaggaggtgtggaaacctgccgtgcggtctggcggatctggcggaggctcctatggcccacaggagcgtgatgttcagcgacatcagcatcgacttcagccccgaggagtgggagtacctggacctggagcagaaggacctgtacagggacgtgatgctggagaactacagcaacctggtgagcctgggctgcttcatcagcaagcccgacgtgatcagcctgctggagcagggcaaggagccctggaaggtggtgaggaagaggaggaggcagtaccccgacctggagaccaagggatctggctccggcagcggccccaagaaaaagagaaaagtctaagctgccttctgcggggcttgccttctggccatgcccttcttctctcccttgcacctgtacctcttggtctttgaataaagcctgagtaggaaggctagcaaaaaaaaaaaaaaaaaaaaaaaaaaaaaaaaaaaaaaaaaaaaaaaaaaaaaaaaaaaaaaaaaaaaaaaaaaaaaaaa

SEQ ID NO: 15351 - RNA, 9485 nt, synthetic construct
  source 1..9485: mol_type = other RNA
aggaaataagagagaaaagaagagtaagaagaaatataagagccaccatggcccctaagaagaagcgtaaagtgagccggatggaacgcctcgtctacgaggtgcggcagaagtgcagaaacatcgaggacatctgcatctcctgcggatctctgaacgtgaccctggagcacccactgttcatcggcggcatgtgccagaactgtaaaaactgttttctggagtgtgcctatcaatacgacgatgacggctaccagagctactgcaccatctgttgcggcggaagagaggtgctgatgtgtggaaataacaactgctgccggtgcttctgcgtggaatgcgtggacctgctggtgggccccggcgccgcccaggccgctattaaggaagatccttggaactgctacatgtgcggccacaagggcacatacggcctgctgagacggagagaggactggcctagcagactgcagatgttcttcgccaataaccacgaccaggagttcgacccccctaaggtgtaccctcccgtccccgccgagaagagaaagcccatccgggtcctgagcctgttcgatggcatcgccaccggtctgctggtgctgaaggacctgggcatccaggtggataggtacattgcctccgaggtgtgcgaggactccatcaccgtgggaatggtgcgtcatcagggcaagatcatgtacgtgggcgacgtgcggagcgtgacacagaagcatatccaggagtggggccctttcgacctggtgatcggcggcagcccttgcaatgacctgagcatcgtgaacccagcccggaagggcctgtacgagggaaccggcagactgttcttcgagttttacagactgctgcacgacgcccggcctaaggaaggcgacgaccggcccttcttttggctgttcgagaatgtggtggccatgggagtcagcgacaagcgggatattagccggttcctggagagcaaccccgtgatgatcgatgccaaggaagtgagcgccgcccaccgggccagatacttctggggcaatctgcctggcatgaacagacccctggccagcaccgtgaacgacaagctggagctgcaggagtgcctggagcacggccggatcgccaagttcagcaaggtgagaaccatcaccacccgaagcaacagcatcaaacaaggcaaggaccagcactttcctgtgttcatgaacgagaaggaggacatcctgtggtgtaccgagatggagagagtgttcgggttcccagtccactacacagatgtcagcaacatgtctagactggccagacagagactgctgggaagaagctggtccgtccctgtgatcagacacctgttcgcccctctgaaggagtacttcgcctgcgtgagcagcggcaacagcaacgccaacagccggggccccagcttctctagcggcctggtgccactgtccctgagagggagccacatgggccccatggagatctacaaaaccgtgagcgcctggaagcggcagcctgtgcgcgtgctgagcctgtttcggaatatcgataaagtcctgaaaagcctgggattcctggagagcggctctggctccggcggtggcaccctgaagtacgtggaggatgtgacaaacgtggtcagacgggatgtggagaagtggggccccttcgatctggtgtacggcagcacccaacccctgggcagctcttgtgaccggtgccctggctggtacatgtttcagttccaccggatcctgcagtacgccctgccgagacaggagtcccagcggccattcttttggattttcatggacaacttgctgctgaccgaggatgaccaggaaactaccactcggttcctgcagaccgaagccgtgaccctgcaggacgtgagaggccgggactaccagaacgccatgcgggtgtggtccaacatccctggactgaaaagcaagcacgcacctctgacccctaaagaagaggagtacctgcaggcccaggtgcggagcagaagcaagctggacgcccctaaggtggatctgctggtgaagaattgcctcctgcccctgagagagtacttcaagtatttcagccagaatagtctgcccctgggaggcagcggcggcggcgccctggtgacatttgaggacgtcgccgtgcggttcacccaggaggaatgggctctgctggatccttctcagaaaatcctgtaccgggacgtgatgagagagacataccggaatctgacctccgtgggcatcaactgggaatgttgggaccttgaagcctgcttcagaagcctgggaagaaacctgagagtgcaggtggtgaagagaaagtgcgagctgaccaacagcggcccctgcgccgagggcggcccaagcagcggcgcccctcctcccagcggcggcagcccagccggctccccaacctctaccgaggagggcacctctgagtccgccacccccgagagcggccctggcacctccaccgagcccagcgagggcagcgcacccggcagccctgccggcagccccacctccacagaggagggaaccagcaccgagcccagcgaaggcagcgccccaggcaccagcaccgagcctagtgagcaggagattaaacggatcaacaagatcagaagaagacttgtgaaagacagcaacaccaagaaggccggcaagacaggccccatgaaaaccctgctggttagagtgatgacacccgatctgagagagcggctggaaaacctgagaaagaagcctgaaaatatcccccagcccatcagcaatacatctagagccaacctgaataagctgctgaccgattacaccgaaatgaagaaggcgatcctgcatgtgtactgggaagagttccagaaggaccctgtgggcctgatgagccgggtggcccagcctgccagcaagaagatcgatcagaacaagctgaaacctgagatggacgagaagggcaacctgaccaccgccggctttgcctgctctcagtgtggccagcccctgttcgtgtacaagctggagcaggtgtctgagaagggcaaggcttacaccaactacttcggacggtgcaatgtggccgagcacgaaaagctgatcctgctggcccagctgaagcccgagaaggatagcgacgaagccgtgacatatagcctgggaaagtttgggcagagggccctggatttctacagcattcatgtgaccaaggagtccacccaccccgtgaagcccctggcccagatcgccggaaacagatacgcctccggacctgtgggaaaggccctgagcgacgcatgtatgggcacaatcgcctccttcctgtctaagtaccaggacatcatcatcgaacaccagaaggtggtgaagggcaaccagaagagactggagagcctgcgggagctggccggcaaggaaaacctggaataccctagcgtgaccctgccacctcagcctcacaccaaggagggcgttgatgcctacaacgaagtgatcgcccgggtgcgaatgtgggtgaacctgaacctgtggcagaagctgaagctaagcagagatgatgccaagcctctgctgagactgaagggattcccttcctttcctctggtcgagagacaggccaacgaagtggactggtgggacatggtgtgtaacgtgaagaagctgatcaacgagaaaaaggaggatggcaaggtgttttggcagaatctggctggctacaagagacaggaagccctgagaccatacctgagcagcgaggaagatcggaagaagggaaagaaattcgctcggtaccagctgggcgacctgctgctgcacctggaaaagaagcacggcgaggactggggaaaggtgtacgacgaggcctgggagcggattgacaagaaagtggaaggcctgagcaagcacatcaagctggaagaggaacggagaagcgaggacgcccagagcaaggccgccctgaccgactggctgcgggctaaggccagcttcgtgatcgagggcctgaaggaggccgacaaggacgagttctgcagatgcgagctgaagctgcagaagtggtacggggacctgcggggaaagcccttcgccatcgaagccgagaacagcatcctggacatcagcggcttcagcaagcagtacaactgtgccttcatctggcagaaggacggcgtgaagaagctgaacctgtacctgatcatcaactacttcaagggcggcaagctgcggttcaagaagatcaaacctgaagccttcgaagccaacagattctacaccgtgatcaacaaaaagagcggcgagatcgtgcccatggaggtgaacttcaacttcgacgaccccaacctgatcatcctgcctctggcctttggcaagagacagggcagagaattcatctggaacgacctgctgtccctggaaaccggcagcctgaagctggccaacggaagagtgatcgagaagacactgtacaacagaagaacccggcaggatgagcctgccctgttcgtggccctgaccttcgagcggcgggaggtcctggactcctccaatatcaaaccaatgaacctgatcggcgtggcaagaggcgaaaacatccccgccgtgatcgccctgaccgaccccgagggctgcccactgagccggtttaaggatagcctgggaaacccaacccacatcctgagaatcggcgagagctataaggagaagcagcggaccatccaggccaagaaggaggtggagcagcggagagccggcggctacagccggaagtacgccagcaaagccaagaatctggcagacgatatggtgagaaacaccgctagagatctgctgtactacgccgtgacccaggatgccatgctgatcttcgccaacctgagccggggcttcggccggcagggcaagcggaccttcatggccgagagacagtacacacggatggaggactggctgaccgccaagctggcctacgagggcctgagcaagacctacctgtccaagacactggcccagtacacctccaagacatgcagcaactgtgggtttaccatcaccagcgccgactacgacagggtgctggagaagctgaagaagacagcaacaggctggatgaccacaattaacggcaaggagctgaaggtggagggccagattacctactacaacagatacaagagacagaacgtagtcaaggacctgtccgtcgagctggatagactgagcgaagaatctgtgaacaacgacatctcctcctggacaaagggcagaagcggagaagctctgagcctcctgaagaaaagattctcccatagacccgtgcaggagaagttcgtgtgcctgaactgcggcttcgagacacacgcagccgagcaagccgccctgaacatcgccagatcctggctgttcctgcggagccaggagtacaagaaataccagacaaacaagacaaccggcaacaccgataagagagccttcgtcgagacctggcagtccttttaccggaagaagcttaaggaggtgtggaaacctgccgtgcggtctggcggatctggcggaggctccagcaggagccccctgaccttcggcgacgtggccgtggagttcagcggcgaggagtgggccaggctggacagcgcccagaggagcctgcacaggagcgtgatgctggagaactacaggaacctggccagcctgggcctgtgcatgagcaagcccgagatgatcagcagcctggagcagaggaaggagccctgggccgtgaagaggaagagcaccaggggcaggtgccccgacagccagaccgccggcggcccaagcagcggcgcccctcctcccagcggcggcagcccagccggctccccaacctctaccgaggagggcacctctgagtccgccacccccgagagcggccctggcacctccaccgagcccagcgagggcagcgcacccggcagccctgccggcagccccacctccacagaggagggaaccagcaccgagcccagcgaaggcagcgccccaggcaccagcaccgagcctagtgagcaggagattaaacggatcaacaagatcagaagaagacttgtgaaagacagcaacaccaagaaggccggcaagacaggccccatgaaaaccctgctggttagagtgatgacacccgatctgagagagcggctggaaaacctgagaaagaagcctgaaaatatcccccagcccatcagcaatacatctagagccaacctgaataagctgctgaccgattacaccgaaatgaagaaggcgatcctgcatgtgtactgggaagagttccagaaggaccctgtgggcctgatgagccgggtggcccagcctgccagcaagaagatcgatcagaacaagctgaaacctgagatggacgagaagggcaacctgaccaccgccggctttgcctgctctcagtgtggccagcccctgttcgtgtacaagctggagcaggtgtctgagaagggcaaggcttacaccaactacttcggacggtgcaatgtggccgagcacgaaaagctgatcctgctggcccagctgaagcccgagaaggatagcgacgaagccgtgacatatagcctgggaaagtttgggcagagggccctggatttctacagcattcatgtgaccaaggagtccacccaccccgtgaagcccctggcccagatcgccggaaacagatacgcctccggacctgtgggaaaggccctgagcgacgcatgtatgggcacaatcgcctccttcctgtctaagtaccaggacatcatcatcgaacaccagaaggtggtgaagggcaaccagaagagactggagagcctgcgggagctggccggcaaggaaaacctggaataccctagcgtgaccctgccacctcagcctcacaccaaggagggcgttgatgcctacaacgaagtgatcgcccgggtgcgaatgtgggtgaacctgaacctgtggcagaagctgaagctaagcagagatgatgccaagcctctgctgagactgaagggattcccttcctttcctctggtcgagagacaggccaacgaagtggactggtgggacatggtgtgtaacgtgaagaagctgatcaacgagaaaaaggaggatggcaaggtgttttggcagaatctggctggctacaagagacaggaagccctgagaccatacctgagcagcgaggaagatcggaagaagggaaagaaattcgctcggtaccagctgggcgacctgctgctgcacctggaaaagaagcacggcgaggactggggaaaggtgtacgacgaggcctgggagcggattgacaagaaagtggaaggcctgagcaagcacatcaagctggaagaggaacggagaagcgaggacgcccagagcaaggccgccctgaccgactggctgcgggctaaggccagcttcgtgatcgagggcctgaaggaggccgacaaggacgagttctgcagatgcgagctgaagctgcagaagtggtacggggacctgcggggaaagcccttcgccatcgaagccgagaacagcatcctggacatcagcggcttcagcaagcagtacaactgtgccttcatctggcagaaggacggcgtgaagaagctgaacctgtacctgatcatcaactacttcaagggcggcaagctgcggttcaagaagatcaaacctgaagccttcgaagccaacagattctacaccgtgatcaacaaaaagagcggcgagatcgtgcccatggaggtgaacttcaacttcgacgaccccaacctgatcatcctgcctctggcctttggcaagagacagggcagagaattcatctggaacgacctgctgtccctggaaaccggcagcctgaagctggccaacggaagagtgatcgagaagacactgtacaacagaagaacccggcaggatgagcctgccctgttcgtggccctgaccttcgagcggcgggaggtcctggactcctccaatatcaaaccaatgaacctgatcggcgtggcaagaggcgaaaacatccccgccgtgatcgccctgaccgaccccgagggctgcccactgagccggtttaaggatagcctgggaaacccaacccacatcctgagaatcggcgagagctataaggagaagcagcggaccatccaggccaagaaggaggtggagcagcggagagccggcggctacagccggaagtacgccagcaaagccaagaatctggcagacgatatggtgagaaacaccgctagagatctgctgtactacgccgtgacccaggatgccatgctgatcttcgccaacctgagccggggcttcggccggcagggcaagcggaccttcatggccgagagacagtacacacggatggaggactggctgaccgccaagctggcctacgagggcctgagcaagacctacctgtccaagacactggcccagtacacctccaagacatgcagcaactgtgggtttaccatcaccagcgccgactacgacagggtgctggagaagctgaagaagacagcaacaggctggatgaccacaattaacggcaaggagctgaaggtggagggccagattacctactacaacagatacaagagacagaacgtagtcaaggacctgtccgtcgagctggatagactgagcgaagaatctgtgaacaacgacatctcctcctggacaaagggcagaagcggagaagctctgagcctcctgaagaaaagattctcccatagacccgtgcaggagaagttcgtgtgcctgaactgcggcttcgagacacacgcagccgagcaagccgccctgaacatcgccagatcctggctgttcctgcggagccaggagtacaagaaataccagacaaacaagacaaccggcaacaccgataagagagccttcgtcgagacctggcagtccttttaccggaagaagcttaaggaggtgtggaaacctgccgtgcggtctggcggatctggcggaggctcctagcaggagccccctgaccttcggcgacgtggccgtggagttcagcggcgaggagtgggccaggctggacagcgcccagaggagcctgcacaggagcgtgatgctggagaactacaggaacctggccagcctgggcctgtgcatgagcaagcccgagatgatcagcagcctggagcagaggaaggagccctgggccgtgaagaggaagagcaccaggggcaggtgccccgacagccagaccgccggatctggctccggcagcggccccaagaaaaagagaaaagtctaagctgccttctgcggggcttgccttctggccatgcccttcttctctcccttgcacctgtacctcttggtctttgaataaagcctgagtaggaaggctagcaaaaaaaaaaaaaaaaaaaaaaaaaaaaaaaaaaaaaaaaaaaaaaaaaaaaaaaaaaaaaaaaaaaaaaaaaaaaaaaa

SEQ ID NO: 15352 - RNA, 9503 nt, synthetic construct
  source 1..9503: mol_type = other RNA
aggaaataagagagaaaagaagagtaagaagaaatataagagccaccatggcccctaagaagaagcgtaaagtgagccggatggaacgcctcgtctacgaggtgcggcagaagtgcagaaacatcgaggacatctgcatctcctgcggatctctgaacgtgaccctggagcacccactgttcatcggcggcatgtgccagaactgtaaaaactgttttctggagtgtgcctatcaatacgacgatgacggctaccagagctactgcaccatctgttgcggcggaagagaggtgctgatgtgtggaaataacaactgctgccggtgcttctgcgtggaatgcgtggacctgctggtgggccccggcgccgcccaggccgctattaaggaagatccttggaactgctacatgtgcggccacaagggcacatacggcctgctgagacggagagaggactggcctagcagactgcagatgttcttcgccaataaccacgaccaggagttcgacccccctaaggtgtaccctcccgtccccgccgagaagagaaagcccatccgggtcctgagcctgttcgatggcatcgccaccggtctgctggtgctgaaggacctgggcatccaggtggataggtacattgcctccgaggtgtgcgaggactccatcaccgtgggaatggtgcgtcatcagggcaagatcatgtacgtgggcgacgtgcggagcgtgacacagaagcatatccaggagtggggccctttcgacctggtgatcggcggcagcccttgcaatgacctgagcatcgtgaacccagcccggaagggcctgtacgagggaaccggcagactgttcttcgagttttacagactgctgcacgacgcccggcctaaggaaggcgacgaccggcccttcttttggctgttcgagaatgtggtggccatgggagtcagcgacaagcgggatattagccggttcctggagagcaaccccgtgatgatcgatgccaaggaagtgagcgccgcccaccgggccagatacttctggggcaatctgcctggcatgaacagacccctggccagcaccgtgaacgacaagctggagctgcaggagtgcctggagcacggccggatcgccaagttcagcaaggtgagaaccatcaccacccgaagcaacagcatcaaacaaggcaaggaccagcactttcctgtgttcatgaacgagaaggaggacatcctgtggtgtaccgagatggagagagtgttcgggttcccagtccactacacagatgtcagcaacatgtctagactggccagacagagactgctgggaagaagctggtccgtccctgtgatcagacacctgttcgcccctctgaaggagtacttcgcctgcgtgagcagcggcaacagcaacgccaacagccggggccccagcttctctagcggcctggtgccactgtccctgagagggagccacatgggccccatggagatctacaaaaccgtgagcgcctggaagcggcagcctgtgcgcgtgctgagcctgtttcggaatatcgataaagtcctgaaaagcctgggattcctggagagcggctctggctccggcggtggcaccctgaagtacgtggaggatgtgacaaacgtggtcagacgggatgtggagaagtggggccccttcgatctggtgtacggcagcacccaacccctgggcagctcttgtgaccggtgccctggctggtacatgtttcagttccaccggatcctgcagtacgccctgccgagacaggagtcccagcggccattcttttggattttcatggacaacttgctgctgaccgaggatgaccaggaaactaccactcggttcctgcagaccgaagccgtgaccctgcaggacgtgagaggccgggactaccagaacgccatgcgggtgtggtccaacatccctggactgaaaagcaagcacgcacctctgacccctaaagaagaggagtacctgcaggcccaggtgcggagcagaagcaagctggacgcccctaaggtggatctgctggtgaagaattgcctcctgcccctgagagagtacttcaagtatttcagccagaatagtctgcccctgggaggcagcggcggcggcgccctggtgacatttgaggacgtcgccgtgcggttcacccaggaggaatgggctctgctggatccttctcagaaaatcctgtaccgggacgtgatgagagagacataccggaatctgacctccgtgggcatcaactgggaatgttgggaccttgaagcctgcttcagaagcctgggaagaaacctgagagtgcaggtggtgaagagaaagtgcgagctgaccaacagcggcccctgcgccgagggcggcccaagcagcggcgcccctcctcccagcggcggcagcccagccggctccccaacctctaccgaggagggcacctctgagtccgccacccccgagagcggccctggcacctccaccgagcccagcgagggcagcgcacccggcagccctgccggcagccccacctccacagaggagggaaccagcaccgagcccagcgaaggcagcgccccaggcaccagcaccgagcctagtgagcaggagattaaacggatcaacaagatcagaagaagacttgtgaaagacagcaacaccaagaaggccggcaagacaggccccatgaaaaccctgctggttagagtgatgacacccgatctgagagagcggctggaaaacctgagaaagaagcctgaaaatatcccccagcccatcagcaatacatctagagccaacctgaataagctgctgaccgattacaccgaaatgaagaaggcgatcctgcatgtgtactgggaagagttccagaaggaccctgtgggcctgatgagccgggtggcccagcctgccagcaagaagatcgatcagaacaagctgaaacctgagatggacgagaagggcaacctgaccaccgccggctttgcctgctctcagtgtggccagcccctgttcgtgtacaagctggagcaggtgtctgagaagggcaaggcttacaccaactacttcggacggtgcaatgtggccgagcacgaaaagctgatcctgctggcccagctgaagcccgagaaggatagcgacgaagccgtgacatatagcctgggaaagtttgggcagagggccctggatttctacagcattcatgtgaccaaggagtccacccaccccgtgaagcccctggcccagatcgccggaaacagatacgcctccggacctgtgggaaaggccctgagcgacgcatgtatgggcacaatcgcctccttcctgtctaagtaccaggacatcatcatcgaacaccagaaggtggtgaagggcaaccagaagagactggagagcctgcgggagctggccggcaaggaaaacctggaataccctagcgtgaccctgccacctcagcctcacaccaaggagggcgttgatgcctacaacgaagtgatcgcccgggtgcgaatgtgggtgaacctgaacctgtggcagaagctgaagctaagcagagatgatgccaagcctctgctgagactgaagggattcccttcctttcctctggtcgagagacaggccaacgaagtggactggtgggacatggtgtgtaacgtgaagaagctgatcaacgagaaaaaggaggatggcaaggtgttttggcagaatctggctggctacaagagacaggaagccctgagaccatacctgagcagcgaggaagatcggaagaagggaaagaaattcgctcggtaccagctgggcgacctgctgctgcacctggaaaagaagcacggcgaggactggggaaaggtgtacgacgaggcctgggagcggattgacaagaaagtggaaggcctgagcaagcacatcaagctggaagaggaacggagaagcgaggacgcccagagcaaggccgccctgaccgactggctgcgggctaaggccagcttcgtgatcgagggcctgaaggaggccgacaaggacgagttctgcagatgcgagctgaagctgcagaagtggtacggggacctgcggggaaagcccttcgccatcgaagccgagaacagcatcctggacatcagcggcttcagcaagcagtacaactgtgccttcatctggcagaaggacggcgtgaagaagctgaacctgtacctgatcatcaactacttcaagggcggcaagctgcggttcaagaagatcaaacctgaagccttcgaagccaacagattctacaccgtgatcaacaaaaagagcggcgagatcgtgcccatggaggtgaacttcaacttcgacgaccccaacctgatcatcctgcctctggcctttggcaagagacagggcagagaattcatctggaacgacctgctgtccctggaaaccggcagcctgaagctggccaacggaagagtgatcgagaagacactgtacaacagaagaacccggcaggatgagcctgccctgttcgtggccctgaccttcgagcggcgggaggtcctggactcctccaatatcaaaccaatgaacctgatcggcgtggcaagaggcgaaaacatccccgccgtgatcgccctgaccgaccccgagggctgcccactgagccggtttaaggatagcctgggaaacccaacccacatcctgagaatcggcgagagctataaggagaagcagcggaccatccaggccaagaaggaggtggagcagcggagagccggcggctacagccggaagtacgccagcaaagccaagaatctggcagacgatatggtgagaaacaccgctagagatctgctgtactacgccgtgacccaggatgccatgctgatcttcgccaacctgagccggggcttcggccggcagggcaagcggaccttcatggccgagagacagtacacacggatggaggactggctgaccgccaagctggcctacgagggcctgagcaagacctacctgtccaagacactggcccagtacacctccaagacatgcagcaactgtgggtttaccatcaccagcgccgactacgacagggtgctggagaagctgaagaagacagcaacaggctggatgaccacaattaacggcaaggagctgaaggtggagggccagattacctactacaacagatacaagagacagaacgtagtcaaggacctgtccgtcgagctggatagactgagcgaagaatctgtgaacaacgacatctcctcctggacaaagggcagaagcggagaagctctgagcctcctgaagaaaagattctcccatagacccgtgcaggagaagttcgtgtgcctgaactgcggcttcgagacacacgcagccgagcaagccgccctgaacatcgccagatcctggctgttcctgcggagccaggagtacaagaaataccagacaaacaagacaaccggcaacaccgataagagagccttcgtcgagacctggcagtccttttaccggaagaagcttaaggaggtgtggaaacctgccgtgcggtctggcggatctggcggaggctccgtgacctacaacgacgtgcacgtggacatcacccaggaggagtgggccctgatggaccccagccagaggaacctgtacaaggacgtgatggtggagacctacatgaacctgaccgccatcggctacaactgggagaacctggaggtggaggagccctgccagaaccccctgaagcacggcaggcacgagaggccccacaccggcgagaagccctacgagtacaaccagtgcggcaaggccttcgcccagcccggcggcccaagcagcggcgcccctcctcccagcggcggcagcccagccggctccccaacctctaccgaggagggcacctctgagtccgccacccccgagagcggccctggcacctccaccgagcccagcgagggcagcgcacccggcagccctgccggcagccccacctccacagaggagggaaccagcaccgagcccagcgaaggcagcgccccaggcaccagcaccgagcctagtgagcaggagattaaacggatcaacaagatcagaagaagacttgtgaaagacagcaacaccaagaaggccggcaagacaggccccatgaaaaccctgctggttagagtgatgacacccgatctgagagagcggctggaaaacctgagaaagaagcctgaaaatatcccccagcccatcagcaatacatctagagccaacctgaataagctgctgaccgattacaccgaaatgaagaaggcgatcctgcatgtgtactgggaagagttccagaaggaccctgtgggcctgatgagccgggtggcccagcctgccagcaagaagatcgatcagaacaagctgaaacctgagatggacgagaagggcaacctgaccaccgccggctttgcctgctctcagtgtggccagcccctgttcgtgtacaagctggagcaggtgtctgagaagggcaaggcttacaccaactacttcggacggtgcaatgtggccgagcacgaaaagctgatcctgctggcccagctgaagcccgagaaggatagcgacgaagccgtgacatatagcctgggaaagtttgggcagagggccctggatttctacagcattcatgtgaccaaggagtccacccaccccgtgaagcccctggcccagatcgccggaaacagatacgcctccggacctgtgggaaaggccctgagcgacgcatgtatgggcacaatcgcctccttcctgtctaagtaccaggacatcatcatcgaacaccagaaggtggtgaagggcaaccagaagagactggagagcctgcgggagctggccggcaaggaaaacctggaataccctagcgtgaccctgccacctcagcctcacaccaaggagggcgttgatgcctacaacgaagtgatcgcccgggtgcgaatgtgggtgaacctgaacctgtggcagaagctgaagctaagcagagatgatgccaagcctctgctgagactgaagggattcccttcctttcctctggtcgagagacaggccaacgaagtggactggtgggacatggtgtgtaacgtgaagaagctgatcaacgagaaaaaggaggatggcaaggtgttttggcagaatctggctggctacaagagacaggaagccctgagaccatacctgagcagcgaggaagatcggaagaagggaaagaaattcgctcggtaccagctgggcgacctgctgctgcacctggaaaagaagcacggcgaggactggggaaaggtgtacgacgaggcctgggagcggattgacaagaaagtggaaggcctgagcaagcacatcaagctggaagaggaacggagaagcgaggacgcccagagcaaggccgccctgaccgactggctgcgggctaaggccagcttcgtgatcgagggcctgaaggaggccgacaaggacgagttctgcagatgcgagctgaagctgcagaagtggtacggggacctgcggggaaagcccttcgccatcgaagccgagaacagcatcctggacatcagcggcttcagcaagcagtacaactgtgccttcatctggcagaaggacggcgtgaagaagctgaacctgtacctgatcatcaactacttcaagggcggcaagctgcggttcaagaagatcaaacctgaagccttcgaagccaacagattctacaccgtgatcaacaaaaagagcggcgagatcgtgcccatggaggtgaacttcaacttcgacgaccccaacctgatcatcctgcctctggcctttggcaagagacagggcagagaattcatctggaacgacctgctgtccctggaaaccggcagcctgaagctggccaacggaagagtgatcgagaagacactgtacaacagaagaacccggcaggatgagcctgccctgttcgtggccctgaccttcgagcggcgggaggtcctggactcctccaatatcaaaccaatgaacctgatcggcgtggcaagaggcgaaaacatccccgccgtgatcgccctgaccgaccccgagggctgcccactgagccggtttaaggatagcctgggaaacccaacccacatcctgagaatcggcgagagctataaggagaagcagcggaccatccaggccaagaaggaggtggagcagcggagagccggcggctacagccggaagtacgccagcaaagccaagaatctggcagacgatatggtgagaaacaccgctagagatctgctgtactacgccgtgacccaggatgccatgctgatcttcgccaacctgagccggggcttcggccggcagggcaagcggaccttcatggccgagagacagtacacacggatggaggactggctgaccgccaagctggcctacgagggcctgagcaagacctacctgtccaagacactggcccagtacacctccaagacatgcagcaactgtgggtttaccatcaccagcgccgactacgacagggtgctggagaagctgaagaagacagcaacaggctggatgaccacaattaacggcaaggagctgaaggtggagggccagattacctactacaacagatacaagagacagaacgtagtcaaggacctgtccgtcgagctggatagactgagcgaagaatctgtgaacaacgacatctcctcctggacaaagggcagaagcggagaagctctgagcctcctgaagaaaagattctcccatagacccgtgcaggagaagttcgtgtgcctgaactgcggcttcgagacacacgcagccgagcaagccgccctgaacatcgccagatcctggctgttcctgcggagccaggagtacaagaaataccagacaaacaagacaaccggcaacaccgataagagagccttcgtcgagacctggcagtccttttaccggaagaagcttaaggaggtgtggaaacctgccgtgcggtctggcggatctggcggaggctcctgtgacctacaacgacgtgcacgtggacatcacccaggaggagtgggccctgatggaccccagccagaggaacctgtacaaggacgtgatggtggagacctacatgaacctgaccgccatcggctacaactgggagaacctggaggtggaggagccctgccagaaccccctgaagcacggcaggcacgagaggccccacaccggcgagaagccctacgagtacaaccagtgcggcaaggccttcgcccagcccggatctggctccggcagcggccccaagaaaaagagaaaagtctaagctgccttctgcggggcttgccttctggccatgcccttcttctctcccttgcacctgtacctcttggtctttgaataaagcctgagtaggaaggctagcaaaaaaaaaaaaaaaaaaaaaaaaaaaaaaaaaaaaaaaaaaaaaaaaaaaaaaaaaaaaaaaaaaaaaaaaaaaaaaaa

SEQ ID NO: 15353 - RNA, 9485 nt, synthetic construct
  source 1..9485: mol_type = other RNA
aggaaataagagagaaaagaagagtaagaagaaatataagagccaccatggcccctaagaagaagcgtaaagtgagccggatggaacgcctcgtctacgaggtgcggcagaagtgcagaaacatcgaggacatctgcatctcctgcggatctctgaacgtgaccctggagcacccactgttcatcggcggcatgtgccagaactgtaaaaactgttttctggagtgtgcctatcaatacgacgatgacggctaccagagctactgcaccatctgttgcggcggaagagaggtgctgatgtgtggaaataacaactgctgccggtgcttctgcgtggaatgcgtggacctgctggtgggccccggcgccgcccaggccgctattaaggaagatccttggaactgctacatgtgcggccacaagggcacatacggcctgctgagacggagagaggactggcctagcagactgcagatgttcttcgccaataaccacgaccaggagttcgacccccctaaggtgtaccctcccgtccccgccgagaagagaaagcccatccgggtcctgagcctgttcgatggcatcgccaccggtctgctggtgctgaaggacctgggcatccaggtggataggtacattgcctccgaggtgtgcgaggactccatcaccgtgggaatggtgcgtcatcagggcaagatcatgtacgtgggcgacgtgcggagcgtgacacagaagcatatccaggagtggggccctttcgacctggtgatcggcggcagcccttgcaatgacctgagcatcgtgaacccagcccggaagggcctgtacgagggaaccggcagactgttcttcgagttttacagactgctgcacgacgcccggcctaaggaaggcgacgaccggcccttcttttggctgttcgagaatgtggtggccatgggagtcagcgacaagcgggatattagccggttcctggagagcaaccccgtgatgatcgatgccaaggaagtgagcgccgcccaccgggccagatacttctggggcaatctgcctggcatgaacagacccctggccagcaccgtgaacgacaagctggagctgcaggagtgcctggagcacggccggatcgccaagttcagcaaggtgagaaccatcaccacccgaagcaacagcatcaaacaaggcaaggaccagcactttcctgtgttcatgaacgagaaggaggacatcctgtggtgtaccgagatggagagagtgttcgggttcccagtccactacacagatgtcagcaacatgtctagactggccagacagagactgctgggaagaagctggtccgtccctgtgatcagacacctgttcgcccctctgaaggagtacttcgcctgcgtgagcagcggcaacagcaacgccaacagccggggccccagcttctctagcggcctggtgccactgtccctgagagggagccacatgggccccatggagatctacaaaaccgtgagcgcctggaagcggcagcctgtgcgcgtgctgagcctgtttcggaatatcgataaagtcctgaaaagcctgggattcctggagagcggctctggctccggcggtggcaccctgaagtacgtggaggatgtgacaaacgtggtcagacgggatgtggagaagtggggccccttcgatctggtgtacggcagcacccaacccctgggcagctcttgtgaccggtgccctggctggtacatgtttcagttccaccggatcctgcagtacgccctgccgagacaggagtcccagcggccattcttttggattttcatggacaacttgctgctgaccgaggatgaccaggaaactaccactcggttcctgcagaccgaagccgtgaccctgcaggacgtgagaggccgggactaccagaacgccatgcgggtgtggtccaacatccctggactgaaaagcaagcacgcacctctgacccctaaagaagaggagtacctgcaggcccaggtgcggagcagaagcaagctggacgcccctaaggtggatctgctggtgaagaattgcctcctgcccctgagagagtacttcaagtatttcagccagaatagtctgcccctgggaggcagcggcggcggcgccctggtgacatttgaggacgtcgccgtgcggttcacccaggaggaatgggctctgctggatccttctcagaaaatcctgtaccgggacgtgatgagagagacataccggaatctgacctccgtgggcatcaactgggaatgttgggaccttgaagcctgcttcagaagcctgggaagaaacctgagagtgcaggtggtgaagagaaagtgcgagctgaccaacagcggcccctgcgccgagggcggcccaagcagcggcgcccctcctcccagcggcggcagcccagccggctccccaacctctaccgaggagggcacctctgagtccgccacccccgagagcggccctggcacctccaccgagcccagcgagggcagcgcacccggcagccctgccggcagccccacctccacagaggagggaaccagcaccgagcccagcgaaggcagcgccccaggcaccagcaccgagcctagtgagcaggagattaaacggatcaacaagatcagaagaagacttgtgaaagacagcaacaccaagaaggccggcaagacaggccccatgaaaaccctgctggttagagtgatgacacccgatctgagagagcggctggaaaacctgagaaagaagcctgaaaatatcccccagcccatcagcaatacatctagagccaacctgaataagctgctgaccgattacaccgaaatgaagaaggcgatcctgcatgtgtactgggaagagttccagaaggaccctgtgggcctgatgagccgggtggcccagcctgccagcaagaagatcgatcagaacaagctgaaacctgagatggacgagaagggcaacctgaccaccgccggctttgcctgctctcagtgtggccagcccctgttcgtgtacaagctggagcaggtgtctgagaagggcaaggcttacaccaactacttcggacggtgcaatgtggccgagcacgaaaagctgatcctgctggcccagctgaagcccgagaaggatagcgacgaagccgtgacatatagcctgggaaagtttgggcagagggccctggatttctacagcattcatgtgaccaaggagtccacccaccccgtgaagcccctggcccagatcgccggaaacagatacgcctccggacctgtgggaaaggccctgagcgacgcatgtatgggcacaatcgcctccttcctgtctaagtaccaggacatcatcatcgaacaccagaaggtggtgaagggcaaccagaagagactggagagcctgcgggagctggccggcaaggaaaacctggaataccctagcgtgaccctgccacctcagcctcacaccaaggagggcgttgatgcctacaacgaagtgatcgcccgggtgcgaatgtgggtgaacctgaacctgtggcagaagctgaagctaagcagagatgatgccaagcctctgctgagactgaagggattcccttcctttcctctggtcgagagacaggccaacgaagtggactggtgggacatggtgtgtaacgtgaagaagctgatcaacgagaaaaaggaggatggcaaggtgttttggcagaatctggctggctacaagagacaggaagccctgagaccatacctgagcagcgaggaagatcggaagaagggaaagaaattcgctcggtaccagctgggcgacctgctgctgcacctggaaaagaagcacggcgaggactggggaaaggtgtacgacgaggcctgggagcggattgacaagaaagtggaaggcctgagcaagcacatcaagctggaagaggaacggagaagcgaggacgcccagagcaaggccgccctgaccgactggctgcgggctaaggccagcttcgtgatcgagggcctgaaggaggccgacaaggacgagttctgcagatgcgagctgaagctgcagaagtggtacggggacctgcggggaaagcccttcgccatcgaagccgagaacagcatcctggacatcagcggcttcagcaagcagtacaactgtgccttcatctggcagaaggacggcgtgaagaagctgaacctgtacctgatcatcaactacttcaagggcggcaagctgcggttcaagaagatcaaacctgaagccttcgaagccaacagattctacaccgtgatcaacaaaaagagcggcgagatcgtgcccatggaggtgaacttcaacttcgacgaccccaacctgatcatcctgcctctggcctttggcaagagacagggcagagaattcatctggaacgacctgctgtccctggaaaccggcagcctgaagctggccaacggaagagtgatcgagaagacactgtacaacagaagaacccggcaggatgagcctgccctgttcgtggccctgaccttcgagcggcgggaggtcctggactcctccaatatcaaaccaatgaacctgatcggcgtggcaagaggcgaaaacatccccgccgtgatcgccctgaccgaccccgagggctgcccactgagccggtttaaggatagcctgggaaacccaacccacatcctgagaatcggcgagagctataaggagaagcagcggaccatccaggccaagaaggaggtggagcagcggagagccggcggctacagccggaagtacgccagcaaagccaagaatctggcagacgatatggtgagaaacaccgctagagatctgctgtactacgccgtgacccaggatgccatgctgatcttcgccaacctgagccggggcttcggccggcagggcaagcggaccttcatggccgagagacagtacacacggatggaggactggctgaccgccaagctggcctacgagggcctgagcaagacctacctgtccaagacactggcccagtacacctccaagacatgcagcaactgtgggtttaccatcaccagcgccgactacgacagggtgctggagaagctgaagaagacagcaacaggctggatgaccacaattaacggcaaggagctgaaggtggagggccagattacctactacaacagatacaagagacagaacgtagtcaaggacctgtccgtcgagctggatagactgagcgaagaatctgtgaacaacgacatctcctcctggacaaagggcagaagcggagaagctctgagcctcctgaagaaaagattctcccatagacccgtgcaggagaagttcgtgtgcctgaactgcggcttcgagacacacgcagccgagcaagccgccctgaacatcgccagatcctggctgttcctgcggagccaggagtacaagaaataccagacaaacaagacaaccggcaacaccgataagagagccttcgtcgagacctggcagtccttttaccggaagaagcttaaggaggtgtggaaacctgccgtgcggtctggcggatctggcggaggctccagcaaggcccccgtgaccttcggcgacctggccatctacttcagccaggaggagtgggagtggctgagccccatccagaaggacctgtacgaggacgtgatgctggagaactaccagaacctggtgagcctgggcctgtgcttcaggaggcccaacgtgatcaccctgctggagaagggcaaggccccctggatggtggaccccgtgaagaggaggaggggcctggacctgggcagcaagggcggcggcccaagcagcggcgcccctcctcccagcggcggcagcccagccggctccccaacctctaccgaggagggcacctctgagtccgccacccccgagagcggccctggcacctccaccgagcccagcgagggcagcgcacccggcagccctgccggcagccccacctccacagaggagggaaccagcaccgagcccagcgaaggcagcgccccaggcaccagcaccgagcctagtgagcaggagattaaacggatcaacaagatcagaagaagacttgtgaaagacagcaacaccaagaaggccggcaagacaggccccatgaaaaccctgctggttagagtgatgacacccgatctgagagagcggctggaaaacctgagaaagaagcctgaaaatatcccccagcccatcagcaatacatctagagccaacctgaataagctgctgaccgattacaccgaaatgaagaaggcgatcctgcatgtgtactgggaagagttccagaaggaccctgtgggcctgatgagccgggtggcccagcctgccagcaagaagatcgatcagaacaagctgaaacctgagatggacgagaagggcaacctgaccaccgccggctttgcctgctctcagtgtggccagcccctgttcgtgtacaagctggagcaggtgtctgagaagggcaaggcttacaccaactacttcggacggtgcaatgtggccgagcacgaaaagctgatcctgctggcccagctgaagcccgagaaggatagcgacgaagccgtgacatatagcctgggaaagtttgggcagagggccctggatttctacagcattcatgtgaccaaggagtccacccaccccgtgaagcccctggcccagatcgccggaaacagatacgcctccggacctgtgggaaaggccctgagcgacgcatgtatgggcacaatcgcctccttcctgtctaagtaccaggacatcatcatcgaacaccagaaggtggtgaagggcaaccagaagagactggagagcctgcgggagctggccggcaaggaaaacctggaataccctagcgtgaccctgccacctcagcctcacaccaaggagggcgttgatgcctacaacgaagtgatcgcccgggtgcgaatgtgggtgaacctgaacctgtggcagaagctgaagctaagcagagatgatgccaagcctctgctgagactgaagggattcccttcctttcctctggtcgagagacaggccaacgaagtggactggtgggacatggtgtgtaacgtgaagaagctgatcaacgagaaaaaggaggatggcaaggtgttttggcagaatctggctggctacaagagacaggaagccctgagaccatacctgagcagcgaggaagatcggaagaagggaaagaaattcgctcggtaccagctgggcgacctgctgctgcacctggaaaagaagcacggcgaggactggggaaaggtgtacgacgaggcctgggagcggattgacaagaaagtggaaggcctgagcaagcacatcaagctggaagaggaacggagaagcgaggacgcccagagcaaggccgccctgaccgactggctgcgggctaaggccagcttcgtgatcgagggcctgaaggaggccgacaaggacgagttctgcagatgcgagctgaagctgcagaagtggtacggggacctgcggggaaagcccttcgccatcgaagccgagaacagcatcctggacatcagcggcttcagcaagcagtacaactgtgccttcatctggcagaaggacggcgtgaagaagctgaacctgtacctgatcatcaactacttcaagggcggcaagctgcggttcaagaagatcaaacctgaagccttcgaagccaacagattctacaccgtgatcaacaaaaagagcggcgagatcgtgcccatggaggtgaacttcaacttcgacgaccccaacctgatcatcctgcctctggcctttggcaagagacagggcagagaattcatctggaacgacctgctgtccctggaaaccggcagcctgaagctggccaacggaagagtgatcgagaagacactgtacaacagaagaacccggcaggatgagcctgccctgttcgtggccctgaccttcgagcggcgggaggtcctggactcctccaatatcaaaccaatgaacctgatcggcgtggcaagaggcgaaaacatccccgccgtgatcgccctgaccgaccccgagggctgcccactgagccggtttaaggatagcctgggaaacccaacccacatcctgagaatcggcgagagctataaggagaagcagcggaccatccaggccaagaaggaggtggagcagcggagagccggcggctacagccggaagtacgccagcaaagccaagaatctggcagacgatatggtgagaaacaccgctagagatctgctgtactacgccgtgacccaggatgccatgctgatcttcgccaacctgagccggggcttcggccggcagggcaagcggaccttcatggccgagagacagtacacacggatggaggactggctgaccgccaagctggcctacgagggcctgagcaagacctacctgtccaagacactggcccagtacacctccaagacatgcagcaactgtgggtttaccatcaccagcgccgactacgacagggtgctggagaagctgaagaagacagcaacaggctggatgaccacaattaacggcaaggagctgaaggtggagggccagattacctactacaacagatacaagagacagaacgtagtcaaggacctgtccgtcgagctggatagactgagcgaagaatctgtgaacaacgacatctcctcctggacaaagggcagaagcggagaagctctgagcctcctgaagaaaagattctcccatagacccgtgcaggagaagttcgtgtgcctgaactgcggcttcgagacacacgcagccgagcaagccgccctgaacatcgccagatcctggctgttcctgcggagccaggagtacaagaaataccagacaaacaagacaaccggcaacaccgataagagagccttcgtcgagacctggcagtccttttaccggaagaagcttaaggaggtgtggaaacctgccgtgcggtctggcggatctggcggaggctcctagcaaggcccccgtgaccttcggcgacctggccatctacttcagccaggaggagtgggagtggctgagccccatccagaaggacctgtacgaggacgtgatgctggagaactaccagaacctggtgagcctgggcctgtgcttcaggaggcccaacgtgatcaccctgctggagaagggcaaggccccctggatggtggaccccgtgaagaggaggaggggcctggacctgggcagcaagggcggatctggctccggcagcggccccaagaaaaagagaaaagtctaagctgccttctgcggggcttgccttctggccatgcccttcttctctcccttgcacctgtacctcttggtctttgaataaagcctgagtaggaaggctagcaaaaaaaaaaaaaaaaaaaaaaaaaaaaaaaaaaaaaaaaaaaaaaaaaaaaaaaaaaaaaaaaaaaaaaaaaaaaaaaa

SEQ ID NO: 15354 - RNA, 9485 nt, synthetic construct
  source 1..9485: mol_type = other RNA
aggaaataagagagaaaagaagagtaagaagaaatataagagccaccatggcccctaagaagaagcgtaaagtgagccggatggaacgcctcgtctacgaggtgcggcagaagtgcagaaacatcgaggacatctgcatctcctgcggatctctgaacgtgaccctggagcacccactgttcatcggcggcatgtgccagaactgtaaaaactgttttctggagtgtgcctatcaatacgacgatgacggctaccagagctactgcaccatctgttgcggcggaagagaggtgctgatgtgtggaaataacaactgctgccggtgcttctgcgtggaatgcgtggacctgctggtgggccccggcgccgcccaggccgctattaaggaagatccttggaactgctacatgtgcggccacaagggcacatacggcctgctgagacggagagaggactggcctagcagactgcagatgttcttcgccaataaccacgaccaggagttcgacccccctaaggtgtaccctcccgtccccgccgagaagagaaagcccatccgggtcctgagcctgttcgatggcatcgccaccggtctgctggtgctgaaggacctgggcatccaggtggataggtacattgcctccgaggtgtgcgaggactccatcaccgtgggaatggtgcgtcatcagggcaagatcatgtacgtgggcgacgtgcggagcgtgacacagaagcatatccaggagtggggccctttcgacctggtgatcggcggcagcccttgcaatgacctgagcatcgtgaacccagcccggaagggcctgtacgagggaaccggcagactgttcttcgagttttacagactgctgcacgacgcccggcctaaggaaggcgacgaccggcccttcttttggctgttcgagaatgtggtggccatgggagtcagcgacaagcgggatattagccggttcctggagagcaaccccgtgatgatcgatgccaaggaagtgagcgccgcccaccgggccagatacttctggggcaatctgcctggcatgaacagacccctggccagcaccgtgaacgacaagctggagctgcaggagtgcctggagcacggccggatcgccaagttcagcaaggtgagaaccatcaccacccgaagcaacagcatcaaacaaggcaaggaccagcactttcctgtgttcatgaacgagaaggaggacatcctgtggtgtaccgagatggagagagtgttcgggttcccagtccactacacagatgtcagcaacatgtctagactggccagacagagactgctgggaagaagctggtccgtccctgtgatcagacacctgttcgcccctctgaaggagtacttcgcctgcgtgagcagcggcaacagcaacgccaacagccggggccccagcttctctagcggcctggtgccactgtccctgagagggagccacatgggccccatggagatctacaaaaccgtgagcgcctggaagcggcagcctgtgcgcgtgctgagcctgtttcggaatatcgataaagtcctgaaaagcctgggattcctggagagcggctctggctccggcggtggcaccctgaagtacgtggaggatgtgacaaacgtggtcagacgggatgtggagaagtggggccccttcgatctggtgtacggcagcacccaacccctgggcagctcttgtgaccggtgccctggctggtacatgtttcagttccaccggatcctgcagtacgccctgccgagacaggagtcccagcggccattcttttggattttcatggacaacttgctgctgaccgaggatgaccaggaaactaccactcggttcctgcagaccgaagccgtgaccctgcaggacgtgagaggccgggactaccagaacgccatgcgggtgtggtccaacatccctggactgaaaagcaagcacgcacctctgacccctaaagaagaggagtacctgcaggcccaggtgcggagcagaagcaagctggacgcccctaaggtggatctgctggtgaagaattgcctcctgcccctgagagagtacttcaagtatttcagccagaatagtctgcccctgggaggcagcggcggcggcgccctggtgacatttgaggacgtcgccgtgcggttcacccaggaggaatgggctctgctggatccttctcagaaaatcctgtaccgggacgtgatgagagagacataccggaatctgacctccgtgggcatcaactgggaatgttgggaccttgaagcctgcttcagaagcctgggaagaaacctgagagtgcaggtggtgaagagaaagtgcgagctgaccaacagcggcccctgcgccgagggcggcccaagcagcggcgcccctcctcccagcggcggcagcccagccggctccccaacctctaccgaggagggcacctctgagtccgccacccccgagagcggccctggcacctccaccgagcccagcgagggcagcgcacccggcagccctgccggcagccccacctccacagaggagggaaccagcaccgagcccagcgaaggcagcgccccaggcaccagcaccgagcctagtgagcaggagattaaacggatcaacaagatcagaagaagacttgtgaaagacagcaacaccaagaaggccggcaagacaggccccatgaaaaccctgctggttagagtgatgacacccgatctgagagagcggctggaaaacctgagaaagaagcctgaaaatatcccccagcccatcagcaatacatctagagccaacctgaataagctgctgaccgattacaccgaaatgaagaaggcgatcctgcatgtgtactgggaagagttccagaaggaccctgtgggcctgatgagccgggtggcccagcctgccagcaagaagatcgatcagaacaagctgaaacctgagatggacgagaagggcaacctgaccaccgccggctttgcctgctctcagtgtggccagcccctgttcgtgtacaagctggagcaggtgtctgagaagggcaaggcttacaccaactacttcggacggtgcaatgtggccgagcacgaaaagctgatcctgctggcccagctgaagcccgagaaggatagcgacgaagccgtgacatatagcctgggaaagtttgggcagagggccctggatttctacagcattcatgtgaccaaggagtccacccaccccgtgaagcccctggcccagatcgccggaaacagatacgcctccggacctgtgggaaaggccctgagcgacgcatgtatgggcacaatcgcctccttcctgtctaagtaccaggacatcatcatcgaacaccagaaggtggtgaagggcaaccagaagagactggagagcctgcgggagctggccggcaaggaaaacctggaataccctagcgtgaccctgccacctcagcctcacaccaaggagggcgttgatgcctacaacgaagtgatcgcccgggtgcgaatgtgggtgaacctgaacctgtggcagaagctgaagctaagcagagatgatgccaagcctctgctgagactgaagggattcccttcctttcctctggtcgagagacaggccaacgaagtggactggtgggacatggtgtgtaacgtgaagaagctgatcaacgagaaaaaggaggatggcaaggtgttttggcagaatctggctggctacaagagacaggaagccctgagaccatacctgagcagcgaggaagatcggaagaagggaaagaaattcgctcggtaccagctgggcgacctgctgctgcacctggaaaagaagcacggcgaggactggggaaaggtgtacgacgaggcctgggagcggattgacaagaaagtggaaggcctgagcaagcacatcaagctggaagaggaacggagaagcgaggacgcccagagcaaggccgccctgaccgactggctgcgggctaaggccagcttcgtgatcgagggcctgaaggaggccgacaaggacgagttctgcagatgcgagctgaagctgcagaagtggtacggggacctgcggggaaagcccttcgccatcgaagccgagaacagcatcctggacatcagcggcttcagcaagcagtacaactgtgccttcatctggcagaaggacggcgtgaagaagctgaacctgtacctgatcatcaactacttcaagggcggcaagctgcggttcaagaagatcaaacctgaagccttcgaagccaacagattctacaccgtgatcaacaaaaagagcggcgagatcgtgcccatggaggtgaacttcaacttcgacgaccccaacctgatcatcctgcctctggcctttggcaagagacagggcagagaattcatctggaacgacctgctgtccctggaaaccggcagcctgaagctggccaacggaagagtgatcgagaagacactgtacaacagaagaacccggcaggatgagcctgccctgttcgtggccctgaccttcgagcggcgggaggtcctggactcctccaatatcaaaccaatgaacctgatcggcgtggcaagaggcgaaaacatccccgccgtgatcgccctgaccgaccccgagggctgcccactgagccggtttaaggatagcctgggaaacccaacccacatcctgagaatcggcgagagctataaggagaagcagcggaccatccaggccaagaaggaggtggagcagcggagagccggcggctacagccggaagtacgccagcaaagccaagaatctggcagacgatatggtgagaaacaccgctagagatctgctgtactacgccgtgacccaggatgccatgctgatcttcgccaacctgagccggggcttcggccggcagggcaagcggaccttcatggccgagagacagtacacacggatggaggactggctgaccgccaagctggcctacgagggcctgagcaagacctacctgtccaagacactggcccagtacacctccaagacatgcagcaactgtgggtttaccatcaccagcgccgactacgacagggtgctggagaagctgaagaagacagcaacaggctggatgaccacaattaacggcaaggagctgaaggtggagggccagattacctactacaacagatacaagagacagaacgtagtcaaggacctgtccgtcgagctggatagactgagcgaagaatctgtgaacaacgacatctcctcctggacaaagggcagaagcggagaagctctgagcctcctgaagaaaagattctcccatagacccgtgcaggagaagttcgtgtgcctgaactgcggcttcgagacacacgcagccgagcaagccgccctgaacatcgccagatcctggctgttcctgcggagccaggagtacaagaaataccagacaaacaagacaaccggcaacaccgataagagagccttcgtcgagacctggcagtccttttaccggaagaagcttaaggaggtgtggaaacctgccgtgcggtctggcggatctggcggaggctccgcccaccacctggtgatgttcagggacgtggccgtggacttcagcaaggaggagtgggagtgcctgaacagctaccagaggaacctgtacagggacgtgatcctggagaactacagcaacctggtgagcgtggccggctgcagcatcagcaagcccgacgtgatcaccctgctggagcagggcaaggagccctggatggtggtgagggacgagaggaggaggaggagcctggacctggagagcggcggcccaagcagcggcgcccctcctcccagcggcggcagcccagccggctccccaacctctaccgaggagggcacctctgagtccgccacccccgagagcggccctggcacctccaccgagcccagcgagggcagcgcacccggcagccctgccggcagccccacctccacagaggagggaaccagcaccgagcccagcgaaggcagcgccccaggcaccagcaccgagcctagtgagcaggagattaaacggatcaacaagatcagaagaagacttgtgaaagacagcaacaccaagaaggccggcaagacaggccccatgaaaaccctgctggttagagtgatgacacccgatctgagagagcggctggaaaacctgagaaagaagcctgaaaatatcccccagcccatcagcaatacatctagagccaacctgaataagctgctgaccgattacaccgaaatgaagaaggcgatcctgcatgtgtactgggaagagttccagaaggaccctgtgggcctgatgagccgggtggcccagcctgccagcaagaagatcgatcagaacaagctgaaacctgagatggacgagaagggcaacctgaccaccgccggctttgcctgctctcagtgtggccagcccctgttcgtgtacaagctggagcaggtgtctgagaagggcaaggcttacaccaactacttcggacggtgcaatgtggccgagcacgaaaagctgatcctgctggcccagctgaagcccgagaaggatagcgacgaagccgtgacatatagcctgggaaagtttgggcagagggccctggatttctacagcattcatgtgaccaaggagtccacccaccccgtgaagcccctggcccagatcgccggaaacagatacgcctccggacctgtgggaaaggccctgagcgacgcatgtatgggcacaatcgcctccttcctgtctaagtaccaggacatcatcatcgaacaccagaaggtggtgaagggcaaccagaagagactggagagcctgcgggagctggccggcaaggaaaacctggaataccctagcgtgaccctgccacctcagcctcacaccaaggagggcgttgatgcctacaacgaagtgatcgcccgggtgcgaatgtgggtgaacctgaacctgtggcagaagctgaagctaagcagagatgatgccaagcctctgctgagactgaagggattcccttcctttcctctggtcgagagacaggccaacgaagtggactggtgggacatggtgtgtaacgtgaagaagctgatcaacgagaaaaaggaggatggcaaggtgttttggcagaatctggctggctacaagagacaggaagccctgagaccatacctgagcagcgaggaagatcggaagaagggaaagaaattcgctcggtaccagctgggcgacctgctgctgcacctggaaaagaagcacggcgaggactggggaaaggtgtacgacgaggcctgggagcggattgacaagaaagtggaaggcctgagcaagcacatcaagctggaagaggaacggagaagcgaggacgcccagagcaaggccgccctgaccgactggctgcgggctaaggccagcttcgtgatcgagggcctgaaggaggccgacaaggacgagttctgcagatgcgagctgaagctgcagaagtggtacggggacctgcggggaaagcccttcgccatcgaagccgagaacagcatcctggacatcagcggcttcagcaagcagtacaactgtgccttcatctggcagaaggacggcgtgaagaagctgaacctgtacctgatcatcaactacttcaagggcggcaagctgcggttcaagaagatcaaacctgaagccttcgaagccaacagattctacaccgtgatcaacaaaaagagcggcgagatcgtgcccatggaggtgaacttcaacttcgacgaccccaacctgatcatcctgcctctggcctttggcaagagacagggcagagaattcatctggaacgacctgctgtccctggaaaccggcagcctgaagctggccaacggaagagtgatcgagaagacactgtacaacagaagaacccggcaggatgagcctgccctgttcgtggccctgaccttcgagcggcgggaggtcctggactcctccaatatcaaaccaatgaacctgatcggcgtggcaagaggcgaaaacatccccgccgtgatcgccctgaccgaccccgagggctgcccactgagccggtttaaggatagcctgggaaacccaacccacatcctgagaatcggcgagagctataaggagaagcagcggaccatccaggccaagaaggaggtggagcagcggagagccggcggctacagccggaagtacgccagcaaagccaagaatctggcagacgatatggtgagaaacaccgctagagatctgctgtactacgccgtgacccaggatgccatgctgatcttcgccaacctgagccggggcttcggccggcagggcaagcggaccttcatggccgagagacagtacacacggatggaggactggctgaccgccaagctggcctacgagggcctgagcaagacctacctgtccaagacactggcccagtacacctccaagacatgcagcaactgtgggtttaccatcaccagcgccgactacgacagggtgctggagaagctgaagaagacagcaacaggctggatgaccacaattaacggcaaggagctgaaggtggagggccagattacctactacaacagatacaagagacagaacgtagtcaaggacctgtccgtcgagctggatagactgagcgaagaatctgtgaacaacgacatctcctcctggacaaagggcagaagcggagaagctctgagcctcctgaagaaaagattctcccatagacccgtgcaggagaagttcgtgtgcctgaactgcggcttcgagacacacgcagccgagcaagccgccctgaacatcgccagatcctggctgttcctgcggagccaggagtacaagaaataccagacaaacaagacaaccggcaacaccgataagagagccttcgtcgagacctggcagtccttttaccggaagaagcttaaggaggtgtggaaacctgccgtgcggtctggcggatctggcggaggctcctgcccaccacctggtgatgttcagggacgtggccgtggacttcagcaaggaggagtgggagtgcctgaacagctaccagaggaacctgtacagggacgtgatcctggagaactacagcaacctggtgagcgtggccggctgcagcatcagcaagcccgacgtgatcaccctgctggagcagggcaaggagccctggatggtggtgagggacgagaggaggaggaggagcctggacctggagagcggatctggctccggcagcggccccaagaaaaagagaaaagtctaagctgccttctgcggggcttgccttctggccatgcccttcttctctcccttgcacctgtacctcttggtctttgaataaagcctgagtaggaaggctagcaaaaaaaaaaaaaaaaaaaaaaaaaaaaaaaaaaaaaaaaaaaaaaaaaaaaaaaaaaaaaaaaaaaaaaaaaaaaaaaa

SEQ ID NO: 15355 - RNA, 9485 nt, synthetic construct
  source 1..9485: mol_type = other RNA
aggaaataagagagaaaagaagagtaagaagaaatataagagccaccatggcccctaagaagaagcgtaaagtgagccggatggaacgcctcgtctacgaggtgcggcagaagtgcagaaacatcgaggacatctgcatctcctgcggatctctgaacgtgaccctggagcacccactgttcatcggcggcatgtgccagaactgtaaaaactgttttctggagtgtgcctatcaatacgacgatgacggctaccagagctactgcaccatctgttgcggcggaagagaggtgctgatgtgtggaaataacaactgctgccggtgcttctgcgtggaatgcgtggacctgctggtgggccccggcgccgcccaggccgctattaaggaagatccttggaactgctacatgtgcggccacaagggcacatacggcctgctgagacggagagaggactggcctagcagactgcagatgttcttcgccaataaccacgaccaggagttcgacccccctaaggtgtaccctcccgtccccgccgagaagagaaagcccatccgggtcctgagcctgttcgatggcatcgccaccggtctgctggtgctgaaggacctgggcatccaggtggataggtacattgcctccgaggtgtgcgaggactccatcaccgtgggaatggtgcgtcatcagggcaagatcatgtacgtgggcgacgtgcggagcgtgacacagaagcatatccaggagtggggccctttcgacctggtgatcggcggcagcccttgcaatgacctgagcatcgtgaacccagcccggaagggcctgtacgagggaaccggcagactgttcttcgagttttacagactgctgcacgacgcccggcctaaggaaggcgacgaccggcccttcttttggctgttcgagaatgtggtggccatgggagtcagcgacaagcgggatattagccggttcctggagagcaaccccgtgatgatcgatgccaaggaagtgagcgccgcccaccgggccagatacttctggggcaatctgcctggcatgaacagacccctggccagcaccgtgaacgacaagctggagctgcaggagtgcctggagcacggccggatcgccaagttcagcaaggtgagaaccatcaccacccgaagcaacagcatcaaacaaggcaaggaccagcactttcctgtgttcatgaacgagaaggaggacatcctgtggtgtaccgagatggagagagtgttcgggttcccagtccactacacagatgtcagcaacatgtctagactggccagacagagactgctgggaagaagctggtccgtccctgtgatcagacacctgttcgcccctctgaaggagtacttcgcctgcgtgagcagcggcaacagcaacgccaacagccggggccccagcttctctagcggcctggtgccactgtccctgagagggagccacatgggccccatggagatctacaaaaccgtgagcgcctggaagcggcagcctgtgcgcgtgctgagcctgtttcggaatatcgataaagtcctgaaaagcctgggattcctggagagcggctctggctccggcggtggcaccctgaagtacgtggaggatgtgacaaacgtggtcagacgggatgtggagaagtggggccccttcgatctggtgtacggcagcacccaacccctgggcagctcttgtgaccggtgccctggctggtacatgtttcagttccaccggatcctgcagtacgccctgccgagacaggagtcccagcggccattcttttggattttcatggacaacttgctgctgaccgaggatgaccaggaaactaccactcggttcctgcagaccgaagccgtgaccctgcaggacgtgagaggccgggactaccagaacgccatgcgggtgtggtccaacatccctggactgaaaagcaagcacgcacctctgacccctaaagaagaggagtacctgcaggcccaggtgcggagcagaagcaagctggacgcccctaaggtggatctgctggtgaagaattgcctcctgcccctgagagagtacttcaagtatttcagccagaatagtctgcccctgggaggcagcggcggcggcgccctggtgacatttgaggacgtcgccgtgcggttcacccaggaggaatgggctctgctggatccttctcagaaaatcctgtaccgggacgtgatgagagagacataccggaatctgacctccgtgggcatcaactgggaatgttgggaccttgaagcctgcttcagaagcctgggaagaaacctgagagtgcaggtggtgaagagaaagtgcgagctgaccaacagcggcccctgcgccgagggcggcccaagcagcggcgcccctcctcccagcggcggcagcccagccggctccccaacctctaccgaggagggcacctctgagtccgccacccccgagagcggccctggcacctccaccgagcccagcgagggcagcgcacccggcagccctgccggcagccccacctccacagaggagggaaccagcaccgagcccagcgaaggcagcgccccaggcaccagcaccgagcctagtgagcaggagattaaacggatcaacaagatcagaagaagacttgtgaaagacagcaacaccaagaaggccggcaagacaggccccatgaaaaccctgctggttagagtgatgacacccgatctgagagagcggctggaaaacctgagaaagaagcctgaaaatatcccccagcccatcagcaatacatctagagccaacctgaataagctgctgaccgattacaccgaaatgaagaaggcgatcctgcatgtgtactgggaagagttccagaaggaccctgtgggcctgatgagccgggtggcccagcctgccagcaagaagatcgatcagaacaagctgaaacctgagatggacgagaagggcaacctgaccaccgccggctttgcctgctctcagtgtggccagcccctgttcgtgtacaagctggagcaggtgtctgagaagggcaaggcttacaccaactacttcggacggtgcaatgtggccgagcacgaaaagctgatcctgctggcccagctgaagcccgagaaggatagcgacgaagccgtgacatatagcctgggaaagtttgggcagagggccctggatttctacagcattcatgtgaccaaggagtccacccaccccgtgaagcccctggcccagatcgccggaaacagatacgcctccggacctgtgggaaaggccctgagcgacgcatgtatgggcacaatcgcctccttcctgtctaagtaccaggacatcatcatcgaacaccagaaggtggtgaagggcaaccagaagagactggagagcctgcgggagctggccggcaaggaaaacctggaataccctagcgtgaccctgccacctcagcctcacaccaaggagggcgttgatgcctacaacgaagtgatcgcccgggtgcgaatgtgggtgaacctgaacctgtggcagaagctgaagctaagcagagatgatgccaagcctctgctgagactgaagggattcccttcctttcctctggtcgagagacaggccaacgaagtggactggtgggacatggtgtgtaacgtgaagaagctgatcaacgagaaaaaggaggatggcaaggtgttttggcagaatctggctggctacaagagacaggaagccctgagaccatacctgagcagcgaggaagatcggaagaagggaaagaaattcgctcggtaccagctgggcgacctgctgctgcacctggaaaagaagcacggcgaggactggggaaaggtgtacgacgaggcctgggagcggattgacaagaaagtggaaggcctgagcaagcacatcaagctggaagaggaacggagaagcgaggacgcccagagcaaggccgccctgaccgactggctgcgggctaaggccagcttcgtgatcgagggcctgaaggaggccgacaaggacgagttctgcagatgcgagctgaagctgcagaagtggtacggggacctgcggggaaagcccttcgccatcgaagccgagaacagcatcctggacatcagcggcttcagcaagcagtacaactgtgccttcatctggcagaaggacggcgtgaagaagctgaacctgtacctgatcatcaactacttcaagggcggcaagctgcggttcaagaagatcaaacctgaagccttcgaagccaacagattctacaccgtgatcaacaaaaagagcggcgagatcgtgcccatggaggtgaacttcaacttcgacgaccccaacctgatcatcctgcctctggcctttggcaagagacagggcagagaattcatctggaacgacctgctgtccctggaaaccggcagcctgaagctggccaacggaagagtgatcgagaagacactgtacaacagaagaacccggcaggatgagcctgccctgttcgtggccctgaccttcgagcggcgggaggtcctggactcctccaatatcaaaccaatgaacctgatcggcgtggcaagaggcgaaaacatccccgccgtgatcgccctgaccgaccccgagggctgcccactgagccggtttaaggatagcctgggaaacccaacccacatcctgagaatcggcgagagctataaggagaagcagcggaccatccaggccaagaaggaggtggagcagcggagagccggcggctacagccggaagtacgccagcaaagccaagaatctggcagacgatatggtgagaaacaccgctagagatctgctgtactacgccgtgacccaggatgccatgctgatcttcgccaacctgagccggggcttcggccggcagggcaagcggaccttcatggccgagagacagtacacacggatggaggactggctgaccgccaagctggcctacgagggcctgagcaagacctacctgtccaagacactggcccagtacacctccaagacatgcagcaactgtgggtttaccatcaccagcgccgactacgacagggtgctggagaagctgaagaagacagcaacaggctggatgaccacaattaacggcaaggagctgaaggtggagggccagattacctactacaacagatacaagagacagaacgtagtcaaggacctgtccgtcgagctggatagactgagcgaagaatctgtgaacaacgacatctcctcctggacaaagggcagaagcggagaagctctgagcctcctgaagaaaagattctcccatagacccgtgcaggagaagttcgtgtgcctgaactgcggcttcgagacacacgcagccgagcaagccgccctgaacatcgccagatcctggctgttcctgcggagccaggagtacaagaaataccagacaaacaagacaaccggcaacaccgataagagagccttcgtcgagacctggcagtccttttaccggaagaagcttaaggaggtgtggaaacctgccgtgcggtctggcggatctggcggaggctccgccatcaggagcgtgatgttcagcgacatcagcatcgacttcagccccgaggagtgggagtacctggacctggagcagaaggacctgtacagggacgtgatgctggagaactacagcaacctggtgagcctgggctgcttcatcagcaagcccgacgtgatcagcctgctggagcagggcaaggagccctggaaggtggtgaggaagaggaggaggcagtaccccgagatgctgctgctgctgggcggcccaagcagcggcgcccctcctcccagcggcggcagcccagccggctccccaacctctaccgaggagggcacctctgagtccgccacccccgagagcggccctggcacctccaccgagcccagcgagggcagcgcacccggcagccctgccggcagccccacctccacagaggagggaaccagcaccgagcccagcgaaggcagcgccccaggcaccagcaccgagcctagtgagcaggagattaaacggatcaacaagatcagaagaagacttgtgaaagacagcaacaccaagaaggccggcaagacaggccccatgaaaaccctgctggttagagtgatgacacccgatctgagagagcggctggaaaacctgagaaagaagcctgaaaatatcccccagcccatcagcaatacatctagagccaacctgaataagctgctgaccgattacaccgaaatgaagaaggcgatcctgcatgtgtactgggaagagttccagaaggaccctgtgggcctgatgagccgggtggcccagcctgccagcaagaagatcgatcagaacaagctgaaacctgagatggacgagaagggcaacctgaccaccgccggctttgcctgctctcagtgtggccagcccctgttcgtgtacaagctggagcaggtgtctgagaagggcaaggcttacaccaactacttcggacggtgcaatgtggccgagcacgaaaagctgatcctgctggcccagctgaagcccgagaaggatagcgacgaagccgtgacatatagcctgggaaagtttgggcagagggccctggatttctacagcattcatgtgaccaaggagtccacccaccccgtgaagcccctggcccagatcgccggaaacagatacgcctccggacctgtgggaaaggccctgagcgacgcatgtatgggcacaatcgcctccttcctgtctaagtaccaggacatcatcatcgaacaccagaaggtggtgaagggcaaccagaagagactggagagcctgcgggagctggccggcaaggaaaacctggaataccctagcgtgaccctgccacctcagcctcacaccaaggagggcgttgatgcctacaacgaagtgatcgcccgggtgcgaatgtgggtgaacctgaacctgtggcagaagctgaagctaagcagagatgatgccaagcctctgctgagactgaagggattcccttcctttcctctggtcgagagacaggccaacgaagtggactggtgggacatggtgtgtaacgtgaagaagctgatcaacgagaaaaaggaggatggcaaggtgttttggcagaatctggctggctacaagagacaggaagccctgagaccatacctgagcagcgaggaagatcggaagaagggaaagaaattcgctcggtaccagctgggcgacctgctgctgcacctggaaaagaagcacggcgaggactggggaaaggtgtacgacgaggcctgggagcggattgacaagaaagtggaaggcctgagcaagcacatcaagctggaagaggaacggagaagcgaggacgcccagagcaaggccgccctgaccgactggctgcgggctaaggccagcttcgtgatcgagggcctgaaggaggccgacaaggacgagttctgcagatgcgagctgaagctgcagaagtggtacggggacctgcggggaaagcccttcgccatcgaagccgagaacagcatcctggacatcagcggcttcagcaagcagtacaactgtgccttcatctggcagaaggacggcgtgaagaagctgaacctgtacctgatcatcaactacttcaagggcggcaagctgcggttcaagaagatcaaacctgaagccttcgaagccaacagattctacaccgtgatcaacaaaaagagcggcgagatcgtgcccatggaggtgaacttcaacttcgacgaccccaacctgatcatcctgcctctggcctttggcaagagacagggcagagaattcatctggaacgacctgctgtccctggaaaccggcagcctgaagctggccaacggaagagtgatcgagaagacactgtacaacagaagaacccggcaggatgagcctgccctgttcgtggccctgaccttcgagcggcgggaggtcctggactcctccaatatcaaaccaatgaacctgatcggcgtggcaagaggcgaaaacatccccgccgtgatcgccctgaccgaccccgagggctgcccactgagccggtttaaggatagcctgggaaacccaacccacatcctgagaatcggcgagagctataaggagaagcagcggaccatccaggccaagaaggaggtggagcagcggagagccggcggctacagccggaagtacgccagcaaagccaagaatctggcagacgatatggtgagaaacaccgctagagatctgctgtactacgccgtgacccaggatgccatgctgatcttcgccaacctgagccggggcttcggccggcagggcaagcggaccttcatggccgagagacagtacacacggatggaggactggctgaccgccaagctggcctacgagggcctgagcaagacctacctgtccaagacactggcccagtacacctccaagacatgcagcaactgtgggtttaccatcaccagcgccgactacgacagggtgctggagaagctgaagaagacagcaacaggctggatgaccacaattaacggcaaggagctgaaggtggagggccagattacctactacaacagatacaagagacagaacgtagtcaaggacctgtccgtcgagctggatagactgagcgaagaatctgtgaacaacgacatctcctcctggacaaagggcagaagcggagaagctctgagcctcctgaagaaaagattctcccatagacccgtgcaggagaagttcgtgtgcctgaactgcggcttcgagacacacgcagccgagcaagccgccctgaacatcgccagatcctggctgttcctgcggagccaggagtacaagaaataccagacaaacaagacaaccggcaacaccgataagagagccttcgtcgagacctggcagtccttttaccggaagaagcttaaggaggtgtggaaacctgccgtgcggtctggcggatctggcggaggctcctgccatcaggagcgtgatgttcagcgacatcagcatcgacttcagccccgaggagtgggagtacctggacctggagcagaaggacctgtacagggacgtgatgctggagaactacagcaacctggtgagcctgggctgcttcatcagcaagcccgacgtgatcagcctgctggagcagggcaaggagccctggaaggtggtgaggaagaggaggaggcagtaccccgagatgctgctgctgctgggatctggctccggcagcggccccaagaaaaagagaaaagtctaagctgccttctgcggggcttgccttctggccatgcccttcttctctcccttgcacctgtacctcttggtctttgaataaagcctgagtaggaaggctagcaaaaaaaaaaaaaaaaaaaaaaaaaaaaaaaaaaaaaaaaaaaaaaaaaaaaaaaaaaaaaaaaaaaaaaaaaaaaaaaa

SEQ ID NO: 15356 - RNA, 9479 nt, synthetic construct
  source 1..9479: mol_type = other RNA
aggaaataagagagaaaagaagagtaagaagaaatataagagccaccatggcccctaagaagaagcgtaaagtgagccggatggaacgcctcgtctacgaggtgcggcagaagtgcagaaacatcgaggacatctgcatctcctgcggatctctgaacgtgaccctggagcacccactgttcatcggcggcatgtgccagaactgtaaaaactgttttctggagtgtgcctatcaatacgacgatgacggctaccagagctactgcaccatctgttgcggcggaagagaggtgctgatgtgtggaaataacaactgctgccggtgcttctgcgtggaatgcgtggacctgctggtgggccccggcgccgcccaggccgctattaaggaagatccttggaactgctacatgtgcggccacaagggcacatacggcctgctgagacggagagaggactggcctagcagactgcagatgttcttcgccaataaccacgaccaggagttcgacccccctaaggtgtaccctcccgtccccgccgagaagagaaagcccatccgggtcctgagcctgttcgatggcatcgccaccggtctgctggtgctgaaggacctgggcatccaggtggataggtacattgcctccgaggtgtgcgaggactccatcaccgtgggaatggtgcgtcatcagggcaagatcatgtacgtgggcgacgtgcggagcgtgacacagaagcatatccaggagtggggccctttcgacctggtgatcggcggcagcccttgcaatgacctgagcatcgtgaacccagcccggaagggcctgtacgagggaaccggcagactgttcttcgagttttacagactgctgcacgacgcccggcctaaggaaggcgacgaccggcccttcttttggctgttcgagaatgtggtggccatgggagtcagcgacaagcgggatattagccggttcctggagagcaaccccgtgatgatcgatgccaaggaagtgagcgccgcccaccgggccagatacttctggggcaatctgcctggcatgaacagacccctggccagcaccgtgaacgacaagctggagctgcaggagtgcctggagcacggccggatcgccaagttcagcaaggtgagaaccatcaccacccgaagcaacagcatcaaacaaggcaaggaccagcactttcctgtgttcatgaacgagaaggaggacatcctgtggtgtaccgagatggagagagtgttcgggttcccagtccactacacagatgtcagcaacatgtctagactggccagacagagactgctgggaagaagctggtccgtccctgtgatcagacacctgttcgcccctctgaaggagtacttcgcctgcgtgagcagcggcaacagcaacgccaacagccggggccccagcttctctagcggcctggtgccactgtccctgagagggagccacatgggccccatggagatctacaaaaccgtgagcgcctggaagcggcagcctgtgcgcgtgctgagcctgtttcggaatatcgataaagtcctgaaaagcctgggattcctggagagcggctctggctccggcggtggcaccctgaagtacgtggaggatgtgacaaacgtggtcagacgggatgtggagaagtggggccccttcgatctggtgtacggcagcacccaacccctgggcagctcttgtgaccggtgccctggctggtacatgtttcagttccaccggatcctgcagtacgccctgccgagacaggagtcccagcggccattcttttggattttcatggacaacttgctgctgaccgaggatgaccaggaaactaccactcggttcctgcagaccgaagccgtgaccctgcaggacgtgagaggccgggactaccagaacgccatgcgggtgtggtccaacatccctggactgaaaagcaagcacgcacctctgacccctaaagaagaggagtacctgcaggcccaggtgcggagcagaagcaagctggacgcccctaaggtggatctgctggtgaagaattgcctcctgcccctgagagagtacttcaagtatttcagccagaatagtctgcccctgggaggcagcggcggcggcgccctggtgacatttgaggacgtcgccgtgcggttcacccaggaggaatgggctctgctggatccttctcagaaaatcctgtaccgggacgtgatgagagagacataccggaatctgacctccgtgggcatcaactgggaatgttgggaccttgaagcctgcttcagaagcctgggaagaaacctgagagtgcaggtggtgaagagaaagtgcgagctgaccaacagcggcccctgcgccgagggcggcccaagcagcggcgcccctcctcccagcggcggcagcccagccggctccccaacctctaccgaggagggcacctctgagtccgccacccccgagagcggccctggcacctccaccgagcccagcgagggcagcgcacccggcagccctgccggcagccccacctccacagaggagggaaccagcaccgagcccagcgaaggcagcgccccaggcaccagcaccgagcctagtgagcaggagattaaacggatcaacaagatcagaagaagacttgtgaaagacagcaacaccaagaaggccggcaagacaggccccatgaaaaccctgctggttagagtgatgacacccgatctgagagagcggctggaaaacctgagaaagaagcctgaaaatatcccccagcccatcagcaatacatctagagccaacctgaataagctgctgaccgattacaccgaaatgaagaaggcgatcctgcatgtgtactgggaagagttccagaaggaccctgtgggcctgatgagccgggtggcccagcctgccagcaagaagatcgatcagaacaagctgaaacctgagatggacgagaagggcaacctgaccaccgccggctttgcctgctctcagtgtggccagcccctgttcgtgtacaagctggagcaggtgtctgagaagggcaaggcttacaccaactacttcggacggtgcaatgtggccgagcacgaaaagctgatcctgctggcccagctgaagcccgagaaggatagcgacgaagccgtgacatatagcctgggaaagtttgggcagagggccctggatttctacagcattcatgtgaccaaggagtccacccaccccgtgaagcccctggcccagatcgccggaaacagatacgcctccggacctgtgggaaaggccctgagcgacgcatgtatgggcacaatcgcctccttcctgtctaagtaccaggacatcatcatcgaacaccagaaggtggtgaagggcaaccagaagagactggagagcctgcgggagctggccggcaaggaaaacctggaataccctagcgtgaccctgccacctcagcctcacaccaaggagggcgttgatgcctacaacgaagtgatcgcccgggtgcgaatgtgggtgaacctgaacctgtggcagaagctgaagctaagcagagatgatgccaagcctctgctgagactgaagggattcccttcctttcctctggtcgagagacaggccaacgaagtggactggtgggacatggtgtgtaacgtgaagaagctgatcaacgagaaaaaggaggatggcaaggtgttttggcagaatctggctggctacaagagacaggaagccctgagaccatacctgagcagcgaggaagatcggaagaagggaaagaaattcgctcggtaccagctgggcgacctgctgctgcacctggaaaagaagcacggcgaggactggggaaaggtgtacgacgaggcctgggagcggattgacaagaaagtggaaggcctgagcaagcacatcaagctggaagaggaacggagaagcgaggacgcccagagcaaggccgccctgaccgactggctgcgggctaaggccagcttcgtgatcgagggcctgaaggaggccgacaaggacgagttctgcagatgcgagctgaagctgcagaagtggtacggggacctgcggggaaagcccttcgccatcgaagccgagaacagcatcctggacatcagcggcttcagcaagcagtacaactgtgccttcatctggcagaaggacggcgtgaagaagctgaacctgtacctgatcatcaactacttcaagggcggcaagctgcggttcaagaagatcaaacctgaagccttcgaagccaacagattctacaccgtgatcaacaaaaagagcggcgagatcgtgcccatggaggtgaacttcaacttcgacgaccccaacctgatcatcctgcctctggcctttggcaagagacagggcagagaattcatctggaacgacctgctgtccctggaaaccggcagcctgaagctggccaacggaagagtgatcgagaagacactgtacaacagaagaacccggcaggatgagcctgccctgttcgtggccctgaccttcgagcggcgggaggtcctggactcctccaatatcaaaccaatgaacctgatcggcgtggcaagaggcgaaaacatccccgccgtgatcgccctgaccgaccccgagggctgcccactgagccggtttaaggatagcctgggaaacccaacccacatcctgagaatcggcgagagctataaggagaagcagcggaccatccaggccaagaaggaggtggagcagcggagagccggcggctacagccggaagtacgccagcaaagccaagaatctggcagacgatatggtgagaaacaccgctagagatctgctgtactacgccgtgacccaggatgccatgctgatcttcgccaacctgagccggggcttcggccggcagggcaagcggaccttcatggccgagagacagtacacacggatggaggactggctgaccgccaagctggcctacgagggcctgagcaagacctacctgtccaagacactggcccagtacacctccaagacatgcagcaactgtgggtttaccatcaccagcgccgactacgacagggtgctggagaagctgaagaagacagcaacaggctggatgaccacaattaacggcaaggagctgaaggtggagggccagattacctactacaacagatacaagagacagaacgtagtcaaggacctgtccgtcgagctggatagactgagcgaagaatctgtgaacaacgacatctcctcctggacaaagggcagaagcggagaagctctgagcctcctgaagaaaagattctcccatagacccgtgcaggagaagttcgtgtgcctgaactgcggcttcgagacacacgcagccgagcaagccgccctgaacatcgccagatcctggctgttcctgcggagccaggagtacaagaaataccagacaaacaagacaaccggcaacaccgataagagagccttcgtcgagacctggcagtccttttaccggaagaagcttaaggaggtgtggaaacctgccgtgcggtctggcggatctggcggaggctccatggcccccagccagggcaggctgaccttcgaggacgtggccatcgagttcagccaggaggagtgggagtgcctggaccccgcccagagggccctgtacggcgaggtgatgctggagacctacaggaacctggtgagcctgggcctgaccagcaaggacagctgcagcctgaggaagaagcccaggaggaggaggaggggccagaagaggaccagggagtggcccctgctgaggtaccacggcggcccaagcagcggcgcccctcctcccagcggcggcagcccagccggctccccaacctctaccgaggagggcacctctgagtccgccacccccgagagcggccctggcacctccaccgagcccagcgagggcagcgcacccggcagccctgccggcagccccacctccacagaggagggaaccagcaccgagcccagcgaaggcagcgccccaggcaccagcaccgagcctagtgagcaggagattaaacggatcaacaagatcagaagaagacttgtgaaagacagcaacaccaagaaggccggcaagacaggccccatgaaaaccctgctggttagagtgatgacacccgatctgagagagcggctggaaaacctgagaaagaagcctgaaaatatcccccagcccatcagcaatacatctagagccaacctgaataagctgctgaccgattacaccgaaatgaagaaggcgatcctgcatgtgtactgggaagagttccagaaggaccctgtgggcctgatgagccgggtggcccagcctgccagcaagaagatcgatcagaacaagctgaaacctgagatggacgagaagggcaacctgaccaccgccggctttgcctgctctcagtgtggccagcccctgttcgtgtacaagctggagcaggtgtctgagaagggcaaggcttacaccaactacttcggacggtgcaatgtggccgagcacgaaaagctgatcctgctggcccagctgaagcccgagaaggatagcgacgaagccgtgacatatagcctgggaaagtttgggcagagggccctggatttctacagcattcatgtgaccaaggagtccacccaccccgtgaagcccctggcccagatcgccggaaacagatacgcctccggacctgtgggaaaggccctgagcgacgcatgtatgggcacaatcgcctccttcctgtctaagtaccaggacatcatcatcgaacaccagaaggtggtgaagggcaaccagaagagactggagagcctgcgggagctggccggcaaggaaaacctggaataccctagcgtgaccctgccacctcagcctcacaccaaggagggcgttgatgcctacaacgaagtgatcgcccgggtgcgaatgtgggtgaacctgaacctgtggcagaagctgaagctaagcagagatgatgccaagcctctgctgagactgaagggattcccttcctttcctctggtcgagagacaggccaacgaagtggactggtgggacatggtgtgtaacgtgaagaagctgatcaacgagaaaaaggaggatggcaaggtgttttggcagaatctggctggctacaagagacaggaagccctgagaccatacctgagcagcgaggaagatcggaagaagggaaagaaattcgctcggtaccagctgggcgacctgctgctgcacctggaaaagaagcacggcgaggactggggaaaggtgtacgacgaggcctgggagcggattgacaagaaagtggaaggcctgagcaagcacatcaagctggaagaggaacggagaagcgaggacgcccagagcaaggccgccctgaccgactggctgcgggctaaggccagcttcgtgatcgagggcctgaaggaggccgacaaggacgagttctgcagatgcgagctgaagctgcagaagtggtacggggacctgcggggaaagcccttcgccatcgaagccgagaacagcatcctggacatcagcggcttcagcaagcagtacaactgtgccttcatctggcagaaggacggcgtgaagaagctgaacctgtacctgatcatcaactacttcaagggcggcaagctgcggttcaagaagatcaaacctgaagccttcgaagccaacagattctacaccgtgatcaacaaaaagagcggcgagatcgtgcccatggaggtgaacttcaacttcgacgaccccaacctgatcatcctgcctctggcctttggcaagagacagggcagagaattcatctggaacgacctgctgtccctggaaaccggcagcctgaagctggccaacggaagagtgatcgagaagacactgtacaacagaagaacccggcaggatgagcctgccctgttcgtggccctgaccttcgagcggcgggaggtcctggactcctccaatatcaaaccaatgaacctgatcggcgtggcaagaggcgaaaacatccccgccgtgatcgccctgaccgaccccgagggctgcccactgagccggtttaaggatagcctgggaaacccaacccacatcctgagaatcggcgagagctataaggagaagcagcggaccatccaggccaagaaggaggtggagcagcggagagccggcggctacagccggaagtacgccagcaaagccaagaatctggcagacgatatggtgagaaacaccgctagagatctgctgtactacgccgtgacccaggatgccatgctgatcttcgccaacctgagccggggcttcggccggcagggcaagcggaccttcatggccgagagacagtacacacggatggaggactggctgaccgccaagctggcctacgagggcctgagcaagacctacctgtccaagacactggcccagtacacctccaagacatgcagcaactgtgggtttaccatcaccagcgccgactacgacagggtgctggagaagctgaagaagacagcaacaggctggatgaccacaattaacggcaaggagctgaaggtggagggccagattacctactacaacagatacaagagacagaacgtagtcaaggacctgtccgtcgagctggatagactgagcgaagaatctgtgaacaacgacatctcctcctggacaaagggcagaagcggagaagctctgagcctcctgaagaaaagattctcccatagacccgtgcaggagaagttcgtgtgcctgaactgcggcttcgagacacacgcagccgagcaagccgccctgaacatcgccagatcctggctgttcctgcggagccaggagtacaagaaataccagacaaacaagacaaccggcaacaccgataagagagccttcgtcgagacctggcagtccttttaccggaagaagcttaaggaggtgtggaaacctgccgtgcggtctggcggatctggcggaggctcctatggcccccagccagggcaggctgaccttcgaggacgtggccatcgagttcagccaggaggagtgggagtgcctggaccccgcccagagggccctgtacggcgaggtgatgctggagacctacaggaacctggtgagcctgggcctgaccagcaaggacagctgcagcctgaggaagaagcccaggaggaggaggaggggccagaagaggaccagggagtggcccctgctgaggtaccacggatctggctccggcagcggccccaagaaaaagagaaaagtctaagctgccttctgcggggcttgccttctggccatgcccttcttctctcccttgcacctgtacctcttggtctttgaataaagcctgagtaggaaggctagcaaaaaaaaaaaaaaaaaaaaaaaaaaaaaaaaaaaaaaaaaaaaaaaaaaaaaaaaaaaaaaaaaaaaaaaaaaaaaaaa

SEQ ID NO: 15357 - RNA, 9485 nt, synthetic construct
  source 1..9485: mol_type = other RNA
aggaaataagagagaaaagaagagtaagaagaaatataagagccaccatggcccctaagaagaagcgtaaagtgagccggatggaacgcctcgtctacgaggtgcggcagaagtgcagaaacatcgaggacatctgcatctcctgcggatctctgaacgtgaccctggagcacccactgttcatcggcggcatgtgccagaactgtaaaaactgttttctggagtgtgcctatcaatacgacgatgacggctaccagagctactgcaccatctgttgcggcggaagagaggtgctgatgtgtggaaataacaactgctgccggtgcttctgcgtggaatgcgtggacctgctggtgggccccggcgccgcccaggccgctattaaggaagatccttggaactgctacatgtgcggccacaagggcacatacggcctgctgagacggagagaggactggcctagcagactgcagatgttcttcgccaataaccacgaccaggagttcgacccccctaaggtgtaccctcccgtccccgccgagaagagaaagcccatccgggtcctgagcctgttcgatggcatcgccaccggtctgctggtgctgaaggacctgggcatccaggtggataggtacattgcctccgaggtgtgcgaggactccatcaccgtgggaatggtgcgtcatcagggcaagatcatgtacgtgggcgacgtgcggagcgtgacacagaagcatatccaggagtggggccctttcgacctggtgatcggcggcagcccttgcaatgacctgagcatcgtgaacccagcccggaagggcctgtacgagggaaccggcagactgttcttcgagttttacagactgctgcacgacgcccggcctaaggaaggcgacgaccggcccttcttttggctgttcgagaatgtggtggccatgggagtcagcgacaagcgggatattagccggttcctggagagcaaccccgtgatgatcgatgccaaggaagtgagcgccgcccaccgggccagatacttctggggcaatctgcctggcatgaacagacccctggccagcaccgtgaacgacaagctggagctgcaggagtgcctggagcacggccggatcgccaagttcagcaaggtgagaaccatcaccacccgaagcaacagcatcaaacaaggcaaggaccagcactttcctgtgttcatgaacgagaaggaggacatcctgtggtgtaccgagatggagagagtgttcgggttcccagtccactacacagatgtcagcaacatgtctagactggccagacagagactgctgggaagaagctggtccgtccctgtgatcagacacctgttcgcccctctgaaggagtacttcgcctgcgtgagcagcggcaacagcaacgccaacagccggggccccagcttctctagcggcctggtgccactgtccctgagagggagccacatgggccccatggagatctacaaaaccgtgagcgcctggaagcggcagcctgtgcgcgtgctgagcctgtttcggaatatcgataaagtcctgaaaagcctgggattcctggagagcggctctggctccggcggtggcaccctgaagtacgtggaggatgtgacaaacgtggtcagacgggatgtggagaagtggggccccttcgatctggtgtacggcagcacccaacccctgggcagctcttgtgaccggtgccctggctggtacatgtttcagttccaccggatcctgcagtacgccctgccgagacaggagtcccagcggccattcttttggattttcatggacaacttgctgctgaccgaggatgaccaggaaactaccactcggttcctgcagaccgaagccgtgaccctgcaggacgtgagaggccgggactaccagaacgccatgcgggtgtggtccaacatccctggactgaaaagcaagcacgcacctctgacccctaaagaagaggagtacctgcaggcccaggtgcggagcagaagcaagctggacgcccctaaggtggatctgctggtgaagaattgcctcctgcccctgagagagtacttcaagtatttcagccagaatagtctgcccctgggaggcagcggcggcggcgccctggtgacatttgaggacgtcgccgtgcggttcacccaggaggaatgggctctgctggatccttctcagaaaatcctgtaccgggacgtgatgagagagacataccggaatctgacctccgtgggcatcaactgggaatgttgggaccttgaagcctgcttcagaagcctgggaagaaacctgagagtgcaggtggtgaagagaaagtgcgagctgaccaacagcggcccctgcgccgagggcggcccaagcagcggcgcccctcctcccagcggcggcagcccagccggctccccaacctctaccgaggagggcacctctgagtccgccacccccgagagcggccctggcacctccaccgagcccagcgagggcagcgcacccggcagccctgccggcagccccacctccacagaggagggaaccagcaccgagcccagcgaaggcagcgccccaggcaccagcaccgagcctagtgagcaggagattaaacggatcaacaagatcagaagaagacttgtgaaagacagcaacaccaagaaggccggcaagacaggccccatgaaaaccctgctggttagagtgatgacacccgatctgagagagcggctggaaaacctgagaaagaagcctgaaaatatcccccagcccatcagcaatacatctagagccaacctgaataagctgctgaccgattacaccgaaatgaagaaggcgatcctgcatgtgtactgggaagagttccagaaggaccctgtgggcctgatgagccgggtggcccagcctgccagcaagaagatcgatcagaacaagctgaaacctgagatggacgagaagggcaacctgaccaccgccggctttgcctgctctcagtgtggccagcccctgttcgtgtacaagctggagcaggtgtctgagaagggcaaggcttacaccaactacttcggacggtgcaatgtggccgagcacgaaaagctgatcctgctggcccagctgaagcccgagaaggatagcgacgaagccgtgacatatagcctgggaaagtttgggcagagggccctggatttctacagcattcatgtgaccaaggagtccacccaccccgtgaagcccctggcccagatcgccggaaacagatacgcctccggacctgtgggaaaggccctgagcgacgcatgtatgggcacaatcgcctccttcctgtctaagtaccaggacatcatcatcgaacaccagaaggtggtgaagggcaaccagaagagactggagagcctgcgggagctggccggcaaggaaaacctggaataccctagcgtgaccctgccacctcagcctcacaccaaggagggcgttgatgcctacaacgaagtgatcgcccgggtgcgaatgtgggtgaacctgaacctgtggcagaagctgaagctaagcagagatgatgccaagcctctgctgagactgaagggattcccttcctttcctctggtcgagagacaggccaacgaagtggactggtgggacatggtgtgtaacgtgaagaagctgatcaacgagaaaaaggaggatggcaaggtgttttggcagaatctggctggctacaagagacaggaagccctgagaccatacctgagcagcgaggaagatcggaagaagggaaagaaattcgctcggtaccagctgggcgacctgctgctgcacctggaaaagaagcacggcgaggactggggaaaggtgtacgacgaggcctgggagcggattgacaagaaagtggaaggcctgagcaagcacatcaagctggaagaggaacggagaagcgaggacgcccagagcaaggccgccctgaccgactggctgcgggctaaggccagcttcgtgatcgagggcctgaaggaggccgacaaggacgagttctgcagatgcgagctgaagctgcagaagtggtacggggacctgcggggaaagcccttcgccatcgaagccgagaacagcatcctggacatcagcggcttcagcaagcagtacaactgtgccttcatctggcagaaggacggcgtgaagaagctgaacctgtacctgatcatcaactacttcaagggcggcaagctgcggttcaagaagatcaaacctgaagccttcgaagccaacagattctacaccgtgatcaacaaaaagagcggcgagatcgtgcccatggaggtgaacttcaacttcgacgaccccaacctgatcatcctgcctctggcctttggcaagagacagggcagagaattcatctggaacgacctgctgtccctggaaaccggcagcctgaagctggccaacggaagagtgatcgagaagacactgtacaacagaagaacccggcaggatgagcctgccctgttcgtggccctgaccttcgagcggcgggaggtcctggactcctccaatatcaaaccaatgaacctgatcggcgtggcaagaggcgaaaacatccccgccgtgatcgccctgaccgaccccgagggctgcccactgagccggtttaaggatagcctgggaaacccaacccacatcctgagaatcggcgagagctataaggagaagcagcggaccatccaggccaagaaggaggtggagcagcggagagccggcggctacagccggaagtacgccagcaaagccaagaatctggcagacgatatggtgagaaacaccgctagagatctgctgtactacgccgtgacccaggatgccatgctgatcttcgccaacctgagccggggcttcggccggcagggcaagcggaccttcatggccgagagacagtacacacggatggaggactggctgaccgccaagctggcctacgagggcctgagcaagacctacctgtccaagacactggcccagtacacctccaagacatgcagcaactgtgggtttaccatcaccagcgccgactacgacagggtgctggagaagctgaagaagacagcaacaggctggatgaccacaattaacggcaaggagctgaaggtggagggccagattacctactacaacagatacaagagacagaacgtagtcaaggacctgtccgtcgagctggatagactgagcgaagaatctgtgaacaacgacatctcctcctggacaaagggcagaagcggagaagctctgagcctcctgaagaaaagattctcccatagacccgtgcaggagaagttcgtgtgcctgaactgcggcttcgagacacacgcagccgagcaagccgccctgaacatcgccagatcctggctgttcctgcggagccaggagtacaagaaataccagacaaacaagacaaccggcaacaccgataagagagccttcgtcgagacctggcagtccttttaccggaagaagcttaaggaggtgtggaaacctgccgtgcggtctggcggatctggcggaggctccagccagagcctggtgaccttcggcgacgtggccgtggagttcagccccgaggagtgggagtggctggacagcgcccagaggagcctgtacaggagcgtgatgctggagaactacaggagcctggtgagcctgggcctgtgcgtgagcaagcccaagatgatcagcagcctggagcagaggaaggagccctgggccgccaagaggaccctgaccaggggcggctgcagcgacagcagggccctgggcggcccaagcagcggcgcccctcctcccagcggcggcagcccagccggctccccaacctctaccgaggagggcacctctgagtccgccacccccgagagcggccctggcacctccaccgagcccagcgagggcagcgcacccggcagccctgccggcagccccacctccacagaggagggaaccagcaccgagcccagcgaaggcagcgccccaggcaccagcaccgagcctagtgagcaggagattaaacggatcaacaagatcagaagaagacttgtgaaagacagcaacaccaagaaggccggcaagacaggccccatgaaaaccctgctggttagagtgatgacacccgatctgagagagcggctggaaaacctgagaaagaagcctgaaaatatcccccagcccatcagcaatacatctagagccaacctgaataagctgctgaccgattacaccgaaatgaagaaggcgatcctgcatgtgtactgggaagagttccagaaggaccctgtgggcctgatgagccgggtggcccagcctgccagcaagaagatcgatcagaacaagctgaaacctgagatggacgagaagggcaacctgaccaccgccggctttgcctgctctcagtgtggccagcccctgttcgtgtacaagctggagcaggtgtctgagaagggcaaggcttacaccaactacttcggacggtgcaatgtggccgagcacgaaaagctgatcctgctggcccagctgaagcccgagaaggatagcgacgaagccgtgacatatagcctgggaaagtttgggcagagggccctggatttctacagcattcatgtgaccaaggagtccacccaccccgtgaagcccctggcccagatcgccggaaacagatacgcctccggacctgtgggaaaggccctgagcgacgcatgtatgggcacaatcgcctccttcctgtctaagtaccaggacatcatcatcgaacaccagaaggtggtgaagggcaaccagaagagactggagagcctgcgggagctggccggcaaggaaaacctggaataccctagcgtgaccctgccacctcagcctcacaccaaggagggcgttgatgcctacaacgaagtgatcgcccgggtgcgaatgtgggtgaacctgaacctgtggcagaagctgaagctaagcagagatgatgccaagcctctgctgagactgaagggattcccttcctttcctctggtcgagagacaggccaacgaagtggactggtgggacatggtgtgtaacgtgaagaagctgatcaacgagaaaaaggaggatggcaaggtgttttggcagaatctggctggctacaagagacaggaagccctgagaccatacctgagcagcgaggaagatcggaagaagggaaagaaattcgctcggtaccagctgggcgacctgctgctgcacctggaaaagaagcacggcgaggactggggaaaggtgtacgacgaggcctgggagcggattgacaagaaagtggaaggcctgagcaagcacatcaagctggaagaggaacggagaagcgaggacgcccagagcaaggccgccctgaccgactggctgcgggctaaggccagcttcgtgatcgagggcctgaaggaggccgacaaggacgagttctgcagatgcgagctgaagctgcagaagtggtacggggacctgcggggaaagcccttcgccatcgaagccgagaacagcatcctggacatcagcggcttcagcaagcagtacaactgtgccttcatctggcagaaggacggcgtgaagaagctgaacctgtacctgatcatcaactacttcaagggcggcaagctgcggttcaagaagatcaaacctgaagccttcgaagccaacagattctacaccgtgatcaacaaaaagagcggcgagatcgtgcccatggaggtgaacttcaacttcgacgaccccaacctgatcatcctgcctctggcctttggcaagagacagggcagagaattcatctggaacgacctgctgtccctggaaaccggcagcctgaagctggccaacggaagagtgatcgagaagacactgtacaacagaagaacccggcaggatgagcctgccctgttcgtggccctgaccttcgagcggcgggaggtcctggactcctccaatatcaaaccaatgaacctgatcggcgtggcaagaggcgaaaacatccccgccgtgatcgccctgaccgaccccgagggctgcccactgagccggtttaaggatagcctgggaaacccaacccacatcctgagaatcggcgagagctataaggagaagcagcggaccatccaggccaagaaggaggtggagcagcggagagccggcggctacagccggaagtacgccagcaaagccaagaatctggcagacgatatggtgagaaacaccgctagagatctgctgtactacgccgtgacccaggatgccatgctgatcttcgccaacctgagccggggcttcggccggcagggcaagcggaccttcatggccgagagacagtacacacggatggaggactggctgaccgccaagctggcctacgagggcctgagcaagacctacctgtccaagacactggcccagtacacctccaagacatgcagcaactgtgggtttaccatcaccagcgccgactacgacagggtgctggagaagctgaagaagacagcaacaggctggatgaccacaattaacggcaaggagctgaaggtggagggccagattacctactacaacagatacaagagacagaacgtagtcaaggacctgtccgtcgagctggatagactgagcgaagaatctgtgaacaacgacatctcctcctggacaaagggcagaagcggagaagctctgagcctcctgaagaaaagattctcccatagacccgtgcaggagaagttcgtgtgcctgaactgcggcttcgagacacacgcagccgagcaagccgccctgaacatcgccagatcctggctgttcctgcggagccaggagtacaagaaataccagacaaacaagacaaccggcaacaccgataagagagccttcgtcgagacctggcagtccttttaccggaagaagcttaaggaggtgtggaaacctgccgtgcggtctggcggatctggcggaggctcctagccagagcctggtgaccttcggcgacgtggccgtggagttcagccccgaggagtgggagtggctggacagcgcccagaggagcctgtacaggagcgtgatgctggagaactacaggagcctggtgagcctgggcctgtgcgtgagcaagcccaagatgatcagcagcctggagcagaggaaggagccctgggccgccaagaggaccctgaccaggggcggctgcagcgacagcagggccctgggatctggctccggcagcggccccaagaaaaagagaaaagtctaagctgccttctgcggggcttgccttctggccatgcccttcttctctcccttgcacctgtacctcttggtctttgaataaagcctgagtaggaaggctagcaaaaaaaaaaaaaaaaaaaaaaaaaaaaaaaaaaaaaaaaaaaaaaaaaaaaaaaaaaaaaaaaaaaaaaaaaaaaaaaa

SEQ ID NO: 15358 - RNA, 9485 nt, synthetic construct
  source 1..9485: mol_type = other RNA
aggaaataagagagaaaagaagagtaagaagaaatataagagccaccatggcccctaagaagaagcgtaaagtgagccggatggaacgcctcgtctacgaggtgcggcagaagtgcagaaacatcgaggacatctgcatctcctgcggatctctgaacgtgaccctggagcacccactgttcatcggcggcatgtgccagaactgtaaaaactgttttctggagtgtgcctatcaatacgacgatgacggctaccagagctactgcaccatctgttgcggcggaagagaggtgctgatgtgtggaaataacaactgctgccggtgcttctgcgtggaatgcgtggacctgctggtgggccccggcgccgcccaggccgctattaaggaagatccttggaactgctacatgtgcggccacaagggcacatacggcctgctgagacggagagaggactggcctagcagactgcagatgttcttcgccaataaccacgaccaggagttcgacccccctaaggtgtaccctcccgtccccgccgagaagagaaagcccatccgggtcctgagcctgttcgatggcatcgccaccggtctgctggtgctgaaggacctgggcatccaggtggataggtacattgcctccgaggtgtgcgaggactccatcaccgtgggaatggtgcgtcatcagggcaagatcatgtacgtgggcgacgtgcggagcgtgacacagaagcatatccaggagtggggccctttcgacctggtgatcggcggcagcccttgcaatgacctgagcatcgtgaacccagcccggaagggcctgtacgagggaaccggcagactgttcttcgagttttacagactgctgcacgacgcccggcctaaggaaggcgacgaccggcccttcttttggctgttcgagaatgtggtggccatgggagtcagcgacaagcgggatattagccggttcctggagagcaaccccgtgatgatcgatgccaaggaagtgagcgccgcccaccgggccagatacttctggggcaatctgcctggcatgaacagacccctggccagcaccgtgaacgacaagctggagctgcaggagtgcctggagcacggccggatcgccaagttcagcaaggtgagaaccatcaccacccgaagcaacagcatcaaacaaggcaaggaccagcactttcctgtgttcatgaacgagaaggaggacatcctgtggtgtaccgagatggagagagtgttcgggttcccagtccactacacagatgtcagcaacatgtctagactggccagacagagactgctgggaagaagctggtccgtccctgtgatcagacacctgttcgcccctctgaaggagtacttcgcctgcgtgagcagcggcaacagcaacgccaacagccggggccccagcttctctagcggcctggtgccactgtccctgagagggagccacatgggccccatggagatctacaaaaccgtgagcgcctggaagcggcagcctgtgcgcgtgctgagcctgtttcggaatatcgataaagtcctgaaaagcctgggattcctggagagcggctctggctccggcggtggcaccctgaagtacgtggaggatgtgacaaacgtggtcagacgggatgtggagaagtggggccccttcgatctggtgtacggcagcacccaacccctgggcagctcttgtgaccggtgccctggctggtacatgtttcagttccaccggatcctgcagtacgccctgccgagacaggagtcccagcggccattcttttggattttcatggacaacttgctgctgaccgaggatgaccaggaaactaccactcggttcctgcagaccgaagccgtgaccctgcaggacgtgagaggccgggactaccagaacgccatgcgggtgtggtccaacatccctggactgaaaagcaagcacgcacctctgacccctaaagaagaggagtacctgcaggcccaggtgcggagcagaagcaagctggacgcccctaaggtggatctgctggtgaagaattgcctcctgcccctgagagagtacttcaagtatttcagccagaatagtctgcccctgggaggcagcggcggcggcgccctggtgacatttgaggacgtcgccgtgcggttcacccaggaggaatgggctctgctggatccttctcagaaaatcctgtaccgggacgtgatgagagagacataccggaatctgacctccgtgggcatcaactgggaatgttgggaccttgaagcctgcttcagaagcctgggaagaaacctgagagtgcaggtggtgaagagaaagtgcgagctgaccaacagcggcccctgcgccgagggcggcccaagcagcggcgcccctcctcccagcggcggcagcccagccggctccccaacctctaccgaggagggcacctctgagtccgccacccccgagagcggccctggcacctccaccgagcccagcgagggcagcgcacccggcagccctgccggcagccccacctccacagaggagggaaccagcaccgagcccagcgaaggcagcgccccaggcaccagcaccgagcctagtgagcaggagattaaacggatcaacaagatcagaagaagacttgtgaaagacagcaacaccaagaaggccggcaagacaggccccatgaaaaccctgctggttagagtgatgacacccgatctgagagagcggctggaaaacctgagaaagaagcctgaaaatatcccccagcccatcagcaatacatctagagccaacctgaataagctgctgaccgattacaccgaaatgaagaaggcgatcctgcatgtgtactgggaagagttccagaaggaccctgtgggcctgatgagccgggtggcccagcctgccagcaagaagatcgatcagaacaagctgaaacctgagatggacgagaagggcaacctgaccaccgccggctttgcctgctctcagtgtggccagcccctgttcgtgtacaagctggagcaggtgtctgagaagggcaaggcttacaccaactacttcggacggtgcaatgtggccgagcacgaaaagctgatcctgctggcccagctgaagcccgagaaggatagcgacgaagccgtgacatatagcctgggaaagtttgggcagagggccctggatttctacagcattcatgtgaccaaggagtccacccaccccgtgaagcccctggcccagatcgccggaaacagatacgcctccggacctgtgggaaaggccctgagcgacgcatgtatgggcacaatcgcctccttcctgtctaagtaccaggacatcatcatcgaacaccagaaggtggtgaagggcaaccagaagagactggagagcctgcgggagctggccggcaaggaaaacctggaataccctagcgtgaccctgccacctcagcctcacaccaaggagggcgttgatgcctacaacgaagtgatcgcccgggtgcgaatgtgggtgaacctgaacctgtggcagaagctgaagctaagcagagatgatgccaagcctctgctgagactgaagggattcccttcctttcctctggtcgagagacaggccaacgaagtggactggtgggacatggtgtgtaacgtgaagaagctgatcaacgagaaaaaggaggatggcaaggtgttttggcagaatctggctggctacaagagacaggaagccctgagaccatacctgagcagcgaggaagatcggaagaagggaaagaaattcgctcggtaccagctgggcgacctgctgctgcacctggaaaagaagcacggcgaggactggggaaaggtgtacgacgaggcctgggagcggattgacaagaaagtggaaggcctgagcaagcacatcaagctggaagaggaacggagaagcgaggacgcccagagcaaggccgccctgaccgactggctgcgggctaaggccagcttcgtgatcgagggcctgaaggaggccgacaaggacgagttctgcagatgcgagctgaagctgcagaagtggtacggggacctgcggggaaagcccttcgccatcgaagccgagaacagcatcctggacatcagcggcttcagcaagcagtacaactgtgccttcatctggcagaaggacggcgtgaagaagctgaacctgtacctgatcatcaactacttcaagggcggcaagctgcggttcaagaagatcaaacctgaagccttcgaagccaacagattctacaccgtgatcaacaaaaagagcggcgagatcgtgcccatggaggtgaacttcaacttcgacgaccccaacctgatcatcctgcctctggcctttggcaagagacagggcagagaattcatctggaacgacctgctgtccctggaaaccggcagcctgaagctggccaacggaagagtgatcgagaagacactgtacaacagaagaacccggcaggatgagcctgccctgttcgtggccctgaccttcgagcggcgggaggtcctggactcctccaatatcaaaccaatgaacctgatcggcgtggcaagaggcgaaaacatccccgccgtgatcgccctgaccgaccccgagggctgcccactgagccggtttaaggatagcctgggaaacccaacccacatcctgagaatcggcgagagctataaggagaagcagcggaccatccaggccaagaaggaggtggagcagcggagagccggcggctacagccggaagtacgccagcaaagccaagaatctggcagacgatatggtgagaaacaccgctagagatctgctgtactacgccgtgacccaggatgccatgctgatcttcgccaacctgagccggggcttcggccggcagggcaagcggaccttcatggccgagagacagtacacacggatggaggactggctgaccgccaagctggcctacgagggcctgagcaagacctacctgtccaagacactggcccagtacacctccaagacatgcagcaactgtgggtttaccatcaccagcgccgactacgacagggtgctggagaagctgaagaagacagcaacaggctggatgaccacaattaacggcaaggagctgaaggtggagggccagattacctactacaacagatacaagagacagaacgtagtcaaggacctgtccgtcgagctggatagactgagcgaagaatctgtgaacaacgacatctcctcctggacaaagggcagaagcggagaagctctgagcctcctgaagaaaagattctcccatagacccgtgcaggagaagttcgtgtgcctgaactgcggcttcgagacacacgcagccgagcaagccgccctgaacatcgccagatcctggctgttcctgcggagccaggagtacaagaaataccagacaaacaagacaaccggcaacaccgataagagagccttcgtcgagacctggcagtccttttaccggaagaagcttaaggaggtgtggaaacctgccgtgcggtctggcggatctggcggaggctccagcaagctgcccgtgaccttcggcgacctggccatctacttcagccaggaggagtgggagtggctgagccccatccagaaggacctgtacgaggacgtgatgctggagaactaccagaacctggtgagcctgggcctgagcttcaggaggcccaacgtgatcaccctgctggagaagggcaaggccccctggatggtggagcccgtgaggaagaggaggggcctggacagcaagagcaagtgcggcggcccaagcagcggcgcccctcctcccagcggcggcagcccagccggctccccaacctctaccgaggagggcacctctgagtccgccacccccgagagcggccctggcacctccaccgagcccagcgagggcagcgcacccggcagccctgccggcagccccacctccacagaggagggaaccagcaccgagcccagcgaaggcagcgccccaggcaccagcaccgagcctagtgagcaggagattaaacggatcaacaagatcagaagaagacttgtgaaagacagcaacaccaagaaggccggcaagacaggccccatgaaaaccctgctggttagagtgatgacacccgatctgagagagcggctggaaaacctgagaaagaagcctgaaaatatcccccagcccatcagcaatacatctagagccaacctgaataagctgctgaccgattacaccgaaatgaagaaggcgatcctgcatgtgtactgggaagagttccagaaggaccctgtgggcctgatgagccgggtggcccagcctgccagcaagaagatcgatcagaacaagctgaaacctgagatggacgagaagggcaacctgaccaccgccggctttgcctgctctcagtgtggccagcccctgttcgtgtacaagctggagcaggtgtctgagaagggcaaggcttacaccaactacttcggacggtgcaatgtggccgagcacgaaaagctgatcctgctggcccagctgaagcccgagaaggatagcgacgaagccgtgacatatagcctgggaaagtttgggcagagggccctggatttctacagcattcatgtgaccaaggagtccacccaccccgtgaagcccctggcccagatcgccggaaacagatacgcctccggacctgtgggaaaggccctgagcgacgcatgtatgggcacaatcgcctccttcctgtctaagtaccaggacatcatcatcgaacaccagaaggtggtgaagggcaaccagaagagactggagagcctgcgggagctggccggcaaggaaaacctggaataccctagcgtgaccctgccacctcagcctcacaccaaggagggcgttgatgcctacaacgaagtgatcgcccgggtgcgaatgtgggtgaacctgaacctgtggcagaagctgaagctaagcagagatgatgccaagcctctgctgagactgaagggattcccttcctttcctctggtcgagagacaggccaacgaagtggactggtgggacatggtgtgtaacgtgaagaagctgatcaacgagaaaaaggaggatggcaaggtgttttggcagaatctggctggctacaagagacaggaagccctgagaccatacctgagcagcgaggaagatcggaagaagggaaagaaattcgctcggtaccagctgggcgacctgctgctgcacctggaaaagaagcacggcgaggactggggaaaggtgtacgacgaggcctgggagcggattgacaagaaagtggaaggcctgagcaagcacatcaagctggaagaggaacggagaagcgaggacgcccagagcaaggccgccctgaccgactggctgcgggctaaggccagcttcgtgatcgagggcctgaaggaggccgacaaggacgagttctgcagatgcgagctgaagctgcagaagtggtacggggacctgcggggaaagcccttcgccatcgaagccgagaacagcatcctggacatcagcggcttcagcaagcagtacaactgtgccttcatctggcagaaggacggcgtgaagaagctgaacctgtacctgatcatcaactacttcaagggcggcaagctgcggttcaagaagatcaaacctgaagccttcgaagccaacagattctacaccgtgatcaacaaaaagagcggcgagatcgtgcccatggaggtgaacttcaacttcgacgaccccaacctgatcatcctgcctctggcctttggcaagagacagggcagagaattcatctggaacgacctgctgtccctggaaaccggcagcctgaagctggccaacggaagagtgatcgagaagacactgtacaacagaagaacccggcaggatgagcctgccctgttcgtggccctgaccttcgagcggcgggaggtcctggactcctccaatatcaaaccaatgaacctgatcggcgtggcaagaggcgaaaacatccccgccgtgatcgccctgaccgaccccgagggctgcccactgagccggtttaaggatagcctgggaaacccaacccacatcctgagaatcggcgagagctataaggagaagcagcggaccatccaggccaagaaggaggtggagcagcggagagccggcggctacagccggaagtacgccagcaaagccaagaatctggcagacgatatggtgagaaacaccgctagagatctgctgtactacgccgtgacccaggatgccatgctgatcttcgccaacctgagccggggcttcggccggcagggcaagcggaccttcatggccgagagacagtacacacggatggaggactggctgaccgccaagctggcctacgagggcctgagcaagacctacctgtccaagacactggcccagtacacctccaagacatgcagcaactgtgggtttaccatcaccagcgccgactacgacagggtgctggagaagctgaagaagacagcaacaggctggatgaccacaattaacggcaaggagctgaaggtggagggccagattacctactacaacagatacaagagacagaacgtagtcaaggacctgtccgtcgagctggatagactgagcgaagaatctgtgaacaacgacatctcctcctggacaaagggcagaagcggagaagctctgagcctcctgaagaaaagattctcccatagacccgtgcaggagaagttcgtgtgcctgaactgcggcttcgagacacacgcagccgagcaagccgccctgaacatcgccagatcctggctgttcctgcggagccaggagtacaagaaataccagacaaacaagacaaccggcaacaccgataagagagccttcgtcgagacctggcagtccttttaccggaagaagcttaaggaggtgtggaaacctgccgtgcggtctggcggatctggcggaggctcctagcaagctgcccgtgaccttcggcgacctggccatctacttcagccaggaggagtgggagtggctgagccccatccagaaggacctgtacgaggacgtgatgctggagaactaccagaacctggtgagcctgggcctgagcttcaggaggcccaacgtgatcaccctgctggagaagggcaaggccccctggatggtggagcccgtgaggaagaggaggggcctggacagcaagagcaagtgcggatctggctccggcagcggccccaagaaaaagagaaaagtctaagctgccttctgcggggcttgccttctggccatgcccttcttctctcccttgcacctgtacctcttggtctttgaataaagcctgagtaggaaggctagcaaaaaaaaaaaaaaaaaaaaaaaaaaaaaaaaaaaaaaaaaaaaaaaaaaaaaaaaaaaaaaaaaaaaaaaaaaaaaaaa

SEQ ID NO: 15359 - RNA, 9485 nt, synthetic construct
  source 1..9485: mol_type = other RNA
aggaaataagagagaaaagaagagtaagaagaaatataagagccaccatggcccctaagaagaagcgtaaagtgagccggatggaacgcctcgtctacgaggtgcggcagaagtgcagaaacatcgaggacatctgcatctcctgcggatctctgaacgtgaccctggagcacccactgttcatcggcggcatgtgccagaactgtaaaaactgttttctggagtgtgcctatcaatacgacgatgacggctaccagagctactgcaccatctgttgcggcggaagagaggtgctgatgtgtggaaataacaactgctgccggtgcttctgcgtggaatgcgtggacctgctggtgggccccggcgccgcccaggccgctattaaggaagatccttggaactgctacatgtgcggccacaagggcacatacggcctgctgagacggagagaggactggcctagcagactgcagatgttcttcgccaataaccacgaccaggagttcgacccccctaaggtgtaccctcccgtccccgccgagaagagaaagcccatccgggtcctgagcctgttcgatggcatcgccaccggtctgctggtgctgaaggacctgggcatccaggtggataggtacattgcctccgaggtgtgcgaggactccatcaccgtgggaatggtgcgtcatcagggcaagatcatgtacgtgggcgacgtgcggagcgtgacacagaagcatatccaggagtggggccctttcgacctggtgatcggcggcagcccttgcaatgacctgagcatcgtgaacccagcccggaagggcctgtacgagggaaccggcagactgttcttcgagttttacagactgctgcacgacgcccggcctaaggaaggcgacgaccggcccttcttttggctgttcgagaatgtggtggccatgggagtcagcgacaagcgggatattagccggttcctggagagcaaccccgtgatgatcgatgccaaggaagtgagcgccgcccaccgggccagatacttctggggcaatctgcctggcatgaacagacccctggccagcaccgtgaacgacaagctggagctgcaggagtgcctggagcacggccggatcgccaagttcagcaaggtgagaaccatcaccacccgaagcaacagcatcaaacaaggcaaggaccagcactttcctgtgttcatgaacgagaaggaggacatcctgtggtgtaccgagatggagagagtgttcgggttcccagtccactacacagatgtcagcaacatgtctagactggccagacagagactgctgggaagaagctggtccgtccctgtgatcagacacctgttcgcccctctgaaggagtacttcgcctgcgtgagcagcggcaacagcaacgccaacagccggggccccagcttctctagcggcctggtgccactgtccctgagagggagccacatgggccccatggagatctacaaaaccgtgagcgcctggaagcggcagcctgtgcgcgtgctgagcctgtttcggaatatcgataaagtcctgaaaagcctgggattcctggagagcggctctggctccggcggtggcaccctgaagtacgtggaggatgtgacaaacgtggtcagacgggatgtggagaagtggggccccttcgatctggtgtacggcagcacccaacccctgggcagctcttgtgaccggtgccctggctggtacatgtttcagttccaccggatcctgcagtacgccctgccgagacaggagtcccagcggccattcttttggattttcatggacaacttgctgctgaccgaggatgaccaggaaactaccactcggttcctgcagaccgaagccgtgaccctgcaggacgtgagaggccgggactaccagaacgccatgcgggtgtggtccaacatccctggactgaaaagcaagcacgcacctctgacccctaaagaagaggagtacctgcaggcccaggtgcggagcagaagcaagctggacgcccctaaggtggatctgctggtgaagaattgcctcctgcccctgagagagtacttcaagtatttcagccagaatagtctgcccctgggaggcagcggcggcggcgccctggtgacatttgaggacgtcgccgtgcggttcacccaggaggaatgggctctgctggatccttctcagaaaatcctgtaccgggacgtgatgagagagacataccggaatctgacctccgtgggcatcaactgggaatgttgggaccttgaagcctgcttcagaagcctgggaagaaacctgagagtgcaggtggtgaagagaaagtgcgagctgaccaacagcggcccctgcgccgagggcggcccaagcagcggcgcccctcctcccagcggcggcagcccagccggctccccaacctctaccgaggagggcacctctgagtccgccacccccgagagcggccctggcacctccaccgagcccagcgagggcagcgcacccggcagccctgccggcagccccacctccacagaggagggaaccagcaccgagcccagcgaaggcagcgccccaggcaccagcaccgagcctagtgagcaggagattaaacggatcaacaagatcagaagaagacttgtgaaagacagcaacaccaagaaggccggcaagacaggccccatgaaaaccctgctggttagagtgatgacacccgatctgagagagcggctggaaaacctgagaaagaagcctgaaaatatcccccagcccatcagcaatacatctagagccaacctgaataagctgctgaccgattacaccgaaatgaagaaggcgatcctgcatgtgtactgggaagagttccagaaggaccctgtgggcctgatgagccgggtggcccagcctgccagcaagaagatcgatcagaacaagctgaaacctgagatggacgagaagggcaacctgaccaccgccggctttgcctgctctcagtgtggccagcccctgttcgtgtacaagctggagcaggtgtctgagaagggcaaggcttacaccaactacttcggacggtgcaatgtggccgagcacgaaaagctgatcctgctggcccagctgaagcccgagaaggatagcgacgaagccgtgacatatagcctgggaaagtttgggcagagggccctggatttctacagcattcatgtgaccaaggagtccacccaccccgtgaagcccctggcccagatcgccggaaacagatacgcctccggacctgtgggaaaggccctgagcgacgcatgtatgggcacaatcgcctccttcctgtctaagtaccaggacatcatcatcgaacaccagaaggtggtgaagggcaaccagaagagactggagagcctgcgggagctggccggcaaggaaaacctggaataccctagcgtgaccctgccacctcagcctcacaccaaggagggcgttgatgcctacaacgaagtgatcgcccgggtgcgaatgtgggtgaacctgaacctgtggcagaagctgaagctaagcagagatgatgccaagcctctgctgagactgaagggattcccttcctttcctctggtcgagagacaggccaacgaagtggactggtgggacatggtgtgtaacgtgaagaagctgatcaacgagaaaaaggaggatggcaaggtgttttggcagaatctggctggctacaagagacaggaagccctgagaccatacctgagcagcgaggaagatcggaagaagggaaagaaattcgctcggtaccagctgggcgacctgctgctgcacctggaaaagaagcacggcgaggactggggaaaggtgtacgacgaggcctgggagcggattgacaagaaagtggaaggcctgagcaagcacatcaagctggaagaggaacggagaagcgaggacgcccagagcaaggccgccctgaccgactggctgcgggctaaggccagcttcgtgatcgagggcctgaaggaggccgacaaggacgagttctgcagatgcgagctgaagctgcagaagtggtacggggacctgcggggaaagcccttcgccatcgaagccgagaacagcatcctggacatcagcggcttcagcaagcagtacaactgtgccttcatctggcagaaggacggcgtgaagaagctgaacctgtacctgatcatcaactacttcaagggcggcaagctgcggttcaagaagatcaaacctgaagccttcgaagccaacagattctacaccgtgatcaacaaaaagagcggcgagatcgtgcccatggaggtgaacttcaacttcgacgaccccaacctgatcatcctgcctctggcctttggcaagagacagggcagagaattcatctggaacgacctgctgtccctggaaaccggcagcctgaagctggccaacggaagagtgatcgagaagacactgtacaacagaagaacccggcaggatgagcctgccctgttcgtggccctgaccttcgagcggcgggaggtcctggactcctccaatatcaaaccaatgaacctgatcggcgtggcaagaggcgaaaacatccccgccgtgatcgccctgaccgaccccgagggctgcccactgagccggtttaaggatagcctgggaaacccaacccacatcctgagaatcggcgagagctataaggagaagcagcggaccatccaggccaagaaggaggtggagcagcggagagccggcggctacagccggaagtacgccagcaaagccaagaatctggcagacgatatggtgagaaacaccgctagagatctgctgtactacgccgtgacccaggatgccatgctgatcttcgccaacctgagccggggcttcggccggcagggcaagcggaccttcatggccgagagacagtacacacggatggaggactggctgaccgccaagctggcctacgagggcctgagcaagacctacctgtccaagacactggcccagtacacctccaagacatgcagcaactgtgggtttaccatcaccagcgccgactacgacagggtgctggagaagctgaagaagacagcaacaggctggatgaccacaattaacggcaaggagctgaaggtggagggccagattacctactacaacagatacaagagacagaacgtagtcaaggacctgtccgtcgagctggatagactgagcgaagaatctgtgaacaacgacatctcctcctggacaaagggcagaagcggagaagctctgagcctcctgaagaaaagattctcccatagacccgtgcaggagaagttcgtgtgcctgaactgcggcttcgagacacacgcagccgagcaagccgccctgaacatcgccagatcctggctgttcctgcggagccaggagtacaagaaataccagacaaacaagacaaccggcaacaccgataagagagccttcgtcgagacctggcagtccttttaccggaagaagcttaaggaggtgtggaaacctgccgtgcggtctggcggatctggcggaggctcccaggaccccagcgccgagggcctgagcgaggaggtgcccgtggtgttcgaggagctgcccgtggtgttcgaggacgtggccgtgtacttcaccagggaggagtggggcatgctggacaagaggcagaaggagctgtacagggacgtgatgaggatgaactacgagctgctggccagcctgggccccgccgccgccaagcccgacctgatcagcaagctggagaggagggccgccccctggatcggcggcccaagcagcggcgcccctcctcccagcggcggcagcccagccggctccccaacctctaccgaggagggcacctctgagtccgccacccccgagagcggccctggcacctccaccgagcccagcgagggcagcgcacccggcagccctgccggcagccccacctccacagaggagggaaccagcaccgagcccagcgaaggcagcgccccaggcaccagcaccgagcctagtgagcaggagattaaacggatcaacaagatcagaagaagacttgtgaaagacagcaacaccaagaaggccggcaagacaggccccatgaaaaccctgctggttagagtgatgacacccgatctgagagagcggctggaaaacctgagaaagaagcctgaaaatatcccccagcccatcagcaatacatctagagccaacctgaataagctgctgaccgattacaccgaaatgaagaaggcgatcctgcatgtgtactgggaagagttccagaaggaccctgtgggcctgatgagccgggtggcccagcctgccagcaagaagatcgatcagaacaagctgaaacctgagatggacgagaagggcaacctgaccaccgccggctttgcctgctctcagtgtggccagcccctgttcgtgtacaagctggagcaggtgtctgagaagggcaaggcttacaccaactacttcggacggtgcaatgtggccgagcacgaaaagctgatcctgctggcccagctgaagcccgagaaggatagcgacgaagccgtgacatatagcctgggaaagtttgggcagagggccctggatttctacagcattcatgtgaccaaggagtccacccaccccgtgaagcccctggcccagatcgccggaaacagatacgcctccggacctgtgggaaaggccctgagcgacgcatgtatgggcacaatcgcctccttcctgtctaagtaccaggacatcatcatcgaacaccagaaggtggtgaagggcaaccagaagagactggagagcctgcgggagctggccggcaaggaaaacctggaataccctagcgtgaccctgccacctcagcctcacaccaaggagggcgttgatgcctacaacgaagtgatcgcccgggtgcgaatgtgggtgaacctgaacctgtggcagaagctgaagctaagcagagatgatgccaagcctctgctgagactgaagggattcccttcctttcctctggtcgagagacaggccaacgaagtggactggtgggacatggtgtgtaacgtgaagaagctgatcaacgagaaaaaggaggatggcaaggtgttttggcagaatctggctggctacaagagacaggaagccctgagaccatacctgagcagcgaggaagatcggaagaagggaaagaaattcgctcggtaccagctgggcgacctgctgctgcacctggaaaagaagcacggcgaggactggggaaaggtgtacgacgaggcctgggagcggattgacaagaaagtggaaggcctgagcaagcacatcaagctggaagaggaacggagaagcgaggacgcccagagcaaggccgccctgaccgactggctgcgggctaaggccagcttcgtgatcgagggcctgaaggaggccgacaaggacgagttctgcagatgcgagctgaagctgcagaagtggtacggggacctgcggggaaagcccttcgccatcgaagccgagaacagcatcctggacatcagcggcttcagcaagcagtacaactgtgccttcatctggcagaaggacggcgtgaagaagctgaacctgtacctgatcatcaactacttcaagggcggcaagctgcggttcaagaagatcaaacctgaagccttcgaagccaacagattctacaccgtgatcaacaaaaagagcggcgagatcgtgcccatggaggtgaacttcaacttcgacgaccccaacctgatcatcctgcctctggcctttggcaagagacagggcagagaattcatctggaacgacctgctgtccctggaaaccggcagcctgaagctggccaacggaagagtgatcgagaagacactgtacaacagaagaacccggcaggatgagcctgccctgttcgtggccctgaccttcgagcggcgggaggtcctggactcctccaatatcaaaccaatgaacctgatcggcgtggcaagaggcgaaaacatccccgccgtgatcgccctgaccgaccccgagggctgcccactgagccggtttaaggatagcctgggaaacccaacccacatcctgagaatcggcgagagctataaggagaagcagcggaccatccaggccaagaaggaggtggagcagcggagagccggcggctacagccggaagtacgccagcaaagccaagaatctggcagacgatatggtgagaaacaccgctagagatctgctgtactacgccgtgacccaggatgccatgctgatcttcgccaacctgagccggggcttcggccggcagggcaagcggaccttcatggccgagagacagtacacacggatggaggactggctgaccgccaagctggcctacgagggcctgagcaagacctacctgtccaagacactggcccagtacacctccaagacatgcagcaactgtgggtttaccatcaccagcgccgactacgacagggtgctggagaagctgaagaagacagcaacaggctggatgaccacaattaacggcaaggagctgaaggtggagggccagattacctactacaacagatacaagagacagaacgtagtcaaggacctgtccgtcgagctggatagactgagcgaagaatctgtgaacaacgacatctcctcctggacaaagggcagaagcggagaagctctgagcctcctgaagaaaagattctcccatagacccgtgcaggagaagttcgtgtgcctgaactgcggcttcgagacacacgcagccgagcaagccgccctgaacatcgccagatcctggctgttcctgcggagccaggagtacaagaaataccagacaaacaagacaaccggcaacaccgataagagagccttcgtcgagacctggcagtccttttaccggaagaagcttaaggaggtgtggaaacctgccgtgcggtctggcggatctggcggaggctcctcaggaccccagcgccgagggcctgagcgaggaggtgcccgtggtgttcgaggagctgcccgtggtgttcgaggacgtggccgtgtacttcaccagggaggagtggggcatgctggacaagaggcagaaggagctgtacagggacgtgatgaggatgaactacgagctgctggccagcctgggccccgccgccgccaagcccgacctgatcagcaagctggagaggagggccgccccctggatcggatctggctccggcagcggccccaagaaaaagagaaaagtctaagctgccttctgcggggcttgccttctggccatgcccttcttctctcccttgcacctgtacctcttggtctttgaataaagcctgagtaggaaggctagcaaaaaaaaaaaaaaaaaaaaaaaaaaaaaaaaaaaaaaaaaaaaaaaaaaaaaaaaaaaaaaaaaaaaaaaaaaaaaaaa

SEQ ID NO: 15360 - RNA, 9485 nt, synthetic construct
  source 1..9485: mol_type = other RNA
aggaaataagagagaaaagaagagtaagaagaaatataagagccaccatggcccctaagaagaagcgtaaagtgagccggatggaacgcctcgtctacgaggtgcggcagaagtgcagaaacatcgaggacatctgcatctcctgcggatctctgaacgtgaccctggagcacccactgttcatcggcggcatgtgccagaactgtaaaaactgttttctggagtgtgcctatcaatacgacgatgacggctaccagagctactgcaccatctgttgcggcggaagagaggtgctgatgtgtggaaataacaactgctgccggtgcttctgcgtggaatgcgtggacctgctggtgggccccggcgccgcccaggccgctattaaggaagatccttggaactgctacatgtgcggccacaagggcacatacggcctgctgagacggagagaggactggcctagcagactgcagatgttcttcgccaataaccacgaccaggagttcgacccccctaaggtgtaccctcccgtccccgccgagaagagaaagcccatccgggtcctgagcctgttcgatggcatcgccaccggtctgctggtgctgaaggacctgggcatccaggtggataggtacattgcctccgaggtgtgcgaggactccatcaccgtgggaatggtgcgtcatcagggcaagatcatgtacgtgggcgacgtgcggagcgtgacacagaagcatatccaggagtggggccctttcgacctggtgatcggcggcagcccttgcaatgacctgagcatcgtgaacccagcccggaagggcctgtacgagggaaccggcagactgttcttcgagttttacagactgctgcacgacgcccggcctaaggaaggcgacgaccggcccttcttttggctgttcgagaatgtggtggccatgggagtcagcgacaagcgggatattagccggttcctggagagcaaccccgtgatgatcgatgccaaggaagtgagcgccgcccaccgggccagatacttctggggcaatctgcctggcatgaacagacccctggccagcaccgtgaacgacaagctggagctgcaggagtgcctggagcacggccggatcgccaagttcagcaaggtgagaaccatcaccacccgaagcaacagcatcaaacaaggcaaggaccagcactttcctgtgttcatgaacgagaaggaggacatcctgtggtgtaccgagatggagagagtgttcgggttcccagtccactacacagatgtcagcaacatgtctagactggccagacagagactgctgggaagaagctggtccgtccctgtgatcagacacctgttcgcccctctgaaggagtacttcgcctgcgtgagcagcggcaacagcaacgccaacagccggggccccagcttctctagcggcctggtgccactgtccctgagagggagccacatgggccccatggagatctacaaaaccgtgagcgcctggaagcggcagcctgtgcgcgtgctgagcctgtttcggaatatcgataaagtcctgaaaagcctgggattcctggagagcggctctggctccggcggtggcaccctgaagtacgtggaggatgtgacaaacgtggtcagacgggatgtggagaagtggggccccttcgatctggtgtacggcagcacccaacccctgggcagctcttgtgaccggtgccctggctggtacatgtttcagttccaccggatcctgcagtacgccctgccgagacaggagtcccagcggccattcttttggattttcatggacaacttgctgctgaccgaggatgaccaggaaactaccactcggttcctgcagaccgaagccgtgaccctgcaggacgtgagaggccgggactaccagaacgccatgcgggtgtggtccaacatccctggactgaaaagcaagcacgcacctctgacccctaaagaagaggagtacctgcaggcccaggtgcggagcagaagcaagctggacgcccctaaggtggatctgctggtgaagaattgcctcctgcccctgagagagtacttcaagtatttcagccagaatagtctgcccctgggaggcagcggcggcggcgccctggtgacatttgaggacgtcgccgtgcggttcacccaggaggaatgggctctgctggatccttctcagaaaatcctgtaccgggacgtgatgagagagacataccggaatctgacctccgtgggcatcaactgggaatgttgggaccttgaagcctgcttcagaagcctgggaagaaacctgagagtgcaggtggtgaagagaaagtgcgagctgaccaacagcggcccctgcgccgagggcggcccaagcagcggcgcccctcctcccagcggcggcagcccagccggctccccaacctctaccgaggagggcacctctgagtccgccacccccgagagcggccctggcacctccaccgagcccagcgagggcagcgcacccggcagccctgccggcagccccacctccacagaggagggaaccagcaccgagcccagcgaaggcagcgccccaggcaccagcaccgagcctagtgagcaggagattaaacggatcaacaagatcagaagaagacttgtgaaagacagcaacaccaagaaggccggcaagacaggccccatgaaaaccctgctggttagagtgatgacacccgatctgagagagcggctggaaaacctgagaaagaagcctgaaaatatcccccagcccatcagcaatacatctagagccaacctgaataagctgctgaccgattacaccgaaatgaagaaggcgatcctgcatgtgtactgggaagagttccagaaggaccctgtgggcctgatgagccgggtggcccagcctgccagcaagaagatcgatcagaacaagctgaaacctgagatggacgagaagggcaacctgaccaccgccggctttgcctgctctcagtgtggccagcccctgttcgtgtacaagctggagcaggtgtctgagaagggcaaggcttacaccaactacttcggacggtgcaatgtggccgagcacgaaaagctgatcctgctggcccagctgaagcccgagaaggatagcgacgaagccgtgacatatagcctgggaaagtttgggcagagggccctggatttctacagcattcatgtgaccaaggagtccacccaccccgtgaagcccctggcccagatcgccggaaacagatacgcctccggacctgtgggaaaggccctgagcgacgcatgtatgggcacaatcgcctccttcctgtctaagtaccaggacatcatcatcgaacaccagaaggtggtgaagggcaaccagaagagactggagagcctgcgggagctggccggcaaggaaaacctggaataccctagcgtgaccctgccacctcagcctcacaccaaggagggcgttgatgcctacaacgaagtgatcgcccgggtgcgaatgtgggtgaacctgaacctgtggcagaagctgaagctaagcagagatgatgccaagcctctgctgagactgaagggattcccttcctttcctctggtcgagagacaggccaacgaagtggactggtgggacatggtgtgtaacgtgaagaagctgatcaacgagaaaaaggaggatggcaaggtgttttggcagaatctggctggctacaagagacaggaagccctgagaccatacctgagcagcgaggaagatcggaagaagggaaagaaattcgctcggtaccagctgggcgacctgctgctgcacctggaaaagaagcacggcgaggactggggaaaggtgtacgacgaggcctgggagcggattgacaagaaagtggaaggcctgagcaagcacatcaagctggaagaggaacggagaagcgaggacgcccagagcaaggccgccctgaccgactggctgcgggctaaggccagcttcgtgatcgagggcctgaaggaggccgacaaggacgagttctgcagatgcgagctgaagctgcagaagtggtacggggacctgcggggaaagcccttcgccatcgaagccgagaacagcatcctggacatcagcggcttcagcaagcagtacaactgtgccttcatctggcagaaggacggcgtgaagaagctgaacctgtacctgatcatcaactacttcaagggcggcaagctgcggttcaagaagatcaaacctgaagccttcgaagccaacagattctacaccgtgatcaacaaaaagagcggcgagatcgtgcccatggaggtgaacttcaacttcgacgaccccaacctgatcatcctgcctctggcctttggcaagagacagggcagagaattcatctggaacgacctgctgtccctggaaaccggcagcctgaagctggccaacggaagagtgatcgagaagacactgtacaacagaagaacccggcaggatgagcctgccctgttcgtggccctgaccttcgagcggcgggaggtcctggactcctccaatatcaaaccaatgaacctgatcggcgtggcaagaggcgaaaacatccccgccgtgatcgccctgaccgaccccgagggctgcccactgagccggtttaaggatagcctgggaaacccaacccacatcctgagaatcggcgagagctataaggagaagcagcggaccatccaggccaagaaggaggtggagcagcggagagccggcggctacagccggaagtacgccagcaaagccaagaatctggcagacgatatggtgagaaacaccgctagagatctgctgtactacgccgtgacccaggatgccatgctgatcttcgccaacctgagccggggcttcggccggcagggcaagcggaccttcatggccgagagacagtacacacggatggaggactggctgaccgccaagctggcctacgagggcctgagcaagacctacctgtccaagacactggcccagtacacctccaagacatgcagcaactgtgggtttaccatcaccagcgccgactacgacagggtgctggagaagctgaagaagacagcaacaggctggatgaccacaattaacggcaaggagctgaaggtggagggccagattacctactacaacagatacaagagacagaacgtagtcaaggacctgtccgtcgagctggatagactgagcgaagaatctgtgaacaacgacatctcctcctggacaaagggcagaagcggagaagctctgagcctcctgaagaaaagattctcccatagacccgtgcaggagaagttcgtgtgcctgaactgcggcttcgagacacacgcagccgagcaagccgccctgaacatcgccagatcctggctgttcctgcggagccaggagtacaagaaataccagacaaacaagacaaccggcaacaccgataagagagccttcgtcgagacctggcagtccttttaccggaagaagcttaaggaggtgtggaaacctgccgtgcggtctggcggatctggcggaggctccatccagaacaccgtgacctacgacgacgtgcacatcgacttcacctgggaggagtggaccctgctggaccccagccagaggaacctgtacaaggacgtgatggtggagacctacaccaacctgaccgccgtgggctacagctgggaggaccacaacatggaggagcactgccagagcagccagaggcagaggaggtacaagaggagcaacaccggcgagaagccctgcgagtacacccagtgcggcggcccaagcagcggcgcccctcctcccagcggcggcagcccagccggctccccaacctctaccgaggagggcacctctgagtccgccacccccgagagcggccctggcacctccaccgagcccagcgagggcagcgcacccggcagccctgccggcagccccacctccacagaggagggaaccagcaccgagcccagcgaaggcagcgccccaggcaccagcaccgagcctagtgagcaggagattaaacggatcaacaagatcagaagaagacttgtgaaagacagcaacaccaagaaggccggcaagacaggccccatgaaaaccctgctggttagagtgatgacacccgatctgagagagcggctggaaaacctgagaaagaagcctgaaaatatcccccagcccatcagcaatacatctagagccaacctgaataagctgctgaccgattacaccgaaatgaagaaggcgatcctgcatgtgtactgggaagagttccagaaggaccctgtgggcctgatgagccgggtggcccagcctgccagcaagaagatcgatcagaacaagctgaaacctgagatggacgagaagggcaacctgaccaccgccggctttgcctgctctcagtgtggccagcccctgttcgtgtacaagctggagcaggtgtctgagaagggcaaggcttacaccaactacttcggacggtgcaatgtggccgagcacgaaaagctgatcctgctggcccagctgaagcccgagaaggatagcgacgaagccgtgacatatagcctgggaaagtttgggcagagggccctggatttctacagcattcatgtgaccaaggagtccacccaccccgtgaagcccctggcccagatcgccggaaacagatacgcctccggacctgtgggaaaggccctgagcgacgcatgtatgggcacaatcgcctccttcctgtctaagtaccaggacatcatcatcgaacaccagaaggtggtgaagggcaaccagaagagactggagagcctgcgggagctggccggcaaggaaaacctggaataccctagcgtgaccctgccacctcagcctcacaccaaggagggcgttgatgcctacaacgaagtgatcgcccgggtgcgaatgtgggtgaacctgaacctgtggcagaagctgaagctaagcagagatgatgccaagcctctgctgagactgaagggattcccttcctttcctctggtcgagagacaggccaacgaagtggactggtgggacatggtgtgtaacgtgaagaagctgatcaacgagaaaaaggaggatggcaaggtgttttggcagaatctggctggctacaagagacaggaagccctgagaccatacctgagcagcgaggaagatcggaagaagggaaagaaattcgctcggtaccagctgggcgacctgctgctgcacctggaaaagaagcacggcgaggactggggaaaggtgtacgacgaggcctgggagcggattgacaagaaagtggaaggcctgagcaagcacatcaagctggaagaggaacggagaagcgaggacgcccagagcaaggccgccctgaccgactggctgcgggctaaggccagcttcgtgatcgagggcctgaaggaggccgacaaggacgagttctgcagatgcgagctgaagctgcagaagtggtacggggacctgcggggaaagcccttcgccatcgaagccgagaacagcatcctggacatcagcggcttcagcaagcagtacaactgtgccttcatctggcagaaggacggcgtgaagaagctgaacctgtacctgatcatcaactacttcaagggcggcaagctgcggttcaagaagatcaaacctgaagccttcgaagccaacagattctacaccgtgatcaacaaaaagagcggcgagatcgtgcccatggaggtgaacttcaacttcgacgaccccaacctgatcatcctgcctctggcctttggcaagagacagggcagagaattcatctggaacgacctgctgtccctggaaaccggcagcctgaagctggccaacggaagagtgatcgagaagacactgtacaacagaagaacccggcaggatgagcctgccctgttcgtggccctgaccttcgagcggcgggaggtcctggactcctccaatatcaaaccaatgaacctgatcggcgtggcaagaggcgaaaacatccccgccgtgatcgccctgaccgaccccgagggctgcccactgagccggtttaaggatagcctgggaaacccaacccacatcctgagaatcggcgagagctataaggagaagcagcggaccatccaggccaagaaggaggtggagcagcggagagccggcggctacagccggaagtacgccagcaaagccaagaatctggcagacgatatggtgagaaacaccgctagagatctgctgtactacgccgtgacccaggatgccatgctgatcttcgccaacctgagccggggcttcggccggcagggcaagcggaccttcatggccgagagacagtacacacggatggaggactggctgaccgccaagctggcctacgagggcctgagcaagacctacctgtccaagacactggcccagtacacctccaagacatgcagcaactgtgggtttaccatcaccagcgccgactacgacagggtgctggagaagctgaagaagacagcaacaggctggatgaccacaattaacggcaaggagctgaaggtggagggccagattacctactacaacagatacaagagacagaacgtagtcaaggacctgtccgtcgagctggatagactgagcgaagaatctgtgaacaacgacatctcctcctggacaaagggcagaagcggagaagctctgagcctcctgaagaaaagattctcccatagacccgtgcaggagaagttcgtgtgcctgaactgcggcttcgagacacacgcagccgagcaagccgccctgaacatcgccagatcctggctgttcctgcggagccaggagtacaagaaataccagacaaacaagacaaccggcaacaccgataagagagccttcgtcgagacctggcagtccttttaccggaagaagcttaaggaggtgtggaaacctgccgtgcggtctggcggatctggcggaggctcctatccagaacaccgtgacctacgacgacgtgcacatcgacttcacctgggaggagtggaccctgctggaccccagccagaggaacctgtacaaggacgtgatggtggagacctacaccaacctgaccgccgtgggctacagctgggaggaccacaacatggaggagcactgccagagcagccagaggcagaggaggtacaagaggagcaacaccggcgagaagccctgcgagtacacccagtgcggatctggctccggcagcggccccaagaaaaagagaaaagtctaagctgccttctgcggggcttgccttctggccatgcccttcttctctcccttgcacctgtacctcttggtctttgaataaagcctgagtaggaaggctagcaaaaaaaaaaaaaaaaaaaaaaaaaaaaaaaaaaaaaaaaaaaaaaaaaaaaaaaaaaaaaaaaaaaaaaaaaaaaaaaa

SEQ ID NO: 15361 - RNA, 9485 nt, synthetic construct
  source 1..9485: mol_type = other RNA
aggaaataagagagaaaagaagagtaagaagaaatataagagccaccatggcccctaagaagaagcgtaaagtgagccggatggaacgcctcgtctacgaggtgcggcagaagtgcagaaacatcgaggacatctgcatctcctgcggatctctgaacgtgaccctggagcacccactgttcatcggcggcatgtgccagaactgtaaaaactgttttctggagtgtgcctatcaatacgacgatgacggctaccagagctactgcaccatctgttgcggcggaagagaggtgctgatgtgtggaaataacaactgctgccggtgcttctgcgtggaatgcgtggacctgctggtgggccccggcgccgcccaggccgctattaaggaagatccttggaactgctacatgtgcggccacaagggcacatacggcctgctgagacggagagaggactggcctagcagactgcagatgttcttcgccaataaccacgaccaggagttcgacccccctaaggtgtaccctcccgtccccgccgagaagagaaagcccatccgggtcctgagcctgttcgatggcatcgccaccggtctgctggtgctgaaggacctgggcatccaggtggataggtacattgcctccgaggtgtgcgaggactccatcaccgtgggaatggtgcgtcatcagggcaagatcatgtacgtgggcgacgtgcggagcgtgacacagaagcatatccaggagtggggccctttcgacctggtgatcggcggcagcccttgcaatgacctgagcatcgtgaacccagcccggaagggcctgtacgagggaaccggcagactgttcttcgagttttacagactgctgcacgacgcccggcctaaggaaggcgacgaccggcccttcttttggctgttcgagaatgtggtggccatgggagtcagcgacaagcgggatattagccggttcctggagagcaaccccgtgatgatcgatgccaaggaagtgagcgccgcccaccgggccagatacttctggggcaatctgcctggcatgaacagacccctggccagcaccgtgaacgacaagctggagctgcaggagtgcctggagcacggccggatcgccaagttcagcaaggtgagaaccatcaccacccgaagcaacagcatcaaacaaggcaaggaccagcactttcctgtgttcatgaacgagaaggaggacatcctgtggtgtaccgagatggagagagtgttcgggttcccagtccactacacagatgtcagcaacatgtctagactggccagacagagactgctgggaagaagctggtccgtccctgtgatcagacacctgttcgcccctctgaaggagtacttcgcctgcgtgagcagcggcaacagcaacgccaacagccggggccccagcttctctagcggcctggtgccactgtccctgagagggagccacatgggccccatggagatctacaaaaccgtgagcgcctggaagcggcagcctgtgcgcgtgctgagcctgtttcggaatatcgataaagtcctgaaaagcctgggattcctggagagcggctctggctccggcggtggcaccctgaagtacgtggaggatgtgacaaacgtggtcagacgggatgtggagaagtggggccccttcgatctggtgtacggcagcacccaacccctgggcagctcttgtgaccggtgccctggctggtacatgtttcagttccaccggatcctgcagtacgccctgccgagacaggagtcccagcggccattcttttggattttcatggacaacttgctgctgaccgaggatgaccaggaaactaccactcggttcctgcagaccgaagccgtgaccctgcaggacgtgagaggccgggactaccagaacgccatgcgggtgtggtccaacatccctggactgaaaagcaagcacgcacctctgacccctaaagaagaggagtacctgcaggcccaggtgcggagcagaagcaagctggacgcccctaaggtggatctgctggtgaagaattgcctcctgcccctgagagagtacttcaagtatttcagccagaatagtctgcccctgggaggcagcggcggcggcgccctggtgacatttgaggacgtcgccgtgcggttcacccaggaggaatgggctctgctggatccttctcagaaaatcctgtaccgggacgtgatgagagagacataccggaatctgacctccgtgggcatcaactgggaatgttgggaccttgaagcctgcttcagaagcctgggaagaaacctgagagtgcaggtggtgaagagaaagtgcgagctgaccaacagcggcccctgcgccgagggcggcccaagcagcggcgcccctcctcccagcggcggcagcccagccggctccccaacctctaccgaggagggcacctctgagtccgccacccccgagagcggccctggcacctccaccgagcccagcgagggcagcgcacccggcagccctgccggcagccccacctccacagaggagggaaccagcaccgagcccagcgaaggcagcgccccaggcaccagcaccgagcctagtgagcaggagattaaacggatcaacaagatcagaagaagacttgtgaaagacagcaacaccaagaaggccggcaagacaggccccatgaaaaccctgctggttagagtgatgacacccgatctgagagagcggctggaaaacctgagaaagaagcctgaaaatatcccccagcccatcagcaatacatctagagccaacctgaataagctgctgaccgattacaccgaaatgaagaaggcgatcctgcatgtgtactgggaagagttccagaaggaccctgtgggcctgatgagccgggtggcccagcctgccagcaagaagatcgatcagaacaagctgaaacctgagatggacgagaagggcaacctgaccaccgccggctttgcctgctctcagtgtggccagcccctgttcgtgtacaagctggagcaggtgtctgagaagggcaaggcttacaccaactacttcggacggtgcaatgtggccgagcacgaaaagctgatcctgctggcccagctgaagcccgagaaggatagcgacgaagccgtgacatatagcctgggaaagtttgggcagagggccctggatttctacagcattcatgtgaccaaggagtccacccaccccgtgaagcccctggcccagatcgccggaaacagatacgcctccggacctgtgggaaaggccctgagcgacgcatgtatgggcacaatcgcctccttcctgtctaagtaccaggacatcatcatcgaacaccagaaggtggtgaagggcaaccagaagagactggagagcctgcgggagctggccggcaaggaaaacctggaataccctagcgtgaccctgccacctcagcctcacaccaaggagggcgttgatgcctacaacgaagtgatcgcccgggtgcgaatgtgggtgaacctgaacctgtggcagaagctgaagctaagcagagatgatgccaagcctctgctgagactgaagggattcccttcctttcctctggtcgagagacaggccaacgaagtggactggtgggacatggtgtgtaacgtgaagaagctgatcaacgagaaaaaggaggatggcaaggtgttttggcagaatctggctggctacaagagacaggaagccctgagaccatacctgagcagcgaggaagatcggaagaagggaaagaaattcgctcggtaccagctgggcgacctgctgctgcacctggaaaagaagcacggcgaggactggggaaaggtgtacgacgaggcctgggagcggattgacaagaaagtggaaggcctgagcaagcacatcaagctggaagaggaacggagaagcgaggacgcccagagcaaggccgccctgaccgactggctgcgggctaaggccagcttcgtgatcgagggcctgaaggaggccgacaaggacgagttctgcagatgcgagctgaagctgcagaagtggtacggggacctgcggggaaagcccttcgccatcgaagccgagaacagcatcctggacatcagcggcttcagcaagcagtacaactgtgccttcatctggcagaaggacggcgtgaagaagctgaacctgtacctgatcatcaactacttcaagggcggcaagctgcggttcaagaagatcaaacctgaagccttcgaagccaacagattctacaccgtgatcaacaaaaagagcggcgagatcgtgcccatggaggtgaacttcaacttcgacgaccccaacctgatcatcctgcctctggcctttggcaagagacagggcagagaattcatctggaacgacctgctgtccctggaaaccggcagcctgaagctggccaacggaagagtgatcgagaagacactgtacaacagaagaacccggcaggatgagcctgccctgttcgtggccctgaccttcgagcggcgggaggtcctggactcctccaatatcaaaccaatgaacctgatcggcgtggcaagaggcgaaaacatccccgccgtgatcgccctgaccgaccccgagggctgcccactgagccggtttaaggatagcctgggaaacccaacccacatcctgagaatcggcgagagctataaggagaagcagcggaccatccaggccaagaaggaggtggagcagcggagagccggcggctacagccggaagtacgccagcaaagccaagaatctggcagacgatatggtgagaaacaccgctagagatctgctgtactacgccgtgacccaggatgccatgctgatcttcgccaacctgagccggggcttcggccggcagggcaagcggaccttcatggccgagagacagtacacacggatggaggactggctgaccgccaagctggcctacgagggcctgagcaagacctacctgtccaagacactggcccagtacacctccaagacatgcagcaactgtgggtttaccatcaccagcgccgactacgacagggtgctggagaagctgaagaagacagcaacaggctggatgaccacaattaacggcaaggagctgaaggtggagggccagattacctactacaacagatacaagagacagaacgtagtcaaggacctgtccgtcgagctggatagactgagcgaagaatctgtgaacaacgacatctcctcctggacaaagggcagaagcggagaagctctgagcctcctgaagaaaagattctcccatagacccgtgcaggagaagttcgtgtgcctgaactgcggcttcgagacacacgcagccgagcaagccgccctgaacatcgccagatcctggctgttcctgcggagccaggagtacaagaaataccagacaaacaagacaaccggcaacaccgataagagagccttcgtcgagacctggcagtccttttaccggaagaagcttaaggaggtgtggaaacctgccgtgcggtctggcggatctggcggaggctcccaggaccccagcgccgagggcctgagcgaggaggtgcccgtggtgttcgaggagctgcccgtggtgttcgaggacgtggccgtgtacttcaccagggaggagtggggcatgctggacaagtggcagaaggagctgtacagggacgtgatgaggatgaactacgagctgctggccagcctgggccccgccgccgccaagcccgacctgatcagcaagctggagaggagggccgccccctggatcggcggcccaagcagcggcgcccctcctcccagcggcggcagcccagccggctccccaacctctaccgaggagggcacctctgagtccgccacccccgagagcggccctggcacctccaccgagcccagcgagggcagcgcacccggcagccctgccggcagccccacctccacagaggagggaaccagcaccgagcccagcgaaggcagcgccccaggcaccagcaccgagcctagtgagcaggagattaaacggatcaacaagatcagaagaagacttgtgaaagacagcaacaccaagaaggccggcaagacaggccccatgaaaaccctgctggttagagtgatgacacccgatctgagagagcggctggaaaacctgagaaagaagcctgaaaatatcccccagcccatcagcaatacatctagagccaacctgaataagctgctgaccgattacaccgaaatgaagaaggcgatcctgcatgtgtactgggaagagttccagaaggaccctgtgggcctgatgagccgggtggcccagcctgccagcaagaagatcgatcagaacaagctgaaacctgagatggacgagaagggcaacctgaccaccgccggctttgcctgctctcagtgtggccagcccctgttcgtgtacaagctggagcaggtgtctgagaagggcaaggcttacaccaactacttcggacggtgcaatgtggccgagcacgaaaagctgatcctgctggcccagctgaagcccgagaaggatagcgacgaagccgtgacatatagcctgggaaagtttgggcagagggccctggatttctacagcattcatgtgaccaaggagtccacccaccccgtgaagcccctggcccagatcgccggaaacagatacgcctccggacctgtgggaaaggccctgagcgacgcatgtatgggcacaatcgcctccttcctgtctaagtaccaggacatcatcatcgaacaccagaaggtggtgaagggcaaccagaagagactggagagcctgcgggagctggccggcaaggaaaacctggaataccctagcgtgaccctgccacctcagcctcacaccaaggagggcgttgatgcctacaacgaagtgatcgcccgggtgcgaatgtgggtgaacctgaacctgtggcagaagctgaagctaagcagagatgatgccaagcctctgctgagactgaagggattcccttcctttcctctggtcgagagacaggccaacgaagtggactggtgggacatggtgtgtaacgtgaagaagctgatcaacgagaaaaaggaggatggcaaggtgttttggcagaatctggctggctacaagagacaggaagccctgagaccatacctgagcagcgaggaagatcggaagaagggaaagaaattcgctcggtaccagctgggcgacctgctgctgcacctggaaaagaagcacggcgaggactggggaaaggtgtacgacgaggcctgggagcggattgacaagaaagtggaaggcctgagcaagcacatcaagctggaagaggaacggagaagcgaggacgcccagagcaaggccgccctgaccgactggctgcgggctaaggccagcttcgtgatcgagggcctgaaggaggccgacaaggacgagttctgcagatgcgagctgaagctgcagaagtggtacggggacctgcggggaaagcccttcgccatcgaagccgagaacagcatcctggacatcagcggcttcagcaagcagtacaactgtgccttcatctggcagaaggacggcgtgaagaagctgaacctgtacctgatcatcaactacttcaagggcggcaagctgcggttcaagaagatcaaacctgaagccttcgaagccaacagattctacaccgtgatcaacaaaaagagcggcgagatcgtgcccatggaggtgaacttcaacttcgacgaccccaacctgatcatcctgcctctggcctttggcaagagacagggcagagaattcatctggaacgacctgctgtccctggaaaccggcagcctgaagctggccaacggaagagtgatcgagaagacactgtacaacagaagaacccggcaggatgagcctgccctgttcgtggccctgaccttcgagcggcgggaggtcctggactcctccaatatcaaaccaatgaacctgatcggcgtggcaagaggcgaaaacatccccgccgtgatcgccctgaccgaccccgagggctgcccactgagccggtttaaggatagcctgggaaacccaacccacatcctgagaatcggcgagagctataaggagaagcagcggaccatccaggccaagaaggaggtggagcagcggagagccggcggctacagccggaagtacgccagcaaagccaagaatctggcagacgatatggtgagaaacaccgctagagatctgctgtactacgccgtgacccaggatgccatgctgatcttcgccaacctgagccggggcttcggccggcagggcaagcggaccttcatggccgagagacagtacacacggatggaggactggctgaccgccaagctggcctacgagggcctgagcaagacctacctgtccaagacactggcccagtacacctccaagacatgcagcaactgtgggtttaccatcaccagcgccgactacgacagggtgctggagaagctgaagaagacagcaacaggctggatgaccacaattaacggcaaggagctgaaggtggagggccagattacctactacaacagatacaagagacagaacgtagtcaaggacctgtccgtcgagctggatagactgagcgaagaatctgtgaacaacgacatctcctcctggacaaagggcagaagcggagaagctctgagcctcctgaagaaaagattctcccatagacccgtgcaggagaagttcgtgtgcctgaactgcggcttcgagacacacgcagccgagcaagccgccctgaacatcgccagatcctggctgttcctgcggagccaggagtacaagaaataccagacaaacaagacaaccggcaacaccgataagagagccttcgtcgagacctggcagtccttttaccggaagaagcttaaggaggtgtggaaacctgccgtgcggtctggcggatctggcggaggctcctcaggaccccagcgccgagggcctgagcgaggaggtgcccgtggtgttcgaggagctgcccgtggtgttcgaggacgtggccgtgtacttcaccagggaggagtggggcatgctggacaagtggcagaaggagctgtacagggacgtgatgaggatgaactacgagctgctggccagcctgggccccgccgccgccaagcccgacctgatcagcaagctggagaggagggccgccccctggatcggatctggctccggcagcggccccaagaaaaagagaaaagtctaagctgccttctgcggggcttgccttctggccatgcccttcttctctcccttgcacctgtacctcttggtctttgaataaagcctgagtaggaaggctagcaaaaaaaaaaaaaaaaaaaaaaaaaaaaaaaaaaaaaaaaaaaaaaaaaaaaaaaaaaaaaaaaaaaaaaaaaaaaaaaa

SEQ ID NO: 15362 - RNA, 9485 nt, synthetic construct
  source 1..9485: mol_type = other RNA
aggaaataagagagaaaagaagagtaagaagaaatataagagccaccatggcccctaagaagaagcgtaaagtgagccggatggaacgcctcgtctacgaggtgcggcagaagtgcagaaacatcgaggacatctgcatctcctgcggatctctgaacgtgaccctggagcacccactgttcatcggcggcatgtgccagaactgtaaaaactgttttctggagtgtgcctatcaatacgacgatgacggctaccagagctactgcaccatctgttgcggcggaagagaggtgctgatgtgtggaaataacaactgctgccggtgcttctgcgtggaatgcgtggacctgctggtgggccccggcgccgcccaggccgctattaaggaagatccttggaactgctacatgtgcggccacaagggcacatacggcctgctgagacggagagaggactggcctagcagactgcagatgttcttcgccaataaccacgaccaggagttcgacccccctaaggtgtaccctcccgtccccgccgagaagagaaagcccatccgggtcctgagcctgttcgatggcatcgccaccggtctgctggtgctgaaggacctgggcatccaggtggataggtacattgcctccgaggtgtgcgaggactccatcaccgtgggaatggtgcgtcatcagggcaagatcatgtacgtgggcgacgtgcggagcgtgacacagaagcatatccaggagtggggccctttcgacctggtgatcggcggcagcccttgcaatgacctgagcatcgtgaacccagcccggaagggcctgtacgagggaaccggcagactgttcttcgagttttacagactgctgcacgacgcccggcctaaggaaggcgacgaccggcccttcttttggctgttcgagaatgtggtggccatgggagtcagcgacaagcgggatattagccggttcctggagagcaaccccgtgatgatcgatgccaaggaagtgagcgccgcccaccgggccagatacttctggggcaatctgcctggcatgaacagacccctggccagcaccgtgaacgacaagctggagctgcaggagtgcctggagcacggccggatcgccaagttcagcaaggtgagaaccatcaccacccgaagcaacagcatcaaacaaggcaaggaccagcactttcctgtgttcatgaacgagaaggaggacatcctgtggtgtaccgagatggagagagtgttcgggttcccagtccactacacagatgtcagcaacatgtctagactggccagacagagactgctgggaagaagctggtccgtccctgtgatcagacacctgttcgcccctctgaaggagtacttcgcctgcgtgagcagcggcaacagcaacgccaacagccggggccccagcttctctagcggcctggtgccactgtccctgagagggagccacatgggccccatggagatctacaaaaccgtgagcgcctggaagcggcagcctgtgcgcgtgctgagcctgtttcggaatatcgataaagtcctgaaaagcctgggattcctggagagcggctctggctccggcggtggcaccctgaagtacgtggaggatgtgacaaacgtggtcagacgggatgtggagaagtggggccccttcgatctggtgtacggcagcacccaacccctgggcagctcttgtgaccggtgccctggctggtacatgtttcagttccaccggatcctgcagtacgccctgccgagacaggagtcccagcggccattcttttggattttcatggacaacttgctgctgaccgaggatgaccaggaaactaccactcggttcctgcagaccgaagccgtgaccctgcaggacgtgagaggccgggactaccagaacgccatgcgggtgtggtccaacatccctggactgaaaagcaagcacgcacctctgacccctaaagaagaggagtacctgcaggcccaggtgcggagcagaagcaagctggacgcccctaaggtggatctgctggtgaagaattgcctcctgcccctgagagagtacttcaagtatttcagccagaatagtctgcccctgggaggcagcggcggcggcgccctggtgacatttgaggacgtcgccgtgcggttcacccaggaggaatgggctctgctggatccttctcagaaaatcctgtaccgggacgtgatgagagagacataccggaatctgacctccgtgggcatcaactgggaatgttgggaccttgaagcctgcttcagaagcctgggaagaaacctgagagtgcaggtggtgaagagaaagtgcgagctgaccaacagcggcccctgcgccgagggcggcccaagcagcggcgcccctcctcccagcggcggcagcccagccggctccccaacctctaccgaggagggcacctctgagtccgccacccccgagagcggccctggcacctccaccgagcccagcgagggcagcgcacccggcagccctgccggcagccccacctccacagaggagggaaccagcaccgagcccagcgaaggcagcgccccaggcaccagcaccgagcctagtgagcaggagattaaacggatcaacaagatcagaagaagacttgtgaaagacagcaacaccaagaaggccggcaagacaggccccatgaaaaccctgctggttagagtgatgacacccgatctgagagagcggctggaaaacctgagaaagaagcctgaaaatatcccccagcccatcagcaatacatctagagccaacctgaataagctgctgaccgattacaccgaaatgaagaaggcgatcctgcatgtgtactgggaagagttccagaaggaccctgtgggcctgatgagccgggtggcccagcctgccagcaagaagatcgatcagaacaagctgaaacctgagatggacgagaagggcaacctgaccaccgccggctttgcctgctctcagtgtggccagcccctgttcgtgtacaagctggagcaggtgtctgagaagggcaaggcttacaccaactacttcggacggtgcaatgtggccgagcacgaaaagctgatcctgctggcccagctgaagcccgagaaggatagcgacgaagccgtgacatatagcctgggaaagtttgggcagagggccctggatttctacagcattcatgtgaccaaggagtccacccaccccgtgaagcccctggcccagatcgccggaaacagatacgcctccggacctgtgggaaaggccctgagcgacgcatgtatgggcacaatcgcctccttcctgtctaagtaccaggacatcatcatcgaacaccagaaggtggtgaagggcaaccagaagagactggagagcctgcgggagctggccggcaaggaaaacctggaataccctagcgtgaccctgccacctcagcctcacaccaaggagggcgttgatgcctacaacgaagtgatcgcccgggtgcgaatgtgggtgaacctgaacctgtggcagaagctgaagctaagcagagatgatgccaagcctctgctgagactgaagggattcccttcctttcctctggtcgagagacaggccaacgaagtggactggtgggacatggtgtgtaacgtgaagaagctgatcaacgagaaaaaggaggatggcaaggtgttttggcagaatctggctggctacaagagacaggaagccctgagaccatacctgagcagcgaggaagatcggaagaagggaaagaaattcgctcggtaccagctgggcgacctgctgctgcacctggaaaagaagcacggcgaggactggggaaaggtgtacgacgaggcctgggagcggattgacaagaaagtggaaggcctgagcaagcacatcaagctggaagaggaacggagaagcgaggacgcccagagcaaggccgccctgaccgactggctgcgggctaaggccagcttcgtgatcgagggcctgaaggaggccgacaaggacgagttctgcagatgcgagctgaagctgcagaagtggtacggggacctgcggggaaagcccttcgccatcgaagccgagaacagcatcctggacatcagcggcttcagcaagcagtacaactgtgccttcatctggcagaaggacggcgtgaagaagctgaacctgtacctgatcatcaactacttcaagggcggcaagctgcggttcaagaagatcaaacctgaagccttcgaagccaacagattctacaccgtgatcaacaaaaagagcggcgagatcgtgcccatggaggtgaacttcaacttcgacgaccccaacctgatcatcctgcctctggcctttggcaagagacagggcagagaattcatctggaacgacctgctgtccctggaaaccggcagcctgaagctggccaacggaagagtgatcgagaagacactgtacaacagaagaacccggcaggatgagcctgccctgttcgtggccctgaccttcgagcggcgggaggtcctggactcctccaatatcaaaccaatgaacctgatcggcgtggcaagaggcgaaaacatccccgccgtgatcgccctgaccgaccccgagggctgcccactgagccggtttaaggatagcctgggaaacccaacccacatcctgagaatcggcgagagctataaggagaagcagcggaccatccaggccaagaaggaggtggagcagcggagagccggcggctacagccggaagtacgccagcaaagccaagaatctggcagacgatatggtgagaaacaccgctagagatctgctgtactacgccgtgacccaggatgccatgctgatcttcgccaacctgagccggggcttcggccggcagggcaagcggaccttcatggccgagagacagtacacacggatggaggactggctgaccgccaagctggcctacgagggcctgagcaagacctacctgtccaagacactggcccagtacacctccaagacatgcagcaactgtgggtttaccatcaccagcgccgactacgacagggtgctggagaagctgaagaagacagcaacaggctggatgaccacaattaacggcaaggagctgaaggtggagggccagattacctactacaacagatacaagagacagaacgtagtcaaggacctgtccgtcgagctggatagactgagcgaagaatctgtgaacaacgacatctcctcctggacaaagggcagaagcggagaagctctgagcctcctgaagaaaagattctcccatagacccgtgcaggagaagttcgtgtgcctgaactgcggcttcgagacacacgcagccgagcaagccgccctgaacatcgccagatcctggctgttcctgcggagccaggagtacaagaaataccagacaaacaagacaaccggcaacaccgataagagagccttcgtcgagacctggcagtccttttaccggaagaagcttaaggaggtgtggaaacctgccgtgcggtctggcggatctggcggaggctccgcccacgagctggtgatgttcagggacgtggccatcgacttcagcaaggaggagtgggagtgcctggacctggagcagagggacctgtacagggacgtgatgctggagaactacagcaacatggtgctgctgggcctgtgcatccaccagcccgacatgttcagcctgctggagaagggcaaggagccctggaaggtgctgaggtaccagaccaggggcccctgccccgacatgcagagcaggggcggcccaagcagcggcgcccctcctcccagcggcggcagcccagccggctccccaacctctaccgaggagggcacctctgagtccgccacccccgagagcggccctggcacctccaccgagcccagcgagggcagcgcacccggcagccctgccggcagccccacctccacagaggagggaaccagcaccgagcccagcgaaggcagcgccccaggcaccagcaccgagcctagtgagcaggagattaaacggatcaacaagatcagaagaagacttgtgaaagacagcaacaccaagaaggccggcaagacaggccccatgaaaaccctgctggttagagtgatgacacccgatctgagagagcggctggaaaacctgagaaagaagcctgaaaatatcccccagcccatcagcaatacatctagagccaacctgaataagctgctgaccgattacaccgaaatgaagaaggcgatcctgcatgtgtactgggaagagttccagaaggaccctgtgggcctgatgagccgggtggcccagcctgccagcaagaagatcgatcagaacaagctgaaacctgagatggacgagaagggcaacctgaccaccgccggctttgcctgctctcagtgtggccagcccctgttcgtgtacaagctggagcaggtgtctgagaagggcaaggcttacaccaactacttcggacggtgcaatgtggccgagcacgaaaagctgatcctgctggcccagctgaagcccgagaaggatagcgacgaagccgtgacatatagcctgggaaagtttgggcagagggccctggatttctacagcattcatgtgaccaaggagtccacccaccccgtgaagcccctggcccagatcgccggaaacagatacgcctccggacctgtgggaaaggccctgagcgacgcatgtatgggcacaatcgcctccttcctgtctaagtaccaggacatcatcatcgaacaccagaaggtggtgaagggcaaccagaagagactggagagcctgcgggagctggccggcaaggaaaacctggaataccctagcgtgaccctgccacctcagcctcacaccaaggagggcgttgatgcctacaacgaagtgatcgcccgggtgcgaatgtgggtgaacctgaacctgtggcagaagctgaagctaagcagagatgatgccaagcctctgctgagactgaagggattcccttcctttcctctggtcgagagacaggccaacgaagtggactggtgggacatggtgtgtaacgtgaagaagctgatcaacgagaaaaaggaggatggcaaggtgttttggcagaatctggctggctacaagagacaggaagccctgagaccatacctgagcagcgaggaagatcggaagaagggaaagaaattcgctcggtaccagctgggcgacctgctgctgcacctggaaaagaagcacggcgaggactggggaaaggtgtacgacgaggcctgggagcggattgacaagaaagtggaaggcctgagcaagcacatcaagctggaagaggaacggagaagcgaggacgcccagagcaaggccgccctgaccgactggctgcgggctaaggccagcttcgtgatcgagggcctgaaggaggccgacaaggacgagttctgcagatgcgagctgaagctgcagaagtggtacggggacctgcggggaaagcccttcgccatcgaagccgagaacagcatcctggacatcagcggcttcagcaagcagtacaactgtgccttcatctggcagaaggacggcgtgaagaagctgaacctgtacctgatcatcaactacttcaagggcggcaagctgcggttcaagaagatcaaacctgaagccttcgaagccaacagattctacaccgtgatcaacaaaaagagcggcgagatcgtgcccatggaggtgaacttcaacttcgacgaccccaacctgatcatcctgcctctggcctttggcaagagacagggcagagaattcatctggaacgacctgctgtccctggaaaccggcagcctgaagctggccaacggaagagtgatcgagaagacactgtacaacagaagaacccggcaggatgagcctgccctgttcgtggccctgaccttcgagcggcgggaggtcctggactcctccaatatcaaaccaatgaacctgatcggcgtggcaagaggcgaaaacatccccgccgtgatcgccctgaccgaccccgagggctgcccactgagccggtttaaggatagcctgggaaacccaacccacatcctgagaatcggcgagagctataaggagaagcagcggaccatccaggccaagaaggaggtggagcagcggagagccggcggctacagccggaagtacgccagcaaagccaagaatctggcagacgatatggtgagaaacaccgctagagatctgctgtactacgccgtgacccaggatgccatgctgatcttcgccaacctgagccggggcttcggccggcagggcaagcggaccttcatggccgagagacagtacacacggatggaggactggctgaccgccaagctggcctacgagggcctgagcaagacctacctgtccaagacactggcccagtacacctccaagacatgcagcaactgtgggtttaccatcaccagcgccgactacgacagggtgctggagaagctgaagaagacagcaacaggctggatgaccacaattaacggcaaggagctgaaggtggagggccagattacctactacaacagatacaagagacagaacgtagtcaaggacctgtccgtcgagctggatagactgagcgaagaatctgtgaacaacgacatctcctcctggacaaagggcagaagcggagaagctctgagcctcctgaagaaaagattctcccatagacccgtgcaggagaagttcgtgtgcctgaactgcggcttcgagacacacgcagccgagcaagccgccctgaacatcgccagatcctggctgttcctgcggagccaggagtacaagaaataccagacaaacaagacaaccggcaacaccgataagagagccttcgtcgagacctggcagtccttttaccggaagaagcttaaggaggtgtggaaacctgccgtgcggtctggcggatctggcggaggctcctgcccacgagctggtgatgttcagggacgtggccatcgacttcagcaaggaggagtgggagtgcctggacctggagcagagggacctgtacagggacgtgatgctggagaactacagcaacatggtgctgctgggcctgtgcatccaccagcccgacatgttcagcctgctggagaagggcaaggagccctggaaggtgctgaggtaccagaccaggggcccctgccccgacatgcagagcaggggatctggctccggcagcggccccaagaaaaagagaaaagtctaagctgccttctgcggggcttgccttctggccatgcccttcttctctcccttgcacctgtacctcttggtctttgaataaagcctgagtaggaaggctagcaaaaaaaaaaaaaaaaaaaaaaaaaaaaaaaaaaaaaaaaaaaaaaaaaaaaaaaaaaaaaaaaaaaaaaaaaaaaaaaa

SEQ ID NO: 15363 - RNA, 9485 nt, synthetic construct
  source 1..9485: mol_type = other RNA
aggaaataagagagaaaagaagagtaagaagaaatataagagccaccatggcccctaagaagaagcgtaaagtgagccggatggaacgcctcgtctacgaggtgcggcagaagtgcagaaacatcgaggacatctgcatctcctgcggatctctgaacgtgaccctggagcacccactgttcatcggcggcatgtgccagaactgtaaaaactgttttctggagtgtgcctatcaatacgacgatgacggctaccagagctactgcaccatctgttgcggcggaagagaggtgctgatgtgtggaaataacaactgctgccggtgcttctgcgtggaatgcgtggacctgctggtgggccccggcgccgcccaggccgctattaaggaagatccttggaactgctacatgtgcggccacaagggcacatacggcctgctgagacggagagaggactggcctagcagactgcagatgttcttcgccaataaccacgaccaggagttcgacccccctaaggtgtaccctcccgtccccgccgagaagagaaagcccatccgggtcctgagcctgttcgatggcatcgccaccggtctgctggtgctgaaggacctgggcatccaggtggataggtacattgcctccgaggtgtgcgaggactccatcaccgtgggaatggtgcgtcatcagggcaagatcatgtacgtgggcgacgtgcggagcgtgacacagaagcatatccaggagtggggccctttcgacctggtgatcggcggcagcccttgcaatgacctgagcatcgtgaacccagcccggaagggcctgtacgagggaaccggcagactgttcttcgagttttacagactgctgcacgacgcccggcctaaggaaggcgacgaccggcccttcttttggctgttcgagaatgtggtggccatgggagtcagcgacaagcgggatattagccggttcctggagagcaaccccgtgatgatcgatgccaaggaagtgagcgccgcccaccgggccagatacttctggggcaatctgcctggcatgaacagacccctggccagcaccgtgaacgacaagctggagctgcaggagtgcctggagcacggccggatcgccaagttcagcaaggtgagaaccatcaccacccgaagcaacagcatcaaacaaggcaaggaccagcactttcctgtgttcatgaacgagaaggaggacatcctgtggtgtaccgagatggagagagtgttcgggttcccagtccactacacagatgtcagcaacatgtctagactggccagacagagactgctgggaagaagctggtccgtccctgtgatcagacacctgttcgcccctctgaaggagtacttcgcctgcgtgagcagcggcaacagcaacgccaacagccggggccccagcttctctagcggcctggtgccactgtccctgagagggagccacatgggccccatggagatctacaaaaccgtgagcgcctggaagcggcagcctgtgcgcgtgctgagcctgtttcggaatatcgataaagtcctgaaaagcctgggattcctggagagcggctctggctccggcggtggcaccctgaagtacgtggaggatgtgacaaacgtggtcagacgggatgtggagaagtggggccccttcgatctggtgtacggcagcacccaacccctgggcagctcttgtgaccggtgccctggctggtacatgtttcagttccaccggatcctgcagtacgccctgccgagacaggagtcccagcggccattcttttggattttcatggacaacttgctgctgaccgaggatgaccaggaaactaccactcggttcctgcagaccgaagccgtgaccctgcaggacgtgagaggccgggactaccagaacgccatgcgggtgtggtccaacatccctggactgaaaagcaagcacgcacctctgacccctaaagaagaggagtacctgcaggcccaggtgcggagcagaagcaagctggacgcccctaaggtggatctgctggtgaagaattgcctcctgcccctgagagagtacttcaagtatttcagccagaatagtctgcccctgggaggcagcggcggcggcgccctggtgacatttgaggacgtcgccgtgcggttcacccaggaggaatgggctctgctggatccttctcagaaaatcctgtaccgggacgtgatgagagagacataccggaatctgacctccgtgggcatcaactgggaatgttgggaccttgaagcctgcttcagaagcctgggaagaaacctgagagtgcaggtggtgaagagaaagtgcgagctgaccaacagcggcccctgcgccgagggcggcccaagcagcggcgcccctcctcccagcggcggcagcccagccggctccccaacctctaccgaggagggcacctctgagtccgccacccccgagagcggccctggcacctccaccgagcccagcgagggcagcgcacccggcagccctgccggcagccccacctccacagaggagggaaccagcaccgagcccagcgaaggcagcgccccaggcaccagcaccgagcctagtgagcaggagattaaacggatcaacaagatcagaagaagacttgtgaaagacagcaacaccaagaaggccggcaagacaggccccatgaaaaccctgctggttagagtgatgacacccgatctgagagagcggctggaaaacctgagaaagaagcctgaaaatatcccccagcccatcagcaatacatctagagccaacctgaataagctgctgaccgattacaccgaaatgaagaaggcgatcctgcatgtgtactgggaagagttccagaaggaccctgtgggcctgatgagccgggtggcccagcctgccagcaagaagatcgatcagaacaagctgaaacctgagatggacgagaagggcaacctgaccaccgccggctttgcctgctctcagtgtggccagcccctgttcgtgtacaagctggagcaggtgtctgagaagggcaaggcttacaccaactacttcggacggtgcaatgtggccgagcacgaaaagctgatcctgctggcccagctgaagcccgagaaggatagcgacgaagccgtgacatatagcctgggaaagtttgggcagagggccctggatttctacagcattcatgtgaccaaggagtccacccaccccgtgaagcccctggcccagatcgccggaaacagatacgcctccggacctgtgggaaaggccctgagcgacgcatgtatgggcacaatcgcctccttcctgtctaagtaccaggacatcatcatcgaacaccagaaggtggtgaagggcaaccagaagagactggagagcctgcgggagctggccggcaaggaaaacctggaataccctagcgtgaccctgccacctcagcctcacaccaaggagggcgttgatgcctacaacgaagtgatcgcccgggtgcgaatgtgggtgaacctgaacctgtggcagaagctgaagctaagcagagatgatgccaagcctctgctgagactgaagggattcccttcctttcctctggtcgagagacaggccaacgaagtggactggtgggacatggtgtgtaacgtgaagaagctgatcaacgagaaaaaggaggatggcaaggtgttttggcagaatctggctggctacaagagacaggaagccctgagaccatacctgagcagcgaggaagatcggaagaagggaaagaaattcgctcggtaccagctgggcgacctgctgctgcacctggaaaagaagcacggcgaggactggggaaaggtgtacgacgaggcctgggagcggattgacaagaaagtggaaggcctgagcaagcacatcaagctggaagaggaacggagaagcgaggacgcccagagcaaggccgccctgaccgactggctgcgggctaaggccagcttcgtgatcgagggcctgaaggaggccgacaaggacgagttctgcagatgcgagctgaagctgcagaagtggtacggggacctgcggggaaagcccttcgccatcgaagccgagaacagcatcctggacatcagcggcttcagcaagcagtacaactgtgccttcatctggcagaaggacggcgtgaagaagctgaacctgtacctgatcatcaactacttcaagggcggcaagctgcggttcaagaagatcaaacctgaagccttcgaagccaacagattctacaccgtgatcaacaaaaagagcggcgagatcgtgcccatggaggtgaacttcaacttcgacgaccccaacctgatcatcctgcctctggcctttggcaagagacagggcagagaattcatctggaacgacctgctgtccctggaaaccggcagcctgaagctggccaacggaagagtgatcgagaagacactgtacaacagaagaacccggcaggatgagcctgccctgttcgtggccctgaccttcgagcggcgggaggtcctggactcctccaatatcaaaccaatgaacctgatcggcgtggcaagaggcgaaaacatccccgccgtgatcgccctgaccgaccccgagggctgcccactgagccggtttaaggatagcctgggaaacccaacccacatcctgagaatcggcgagagctataaggagaagcagcggaccatccaggccaagaaggaggtggagcagcggagagccggcggctacagccggaagtacgccagcaaagccaagaatctggcagacgatatggtgagaaacaccgctagagatctgctgtactacgccgtgacccaggatgccatgctgatcttcgccaacctgagccggggcttcggccggcagggcaagcggaccttcatggccgagagacagtacacacggatggaggactggctgaccgccaagctggcctacgagggcctgagcaagacctacctgtccaagacactggcccagtacacctccaagacatgcagcaactgtgggtttaccatcaccagcgccgactacgacagggtgctggagaagctgaagaagacagcaacaggctggatgaccacaattaacggcaaggagctgaaggtggagggccagattacctactacaacagatacaagagacagaacgtagtcaaggacctgtccgtcgagctggatagactgagcgaagaatctgtgaacaacgacatctcctcctggacaaagggcagaagcggagaagctctgagcctcctgaagaaaagattctcccatagacccgtgcaggagaagttcgtgtgcctgaactgcggcttcgagacacacgcagccgagcaagccgccctgaacatcgccagatcctggctgttcctgcggagccaggagtacaagaaataccagacaaacaagacaaccggcaacaccgataagagagccttcgtcgagacctggcagtccttttaccggaagaagcttaaggaggtgtggaaacctgccgtgcggtctggcggatctggcggaggctcccaggaccccagcgccgagggcctgagcgaggaggtgcccgtggtgttcgaggagctgcccgtggtgttcgaggacgtggccgtgtacttcaccaggaaggagtggggcatgctggacaagaggcagaaggagctgtacagggacgtgatgaggatgaactacgagctgctggccagcctgggccccgccgccgccaagcccgacctgatcagcaagctggagaggagggccgccccctggatcggcggcccaagcagcggcgcccctcctcccagcggcggcagcccagccggctccccaacctctaccgaggagggcacctctgagtccgccacccccgagagcggccctggcacctccaccgagcccagcgagggcagcgcacccggcagccctgccggcagccccacctccacagaggagggaaccagcaccgagcccagcgaaggcagcgccccaggcaccagcaccgagcctagtgagcaggagattaaacggatcaacaagatcagaagaagacttgtgaaagacagcaacaccaagaaggccggcaagacaggccccatgaaaaccctgctggttagagtgatgacacccgatctgagagagcggctggaaaacctgagaaagaagcctgaaaatatcccccagcccatcagcaatacatctagagccaacctgaataagctgctgaccgattacaccgaaatgaagaaggcgatcctgcatgtgtactgggaagagttccagaaggaccctgtgggcctgatgagccgggtggcccagcctgccagcaagaagatcgatcagaacaagctgaaacctgagatggacgagaagggcaacctgaccaccgccggctttgcctgctctcagtgtggccagcccctgttcgtgtacaagctggagcaggtgtctgagaagggcaaggcttacaccaactacttcggacggtgcaatgtggccgagcacgaaaagctgatcctgctggcccagctgaagcccgagaaggatagcgacgaagccgtgacatatagcctgggaaagtttgggcagagggccctggatttctacagcattcatgtgaccaaggagtccacccaccccgtgaagcccctggcccagatcgccggaaacagatacgcctccggacctgtgggaaaggccctgagcgacgcatgtatgggcacaatcgcctccttcctgtctaagtaccaggacatcatcatcgaacaccagaaggtggtgaagggcaaccagaagagactggagagcctgcgggagctggccggcaaggaaaacctggaataccctagcgtgaccctgccacctcagcctcacaccaaggagggcgttgatgcctacaacgaagtgatcgcccgggtgcgaatgtgggtgaacctgaacctgtggcagaagctgaagctaagcagagatgatgccaagcctctgctgagactgaagggattcccttcctttcctctggtcgagagacaggccaacgaagtggactggtgggacatggtgtgtaacgtgaagaagctgatcaacgagaaaaaggaggatggcaaggtgttttggcagaatctggctggctacaagagacaggaagccctgagaccatacctgagcagcgaggaagatcggaagaagggaaagaaattcgctcggtaccagctgggcgacctgctgctgcacctggaaaagaagcacggcgaggactggggaaaggtgtacgacgaggcctgggagcggattgacaagaaagtggaaggcctgagcaagcacatcaagctggaagaggaacggagaagcgaggacgcccagagcaaggccgccctgaccgactggctgcgggctaaggccagcttcgtgatcgagggcctgaaggaggccgacaaggacgagttctgcagatgcgagctgaagctgcagaagtggtacggggacctgcggggaaagcccttcgccatcgaagccgagaacagcatcctggacatcagcggcttcagcaagcagtacaactgtgccttcatctggcagaaggacggcgtgaagaagctgaacctgtacctgatcatcaactacttcaagggcggcaagctgcggttcaagaagatcaaacctgaagccttcgaagccaacagattctacaccgtgatcaacaaaaagagcggcgagatcgtgcccatggaggtgaacttcaacttcgacgaccccaacctgatcatcctgcctctggcctttggcaagagacagggcagagaattcatctggaacgacctgctgtccctggaaaccggcagcctgaagctggccaacggaagagtgatcgagaagacactgtacaacagaagaacccggcaggatgagcctgccctgttcgtggccctgaccttcgagcggcgggaggtcctggactcctccaatatcaaaccaatgaacctgatcggcgtggcaagaggcgaaaacatccccgccgtgatcgccctgaccgaccccgagggctgcccactgagccggtttaaggatagcctgggaaacccaacccacatcctgagaatcggcgagagctataaggagaagcagcggaccatccaggccaagaaggaggtggagcagcggagagccggcggctacagccggaagtacgccagcaaagccaagaatctggcagacgatatggtgagaaacaccgctagagatctgctgtactacgccgtgacccaggatgccatgctgatcttcgccaacctgagccggggcttcggccggcagggcaagcggaccttcatggccgagagacagtacacacggatggaggactggctgaccgccaagctggcctacgagggcctgagcaagacctacctgtccaagacactggcccagtacacctccaagacatgcagcaactgtgggtttaccatcaccagcgccgactacgacagggtgctggagaagctgaagaagacagcaacaggctggatgaccacaattaacggcaaggagctgaaggtggagggccagattacctactacaacagatacaagagacagaacgtagtcaaggacctgtccgtcgagctggatagactgagcgaagaatctgtgaacaacgacatctcctcctggacaaagggcagaagcggagaagctctgagcctcctgaagaaaagattctcccatagacccgtgcaggagaagttcgtgtgcctgaactgcggcttcgagacacacgcagccgagcaagccgccctgaacatcgccagatcctggctgttcctgcggagccaggagtacaagaaataccagacaaacaagacaaccggcaacaccgataagagagccttcgtcgagacctggcagtccttttaccggaagaagcttaaggaggtgtggaaacctgccgtgcggtctggcggatctggcggaggctcctcaggaccccagcgccgagggcctgagcgaggaggtgcccgtggtgttcgaggagctgcccgtggtgttcgaggacgtggccgtgtacttcaccaggaaggagtggggcatgctggacaagaggcagaaggagctgtacagggacgtgatgaggatgaactacgagctgctggccagcctgggccccgccgccgccaagcccgacctgatcagcaagctggagaggagggccgccccctggatcggatctggctccggcagcggccccaagaaaaagagaaaagtctaagctgccttctgcggggcttgccttctggccatgcccttcttctctcccttgcacctgtacctcttggtctttgaataaagcctgagtaggaaggctagcaaaaaaaaaaaaaaaaaaaaaaaaaaaaaaaaaaaaaaaaaaaaaaaaaaaaaaaaaaaaaaaaaaaaaaaaaaaaaaaa

SEQ ID NO: 15364 - RNA, 9485 nt, synthetic construct
  source 1..9485: mol_type = other RNA
aggaaataagagagaaaagaagagtaagaagaaatataagagccaccatggcccctaagaagaagcgtaaagtgagccggatggaacgcctcgtctacgaggtgcggcagaagtgcagaaacatcgaggacatctgcatctcctgcggatctctgaacgtgaccctggagcacccactgttcatcggcggcatgtgccagaactgtaaaaactgttttctggagtgtgcctatcaatacgacgatgacggctaccagagctactgcaccatctgttgcggcggaagagaggtgctgatgtgtggaaataacaactgctgccggtgcttctgcgtggaatgcgtggacctgctggtgggccccggcgccgcccaggccgctattaaggaagatccttggaactgctacatgtgcggccacaagggcacatacggcctgctgagacggagagaggactggcctagcagactgcagatgttcttcgccaataaccacgaccaggagttcgacccccctaaggtgtaccctcccgtccccgccgagaagagaaagcccatccgggtcctgagcctgttcgatggcatcgccaccggtctgctggtgctgaaggacctgggcatccaggtggataggtacattgcctccgaggtgtgcgaggactccatcaccgtgggaatggtgcgtcatcagggcaagatcatgtacgtgggcgacgtgcggagcgtgacacagaagcatatccaggagtggggccctttcgacctggtgatcggcggcagcccttgcaatgacctgagcatcgtgaacccagcccggaagggcctgtacgagggaaccggcagactgttcttcgagttttacagactgctgcacgacgcccggcctaaggaaggcgacgaccggcccttcttttggctgttcgagaatgtggtggccatgggagtcagcgacaagcgggatattagccggttcctggagagcaaccccgtgatgatcgatgccaaggaagtgagcgccgcccaccgggccagatacttctggggcaatctgcctggcatgaacagacccctggccagcaccgtgaacgacaagctggagctgcaggagtgcctggagcacggccggatcgccaagttcagcaaggtgagaaccatcaccacccgaagcaacagcatcaaacaaggcaaggaccagcactttcctgtgttcatgaacgagaaggaggacatcctgtggtgtaccgagatggagagagtgttcgggttcccagtccactacacagatgtcagcaacatgtctagactggccagacagagactgctgggaagaagctggtccgtccctgtgatcagacacctgttcgcccctctgaaggagtacttcgcctgcgtgagcagcggcaacagcaacgccaacagccggggccccagcttctctagcggcctggtgccactgtccctgagagggagccacatgggccccatggagatctacaaaaccgtgagcgcctggaagcggcagcctgtgcgcgtgctgagcctgtttcggaatatcgataaagtcctgaaaagcctgggattcctggagagcggctctggctccggcggtggcaccctgaagtacgtggaggatgtgacaaacgtggtcagacgggatgtggagaagtggggccccttcgatctggtgtacggcagcacccaacccctgggcagctcttgtgaccggtgccctggctggtacatgtttcagttccaccggatcctgcagtacgccctgccgagacaggagtcccagcggccattcttttggattttcatggacaacttgctgctgaccgaggatgaccaggaaactaccactcggttcctgcagaccgaagccgtgaccctgcaggacgtgagaggccgggactaccagaacgccatgcgggtgtggtccaacatccctggactgaaaagcaagcacgcacctctgacccctaaagaagaggagtacctgcaggcccaggtgcggagcagaagcaagctggacgcccctaaggtggatctgctggtgaagaattgcctcctgcccctgagagagtacttcaagtatttcagccagaatagtctgcccctgggaggcagcggcggcggcgccctggtgacatttgaggacgtcgccgtgcggttcacccaggaggaatgggctctgctggatccttctcagaaaatcctgtaccgggacgtgatgagagagacataccggaatctgacctccgtgggcatcaactgggaatgttgggaccttgaagcctgcttcagaagcctgggaagaaacctgagagtgcaggtggtgaagagaaagtgcgagctgaccaacagcggcccctgcgccgagggcggcccaagcagcggcgcccctcctcccagcggcggcagcccagccggctccccaacctctaccgaggagggcacctctgagtccgccacccccgagagcggccctggcacctccaccgagcccagcgagggcagcgcacccggcagccctgccggcagccccacctccacagaggagggaaccagcaccgagcccagcgaaggcagcgccccaggcaccagcaccgagcctagtgagcaggagattaaacggatcaacaagatcagaagaagacttgtgaaagacagcaacaccaagaaggccggcaagacaggccccatgaaaaccctgctggttagagtgatgacacccgatctgagagagcggctggaaaacctgagaaagaagcctgaaaatatcccccagcccatcagcaatacatctagagccaacctgaataagctgctgaccgattacaccgaaatgaagaaggcgatcctgcatgtgtactgggaagagttccagaaggaccctgtgggcctgatgagccgggtggcccagcctgccagcaagaagatcgatcagaacaagctgaaacctgagatggacgagaagggcaacctgaccaccgccggctttgcctgctctcagtgtggccagcccctgttcgtgtacaagctggagcaggtgtctgagaagggcaaggcttacaccaactacttcggacggtgcaatgtggccgagcacgaaaagctgatcctgctggcccagctgaagcccgagaaggatagcgacgaagccgtgacatatagcctgggaaagtttgggcagagggccctggatttctacagcattcatgtgaccaaggagtccacccaccccgtgaagcccctggcccagatcgccggaaacagatacgcctccggacctgtgggaaaggccctgagcgacgcatgtatgggcacaatcgcctccttcctgtctaagtaccaggacatcatcatcgaacaccagaaggtggtgaagggcaaccagaagagactggagagcctgcgggagctggccggcaaggaaaacctggaataccctagcgtgaccctgccacctcagcctcacaccaaggagggcgttgatgcctacaacgaagtgatcgcccgggtgcgaatgtgggtgaacctgaacctgtggcagaagctgaagctaagcagagatgatgccaagcctctgctgagactgaagggattcccttcctttcctctggtcgagagacaggccaacgaagtggactggtgggacatggtgtgtaacgtgaagaagctgatcaacgagaaaaaggaggatggcaaggtgttttggcagaatctggctggctacaagagacaggaagccctgagaccatacctgagcagcgaggaagatcggaagaagggaaagaaattcgctcggtaccagctgggcgacctgctgctgcacctggaaaagaagcacggcgaggactggggaaaggtgtacgacgaggcctgggagcggattgacaagaaagtggaaggcctgagcaagcacatcaagctggaagaggaacggagaagcgaggacgcccagagcaaggccgccctgaccgactggctgcgggctaaggccagcttcgtgatcgagggcctgaaggaggccgacaaggacgagttctgcagatgcgagctgaagctgcagaagtggtacggggacctgcggggaaagcccttcgccatcgaagccgagaacagcatcctggacatcagcggcttcagcaagcagtacaactgtgccttcatctggcagaaggacggcgtgaagaagctgaacctgtacctgatcatcaactacttcaagggcggcaagctgcggttcaagaagatcaaacctgaagccttcgaagccaacagattctacaccgtgatcaacaaaaagagcggcgagatcgtgcccatggaggtgaacttcaacttcgacgaccccaacctgatcatcctgcctctggcctttggcaagagacagggcagagaattcatctggaacgacctgctgtccctggaaaccggcagcctgaagctggccaacggaagagtgatcgagaagacactgtacaacagaagaacccggcaggatgagcctgccctgttcgtggccctgaccttcgagcggcgggaggtcctggactcctccaatatcaaaccaatgaacctgatcggcgtggcaagaggcgaaaacatccccgccgtgatcgccctgaccgaccccgagggctgcccactgagccggtttaaggatagcctgggaaacccaacccacatcctgagaatcggcgagagctataaggagaagcagcggaccatccaggccaagaaggaggtggagcagcggagagccggcggctacagccggaagtacgccagcaaagccaagaatctggcagacgatatggtgagaaacaccgctagagatctgctgtactacgccgtgacccaggatgccatgctgatcttcgccaacctgagccggggcttcggccggcagggcaagcggaccttcatggccgagagacagtacacacggatggaggactggctgaccgccaagctggcctacgagggcctgagcaagacctacctgtccaagacactggcccagtacacctccaagacatgcagcaactgtgggtttaccatcaccagcgccgactacgacagggtgctggagaagctgaagaagacagcaacaggctggatgaccacaattaacggcaaggagctgaaggtggagggccagattacctactacaacagatacaagagacagaacgtagtcaaggacctgtccgtcgagctggatagactgagcgaagaatctgtgaacaacgacatctcctcctggacaaagggcagaagcggagaagctctgagcctcctgaagaaaagattctcccatagacccgtgcaggagaagttcgtgtgcctgaactgcggcttcgagacacacgcagccgagcaagccgccctgaacatcgccagatcctggctgttcctgcggagccaggagtacaagaaataccagacaaacaagacaaccggcaacaccgataagagagccttcgtcgagacctggcagtccttttaccggaagaagcttaaggaggtgtggaaacctgccgtgcggtctggcggatctggcggaggctccgccgtgaccatggaggacgtgaccgtgaccttcaccaacgaggagtgggccctgctgaaccccgcccagaagaggctgtacggcgacgtgatgtgggagaccttcaggaccatcagcgccatcggcaggacctgggacagccagcagatggaggaggagtacaagaactacctgaggaacctgagcaacgaggaggtggccaagtgctgcaggtacaccaccttcaaccagcacgagaacatcggcggcccaagcagcggcgcccctcctcccagcggcggcagcccagccggctccccaacctctaccgaggagggcacctctgagtccgccacccccgagagcggccctggcacctccaccgagcccagcgagggcagcgcacccggcagccctgccggcagccccacctccacagaggagggaaccagcaccgagcccagcgaaggcagcgccccaggcaccagcaccgagcctagtgagcaggagattaaacggatcaacaagatcagaagaagacttgtgaaagacagcaacaccaagaaggccggcaagacaggccccatgaaaaccctgctggttagagtgatgacacccgatctgagagagcggctggaaaacctgagaaagaagcctgaaaatatcccccagcccatcagcaatacatctagagccaacctgaataagctgctgaccgattacaccgaaatgaagaaggcgatcctgcatgtgtactgggaagagttccagaaggaccctgtgggcctgatgagccgggtggcccagcctgccagcaagaagatcgatcagaacaagctgaaacctgagatggacgagaagggcaacctgaccaccgccggctttgcctgctctcagtgtggccagcccctgttcgtgtacaagctggagcaggtgtctgagaagggcaaggcttacaccaactacttcggacggtgcaatgtggccgagcacgaaaagctgatcctgctggcccagctgaagcccgagaaggatagcgacgaagccgtgacatatagcctgggaaagtttgggcagagggccctggatttctacagcattcatgtgaccaaggagtccacccaccccgtgaagcccctggcccagatcgccggaaacagatacgcctccggacctgtgggaaaggccctgagcgacgcatgtatgggcacaatcgcctccttcctgtctaagtaccaggacatcatcatcgaacaccagaaggtggtgaagggcaaccagaagagactggagagcctgcgggagctggccggcaaggaaaacctggaataccctagcgtgaccctgccacctcagcctcacaccaaggagggcgttgatgcctacaacgaagtgatcgcccgggtgcgaatgtgggtgaacctgaacctgtggcagaagctgaagctaagcagagatgatgccaagcctctgctgagactgaagggattcccttcctttcctctggtcgagagacaggccaacgaagtggactggtgggacatggtgtgtaacgtgaagaagctgatcaacgagaaaaaggaggatggcaaggtgttttggcagaatctggctggctacaagagacaggaagccctgagaccatacctgagcagcgaggaagatcggaagaagggaaagaaattcgctcggtaccagctgggcgacctgctgctgcacctggaaaagaagcacggcgaggactggggaaaggtgtacgacgaggcctgggagcggattgacaagaaagtggaaggcctgagcaagcacatcaagctggaagaggaacggagaagcgaggacgcccagagcaaggccgccctgaccgactggctgcgggctaaggccagcttcgtgatcgagggcctgaaggaggccgacaaggacgagttctgcagatgcgagctgaagctgcagaagtggtacggggacctgcggggaaagcccttcgccatcgaagccgagaacagcatcctggacatcagcggcttcagcaagcagtacaactgtgccttcatctggcagaaggacggcgtgaagaagctgaacctgtacctgatcatcaactacttcaagggcggcaagctgcggttcaagaagatcaaacctgaagccttcgaagccaacagattctacaccgtgatcaacaaaaagagcggcgagatcgtgcccatggaggtgaacttcaacttcgacgaccccaacctgatcatcctgcctctggcctttggcaagagacagggcagagaattcatctggaacgacctgctgtccctggaaaccggcagcctgaagctggccaacggaagagtgatcgagaagacactgtacaacagaagaacccggcaggatgagcctgccctgttcgtggccctgaccttcgagcggcgggaggtcctggactcctccaatatcaaaccaatgaacctgatcggcgtggcaagaggcgaaaacatccccgccgtgatcgccctgaccgaccccgagggctgcccactgagccggtttaaggatagcctgggaaacccaacccacatcctgagaatcggcgagagctataaggagaagcagcggaccatccaggccaagaaggaggtggagcagcggagagccggcggctacagccggaagtacgccagcaaagccaagaatctggcagacgatatggtgagaaacaccgctagagatctgctgtactacgccgtgacccaggatgccatgctgatcttcgccaacctgagccggggcttcggccggcagggcaagcggaccttcatggccgagagacagtacacacggatggaggactggctgaccgccaagctggcctacgagggcctgagcaagacctacctgtccaagacactggcccagtacacctccaagacatgcagcaactgtgggtttaccatcaccagcgccgactacgacagggtgctggagaagctgaagaagacagcaacaggctggatgaccacaattaacggcaaggagctgaaggtggagggccagattacctactacaacagatacaagagacagaacgtagtcaaggacctgtccgtcgagctggatagactgagcgaagaatctgtgaacaacgacatctcctcctggacaaagggcagaagcggagaagctctgagcctcctgaagaaaagattctcccatagacccgtgcaggagaagttcgtgtgcctgaactgcggcttcgagacacacgcagccgagcaagccgccctgaacatcgccagatcctggctgttcctgcggagccaggagtacaagaaataccagacaaacaagacaaccggcaacaccgataagagagccttcgtcgagacctggcagtccttttaccggaagaagcttaaggaggtgtggaaacctgccgtgcggtctggcggatctggcggaggctcctgccgtgaccatggaggacgtgaccgtgaccttcaccaacgaggagtgggccctgctgaaccccgcccagaagaggctgtacggcgacgtgatgtgggagaccttcaggaccatcagcgccatcggcaggacctgggacagccagcagatggaggaggagtacaagaactacctgaggaacctgagcaacgaggaggtggccaagtgctgcaggtacaccaccttcaaccagcacgagaacatcggatctggctccggcagcggccccaagaaaaagagaaaagtctaagctgccttctgcggggcttgccttctggccatgcccttcttctctcccttgcacctgtacctcttggtctttgaataaagcctgagtaggaaggctagcaaaaaaaaaaaaaaaaaaaaaaaaaaaaaaaaaaaaaaaaaaaaaaaaaaaaaaaaaaaaaaaaaaaaaaaaaaaaaaaa
